United States Patent Application Publication US 2006/0135758 A1 - sequence listing, part 4

SEQ ID NO: 5887 - DNA, 2948 bp, Glycine max
  misc_feature (2884)..(2885): n is a, c, g, or t
catcaatcctcgttgctttatttgaggccacattatacgcatctctccaccccccccgcctcagctcctcaaaatccggcttcctcgccagctcatttgctctatgagatagaatctgcgcgagaaagcgacaccaatccttgcaatagagatggtggttaccagaaatattgtgttgttactgctttctattacttttgttgctccaattgtgctctacactgatcgttttggcaccttcaagtacccctttgctgagcaagagtttattgatgctgtaactgcttttgtgagtgcagctgactctggccatttgaatctcctgccgcaagaaacttctacggtctttaaggaaccaattgggcttgtatatacggaggacgctgcaaacacaaagaatttgcttcatggcttgcactttgccaaaccaggggagcatgtatctgccagggtattgtcagctacgaaggacgaaggtcaaaccaaaggggagaaccccatcaaactggtgacagatggaattaatcaaggaaatcaaaacagctatctggtgaaagctgatataactggtgatagtgtaaatggggaagatgctattgatgttgatgacaatgatgggaaactcgctaaatcttctgatgcttctgatctagcatctgaaacaatggacactaagcaggagcaacaacatattaaatcttcaagccaagtaactcagaaaggatctaaattatcggaagccgataagcatattgaccaaacaccacctgatgctcgggtgcggtatctaaaagatcagctcatccaggttagggtatacctttcccttcaggcagtaaggaacaatccccatctcactcgagagcttcgattacgggtaaaggaagtctcacgaacactgggagatgcaagcaaagattctgatttgcccaggaatgcaaatgagagaatgaaggcaatggagcaaacattgatgaaaggaaggcaaattcaaaatgattgtgctgctgctgtgaagaagcttagggctatgctccactcaacagaggagcagcttcatgtgcacaagaagcagaccttgttcttaacacagttgacagcaaaaacattgcctaaaggtctccactgtcttccgttgcgccttacaactgagtattatagcttgaatacttctcagcaacaactccccaaccaacagaagttagaaaaccctagactataccattatgcaatattctcagataacatattggcaacagctgttgttgtgaattctactgttgcccatgctaaggacacctcaaatcatgttttccacattgttactgataggctcaattatgcggcaatgaggatgtggtttttggtgaatccaccaaaaaaggcaaccattcaagttcagaacattgaagactttacatggttgaattcaagttacagtccagttcttaagcagttgggttctccttctatggtagatttttactttaagactcatcgggcaagttctgattcaaacttaaagtttcggaatcctaagtatttatccatattgaaccacctccgattctacctgcctgagatctttccaaagctcaacaaagtgctgttcttggatgatgatatagttgtgcagaaggatctgactggtctttggtcaattgatttgaagggcaatgttaatggtgctgtagaaacttgtggagaacgtttccatcgttttgatcgctatctcaacttctcaaatcctcatatcgcaaagaattttgaccctcgtgcatgtggatgggcatacggcatgaatgtttttgatttggtccaatggaagaggcaaaacatcactgaggtgtaccacaattggcagaagctgaatcatgatagacaactatggaagttaggaactctgccgccgggtcttataacattctggaaacgcactttccaactgaaccgatcttggcatgtcctgggtcttggctacaaccccaatatcaaccaaaaagaaattgaacgggctgctgttatacactacaatggaaacatgaaaccgtggcttgagataagttttcccaagttccgaggttattggacaaagtatgttgactatgatcttgtgtatttgcgagaatgcaacatcaatccataatagatggatctcgtggcatgtgtagggcttgtaatttatattaaagcattatgacaatttttttatagattttcaaagtcaggttttaatttgggcatctctgtacttgtaaatgaaatgtgtctgtgttgtttcctttgtatgtatggttttgcaacttccctattggccttgtggtaaagtgggtttgggagtggtcaagaaatgttaatgaaccgagacaatgcgatggacgataataagtggttggttgggttggggttgaaaaatcacgtggtggtggaacccatttgtcgtcaaacttagcagttggtatgtggggtggggctcatcaaagcactgctcctttccatctaacttcacatttctctcgtgcaagtttatggtgtcggtggatcatattattatatttttagtaaaagaattttggggatagcttctgcctctcaattctcatctctcggcaataaagtttcaattgtttctgtttggcgagccttggtttaatatgcgtcaaagtttttatgtcttagatagttatcttctttacaatacccaaccaaaagggattacatgtataccttttctctgcctactggaagtatctaactagttcaagccattataaggtgcgtaaatgttcaacttttttaatacaattttacatctctagcttgctacgttaaagtgacgatgtcctctaattgaaaattaaataaaacatatatttcttttgcnnaaaaaaaaaaaaaaaaaaaaaaaaaaaaaaaaaaaaaaaaaaaaaaaaaaaaaaaaaaaaaaa

SEQ ID NO: 5888 - DNA, 2613 bp, Glycine max
  misc_feature (2585)..(2587): n is a, c, g, or t
cccgcgtccgctctgagaagggtaagaagccattcaaggaaataaaaatcgcagtcttcaaagaacgggcacacaagaaagcgcgtttttttttcctctcaacgtaacggattttctccttcactgtttccaacatacccagagggaaaagagaaagtgggtcttcttttcttctcagaaagtttcattcttggcttcgaatctcttcattttcttgatctctgtccaaagggtctcgtgtagtgtagtgccttttttttttttttttcctctttttctcgctctagagaatgggggcagtgagaaacattgtgctgctgttgctttgcattactgttgtggctccgattgtgctctacactgatcgccttggcacctttgagtccccttcaaacaaacaggagtttattgaagatgtctcagctacgtaggccccccccccagactttagtcatttgaatctgttaccccaggaaacttcaacggctgtgaaagaacctgttagggttgtgtatactgaggaggattcaactaacaaaaggaatttgcctcaaggcttgcaattggtgaaatcaagggagcatgtgtttgccaggatgttgtcaactacaactgaggaagatctggctaaaaaggagaaccccattaaactggtgactgatggaattaagcaaggaaatcaaggtgatgcatctggtgaaaatgtaaatggggaagatgctattgatgttgatgacaatgatgggaaacttgctaaatcaattagtgcttctactcaagagcctgaaattaaggagcaacaactagccacagaaacttctagcaaaataaaccaaaaaggttctgaattgtctgaaaccaataagcagaatgatcgaacaccatctgatgcccgggtgaagcagataaaagatcagcttatccaagctaaggtctatctttcccttccagttgtaaaatccaacccacatctcactcgggagcttcgattacgggtaaaagaagtttcacgaacacttggggaagcaatcaaagattctgatttacctaggaatgcaaatgagagaatgagggcgatggagcagacactgatgaaaggaaagcaagctcaagatgattgtgctgctgttgtgaagaagcttagggctatgctccactcatcggaggagcagcttcatgttctcaagaagcagactttgttcttaacacaattgacagcaaaaacactgcccaaaggtcttcattgtcttccattgcgccttactactgagtatcataatatgaattcttctcaccaacaattcccccatcaagagaatttagaagacccccatttataccattatgccatattttcagacaacatattagcaacagctgttgttgtgaactcaactgtttccaatactaaggatgcctcaaaacatgttttccacattgtcactgatagactcaattacgcagcgatgaggatgtggtttttggtgaatccacctggcaaggcaaccattcaagttcaaaacattgaagactttacatggttgaatgcaagttacagtcctgttcttaaacagttgggttcccaatccatgattgattattacttcaaggctcatcgagtaacttctgattcaaatcttaagtttcggaatccaaagtatttgtctatcttgaaccacctccggttctatctgcctgagatctttccaaagctcaacaaagtgctgtttttggatgatgatattgttgtgcagaaggatctgactgatctgtggtcaattgatttgaaaggcaacgtaaatggtgctgtagaaacttgtggagaaagttttcaccgatttgatcgctatctcaacttctcaaatcctcttattgcgaagaattttgacccacatgcttgtgggtgggcatatggtatgaatgtctttgatttagcagaatggaagaggcaaaacatcacaggggtttaccacaactggcagaatctgaatcatgatagacaactatggaagttaggaacactgccaccgggtctcataacattctggaaacgcactttccctctgaaccgatcttggcacatcttaggtcttggctacaaccccaatgtcaaccaaagagatatcgagcagtctgctgttgtacactataatgggaacatgaaaccttggcttgagataagtattcccaagttccgaagttactggacgaagtatgttgactacgatcatgtgtatttgagagaatgcaacatcaatccatagataggtcgttttggtatgtttaatcattgaagttttcttagcatttgccagcaccttctaggtctgcgattccatctgtgtagggcttctacttttttaaagctttacaattctttttgtatacgtgttcctgtttttaaattggtattttttggtcttgcaacccttgatcagaaacctgcagagaatgctaactgtacttgtaaatgaaatgaagaggctagttctttttatttctttgtgattcttctttggctctatgttttagattgtaccctcccacctcccctgcccctttttcaaaacaactcgtcttgtagnnntccttttatttcttgtacatgttttt

SEQ ID NO: 5889 - DNA, 2296 bp, Glycine max
gagagcgatgctaataatgtttggtatgtatgcctcgcggccggaggctggctaacaggtgagagtcagacacgcacacgcgtaggtttaatttcatctctcaaagaaatgaatccattgaatatttgtatccttgcttcgctttgcttgcatgcttccttccccattcaaatctctctcagttgtttgttatttaattgaatttaattttgtgatcggaatcggaatcggaatctgagtggatgtggattgggtggtgaaccggtgaaagatgcgacgacgggctgccgagtatcggcgcccggcacgacggaggttttcatattggatctggcttctccttgctttctcctccatcctcggattgctcctcttccttctgcagcacaatcaccaccaccaagatccgcttcatcatcctttgcccgagagaaatgcaagagttgaacattttgctaaggagggcttgaattttactgaagagattttaagtgtagcatcattttcgcggcagttagcggaacaaatgatcctggccaaggcttatgtggttattgccaaagaacacaacaatcttcaccttgcctggcagcttagctcaaagatcagaagttgccagcgtttgctttcgaaagctgccatgactggtgagcccatcacactggaggaagcagagccaattattaaaagcctttcttttctaatgtttaaggcacaagatatccattatgacattgcaaccacaatagtgactatgaaatcacatattcaagctctcgaagagcgggccaatgcagcaatagttcaaagcactgtgtttggtcaaatagcagcggaagcagtacctaagagtcttcattgtctaaatgtgaaactcatgtctgattggctaaagatgccatccctgcaagaattctcagatgagaggaaaaactccccacggcttgtggacaacaatctatatcatttctgcatattttcagataatgttctggcaacatctgtagttgtaaactcaactgtctccaatgcggatcatcctaagcaattagtctttcacattgtcactaatggaatcaattatggagcaatgcaagcatggttcctaaataatgactttaaaggagccaccatagaggtacaaaacattgaggagtttcattggttgaacgcatcttattctcctctttacaagcagcttcctcaatcctgattcacaaaccttctactttggagcatatcaagatttaaatgatgaacccaaaatgcggaatcccaagtatttgtctttactgaatcatctccggttttacatccctgagatttatccgcaacttgagaaggttgtcttcctggatgatgaccttgttgtccagaaggatctgacccctcttttctctctggatttgcatgggaatgtgaatggtgcagttgaaacttgtctggaagcatttcatcgttactacaagtatctcaacttctcaaactcaattattagctcgaggtttgatccgcaggcatgtgcttgggcatttggtatgaacatttttgacttggttgcatggcggaaggcaaacgtgaccacaagatatcactattggcaagagcagaatgctgatgggactctctggaagctggggacacttcctcctgctcttctttgtttttatggtttgacagagccacttgacagaagatggcatgttttaggattgggttatgacctaaatattgacaaccgcctcattgaaagtgcagcagttattcacttcaatgggaacatgaagccatggttgaagttagctataggcaggtataagccactatgggacaagtacataaatcaaagtcaccctcatctacaagattgtgccacaagttgaaatgcactacttctcaatatctgatggattatgcaatctcagattattttatactcttgatctgtggttgccttaatgtagagtcagaagtagaaaattttgacttcgctaggaatattttttcgccccttctctttttcttttccccaatttttcttttgaattagtcttgaaagagaacagaatgatttcttatacactacaaagttgatatgcgttaggtgaagagatgtgggagaatccatttttggccggtgcggctatcttttccccttctgcaagtggtagaatgattgttctttagtaattcttgtaataatttatcagctctttcaaatagcaatgtaatcgaatgaaaaacatttctttccccgtccaaaaaaaaaaatttgttagagagatcttacagtagt

SEQ ID NO: 5890 - DNA, 2522 bp, Glycine max
cccgcgtccgaagaaaacccccgcagccaacccgacccgtcttctttctttctccgccgcgccataccacacaacacaaaacgcaagtcaattggcgtcggcacgattcagagatttggttcgctgcctgaaacctaatggctccgaaggccaaaccggcgccatcgcagcctgctcctcctcctgccctcgaagatctcttcaccacgctcaaccgccacatccaggcttccgcatacgacaatgccgtcaagctcacagatcagattctcgccattgctcccggcgacgaggacgcgctccgatgcaaggtcgtcgcgctgataaaaaatgaccgcgtcgaggacgcgctctccgccattcattcctctaagaagcagcttgatgattttcatttcctcaaggcatactgcttatacagacaaaacaagttggatgaagccttggagtctttgaaaagacaagagagcaatgatgaaactatgcttttggaatgtcagatattgtatcgacttgggaaaatggatgcttgcttagatatctaccgcaagttccaaaattccaagattgataacatggaaataaattctgttgctgccctagttatggctggcaggtcatctgaagttcaaggaatgttggattcacttcgggttaaggcaacaagtagctttgaattggcatacaacactgcttgttctttaattgcaaggaatgagtactcagatgcagagcaactcttattgtcaggccgaagaattggtcaagaggtcctgatggaagataacctggccgatgatgacatagaaattgaattgtctcctatagctgtccaattagcctatgttcaccagcttcttgggcgtaagcaagatgctattgaagcttatacagatgtgattaaacgagatatggctgatgaatcatcaattgcggtggctgtgaacaatcttgtttcactgaaaggtccaaaagatgtttctgatagcctaaggaaacttgatcgattaaaagacaaggagaatcaaagcttccgactagctcctggactagacttgaaactttcagcaaaagaaaaggaagcaatatatgcaaatagggttcttttacttcttcatgccaataagaatgagcaggcacgagaacttgtttctgcattaccagacatgtttccagaaagtgtcataccaatatttctgcaagctgccctcttggttagagagaacaaagctggaagggctgaggaaatactagcacagtttgctagtaagttccctgagaagtccaaagttgttcacttagcccgggctcaggtagctgctgctgctggccacccacatattgcagcggattctctggctaagatatcagatatccaacacatgcctgctactgttgccacccttgtgtctttaaaagaacgagctggtgacattgatggcgcagctgctgtgcttgacgctgcaattaaatggtggtccaatgctatgactgaggacaataagctcaatactataacacaagaggctgcttctttcaaactcaggcatgggaaggaagaggatgctgctcaactctatgagcagctcgtcaaaagccagggaagcatagaagcactagttggtctggtaacaacagttgctcgcatggatgttgttaaggcagagctttatgaaaagcagctgaaggctctacctggtttaaagggaattgatgtggacagcttggagcgtacttctggagtgaaacaagttgatgctcctcgtgttggtgtccctgaaacatacgaggaaggaaagaataagacaaaatctaagaaaaagagaaagagaaagccaaggtatcctaaagggtttgaccctgcaaatccaggtcctgccccagatccagaaaggtggcttcccaagagggagagatcaacatataggcccaagaggaaggataaaagagctgctcaagtgagagggtctcagggtgctgtagttagagataagcatgatactggtgcctcatctaacagttcaaatccaaaatcaaaccagggaacctccaaaggagctgcgcagaatgcggtttcccggccgcccgggccttcatccaagtcaagaaagaaatcgaggaattaaataggatcatggtttttgatgaacttttttatttgacaatttgttaatgctgttttcaatgactaagatgagggtccatacatacactgtggtctgtgggttctaattcaaaaccgtcagttttggttcaaggaatgagtatatctgttagatgcaagcatcaatgtgcaagtttgtcgtgcgtagtttgtttgagtttatgggaatcattgaaatatcacctttctgttgctgaacgcattattttctttgatttggctgtgctcttttccaatgcctccagacctctagtatattgtgggcgtaaacttgcactattctctaattatatattacaataatgtatcaaagtttgaatacttaaagattgtatattataataaaaaaaaaaaaaaa

SEQ ID NO: 5891 - DNA, 1771 bp, Glycine max
tgcaccgagaattccccatatgaaggtccttttaaaaaaaatgctccttcatggtgttatgcgccttttgagccagaaggcattttaaggttctgtatatggtctctaaatcctcttaagctacgtaggcccccccccccccccattcgattaacagattttaatacttatctacattggctttgtttgatttgaagtagatgtcatcattatatgtgatctaataattgaaaatgtcactcacattgttactaagactactaaaagctataaaagactaaagaaaataagataaaattctgatttcattcattggtccatcaagagggtgcaaagcttacattaaataataaccctaatgaatgataaccctccacttgtcatcatctagtattttaggaaattaaaataaaaactactattaaaaggataatacctaagtcatctaatatttaaactacctatttgggcctctctaagcccatcctatcacattgttacaaagaaagagttaaggactcccatatgcattcttcttttgttccacagcttggttagagcacaccacgtgttttcctgacaattttgaaatgctcagacccttttgaggactttgctatgattatgaatacgcccctttattgggcacagcagatgtataactcgttccactgttcctgatagcaatgtcatgtgcaactgcagttcaatatctgctatcctctccacaatcattggattgcattttggacatgtactcatacacttacaggatcatccttctaggctgaagcactggcttctcctaggcttagctctccttacttcaggacttattcttcacttcactcatgccattcctttgaataaacaattgtacacgctgagctatgtttgtgtaacatctggagcagcagcattacttttttcagccttctatattacggttgatatttggggtttgacattcttgttcttgcctttgaaatggattggcatgaatgccatgcttgtttatgtcatggcagctgagggaatcttcgctggattcattaatgggtggtattatggtgaccctcataacacgctgatctattggatccaaaaacatgtctttattaaggtttggcattcaacgagagtaggcatcctgttgtatgtgatcttggcggagatcctattctgggctgttgttgcaggcattttgcaccgtttgggcatatattggaaactttgaattttttttaaaaaccatctcttgtcattattattaattttttaagtgtgtatccgttctgttgctgtatattcaacttggcgaatggctgcagagccatttcggttagcaaaataggttgttgttgttatgggtatcattcgctaaaaaatgtaaaggacaaagacataaactagcttgacaaaagttaagtgcagttccccatgatcctttgatatgattttccaatcaaaattagacttttactgtaataactaacttaatttatattatatgaatcactaaaaagaactctaaatttttctaataattatctcttctaaagtgaaacttatttttctagtcattatgtaatatacatgcataataaaaaaatcattaatgtgtttgaaatattaatagttaattaattaattttcttgtacactactttattcttttttaagttagtaaaatagatcgtatagcgcactttttattgggcctttaaccggcccacaagctctgtttcagaatattaggaaaaaaaaaaaa

SEQ ID NO: 5892 - DNA, 1166 bp, Glycine max
attttccacaaaggcggctatcttctttataacacttatcatttgggataccggatttttcatatttcttcaagtttcattctaaacttttttccttctaataatggctgcaacaacaagttcccgtgcatccatctacgatgtgttcctcaacttcagaggggaagacacacgctatggtttcaccagcaatctctacagggctctttctgacaagggaattcgtaccttctttgacgaagagaagcttcacagcggagaggaaataacacctgcacttttgaaggcaattaaagattccagaattgccatcactgtgctctctgaagactttgcttcttcctcattttgcttagatgaacttacatccattgttcactgcgcccagtataatgggatgatgattataccagtgttttataaggtgtatccttctgatgtcagacaccagaagggtacttatggagaagcattggctaagcataagataagatttccagaaaagttccagaattgggagatggctctgcgtcaagttgctgacttgtctggctttcatttcaaatacagagatgaatatgagtacaagtttattgagagaattgttgcgtcggtctctgagaagattaatcctgctagaatacatgttgccgatctgcctgttgaacaagagtccaaagtgcaaggtacccatcaagagcaagaatacagagaggctttcaaggtgtttgacaaggatcaaaatggctacatttcagcaagtgagttgaggcaagttctgatcaaactgggtcaaaacacaactgctggagaggtggaggagatgattgcaactgcagatttggatggtgatggtcaaattagctatgaggaatttgttaagactatgaaaatttaaaccaacaaattaataagtcttccaattaatgtttgttgtattttacttttatcacatgcattgatgtgaatgatctcagccgcccatttcatttgttcaaacttcaacccgtaattattctttcagttttagtttagtattcttcatgtttcaaaattaattggtgtaaatttattcaagaactgtggaaattagactctatctttcttgtcttgaaacattaatgtatgctacaattttatgatgccaataagttgagttccaaggt

SEQ ID NO: 5893 - DNA, 868 bp, Glycine max
  misc_feature (850)..(850): n is a, c, g, or t
ggtttaattctctctccctctctctctctctctctctctctctcttttctgagtcacaaaatattgtttttgtacaaacattaacaccatggcagatgtcctgagtgaagaacagattggtgagatcaaagaagcctttggcttgtttgacaaagatggagatgggtgcattactgtggaagaattggccactgttattcggtcattggatcagaaccccacagaagaagagctccaagacatgataaacgaggtcgatacagatggcaatggaaccattgaatttgttgagtttttgaacttaatggccaagaaaatgaaggaaactgatgcagaggaagatctcaaagaggctttcaaggtgtttgacaaggatcaaaatggctacatttcagcaagtgagttgaggcacgttatgatcaatctgggtgaaaaactaactgatgaagaggtggagcagatgattaaagaagctgatttggatggtgatggtcaagttggctatgatgaatttgtcaagatgatgatgattattggatgaaaatttaaaccaacaaatttattgttcgaattcgtttttgtgccccactctcatttactcccaagaaattaataagtcttccaattaatgtttgttgtatttaacttgtacacatgatgtgaatgaccaatgtattagagtgacatctcagccacccatttcatgttcaaacttcaacccataattattctttcagttttagtttagtattccttatgttttacaattaattagagtaaatttattcaagaaccgttgaaattaaaaaaaaaaaaaaaaaaaaaattaaataaaaaataaaaaaggtcnggggcggacggggcggcc

SEQ ID NO: 5894 - DNA, 758 bp, Glycine max
gaagctggttctcatcaatcaatggatgatttcaggaacaagtccagttcccttcggttgaagttccccagagatcatagcagtcaaaatgtcaatgaagacattgacctcttaagatttggagatgcggattcagaggagagattaagtgacatatctgatggtggtctttcaatgggaaccgaaactgaaggttcaatcagcagtattgtggagtacactcttttccctgaacttgagaaggcagctgaaattacaccaatgaaggacaccacaaccgacaaccttccagctgagagcacagaaaagcctattatgccatccaaaattcccaaagcttctcaagtcccacaaaaagtgcagtcaaaacattctaggcattcaatgaacaaaacctcctcgaaggttctgtcaagtgttagaaaacccgcagccagtagctcttcttcggtgaagccccctaaacgatggcaatagttaggatgccagttggatgcagtagagtgcttatttatagctatagccggtaggaacttttttatttatgttaggtgatcattctaattacactttactcaaggctcaagggtcagctcagttcagcttcaatctgttatggaatgaggcgaattgcaaattgtaaccagtctgtatgtaagcatcatggccttttatgtcatatcaccgaatctgctgtatttacaactttccattcagtaatgttatctacgatgttgtacaaaaaaaaaaaaaaaaaa

SEQ ID NO: 5895 - DNA, 908 bp, Glycine max
ttttttttttttgaaagattttccaaatcgcttaatggtcaagagggtctgagaaacgttggaattttaccccaattaagtttccaccttattcttctagaaatcagagcttaaatacagtacaatttccaatgccaagaatgcgcattcatacaatggtatatatcagaggttggattgccattgtcacatgaagtacaaattcaaaatgcattcttgttttaaaatttcacaaagcagttacaaatgttccagatacaaatttatttaagagactggacaaaagtaccagcatgtaatttagagactggacaaaagtaccagcagcatgtaatgaaagaagcagatagagatggctgaaataacatcaccatacatcaggacgcaactcaccacttgctgggggcacccatctcccagagtgatacacactttcaccaactttccaaccaggcacatccttcatcacttctgcctcatactcgagatatttatgccactctttaacaaatctctcatcctcttcagcctgtagcacaggcagtatggatcggcgggcagcatacttttcttccttcagtgcccttcggatcttgttgccctggccgacctggtacatgccccaagagaaagcgccgaaagcagtgaggaagatggcaacggcgctggggcccttgttggggatgcgccgggcgaaccggaccggagcgaacccgcctggtggtggaccgtcctggagaaccggcatgtccttcacgctcgccatcccgggcttcttccttatatatgcctccgtcatctttctttcttcgccgctatctcttctcttcttctccggctacaatacaatataacaacaatggaatgctctcgctttgtttcttctctctatgaatgtgttagccgta

SEQ ID NO: 5896 - DNA, 1114 bp, Glycine max
gttttggaactttatcagaagttgatgggcatctgattgcagttgggtctttagaatgggttgatgatcgcttccagacaagagcgaacccatctgatatgacatatctggagaatagtttgatgaatcattcattgaatacaacatctttaaagtattcaaaaactgttgtctatgttggacgtgaaggagaaggcatcattggtgcgattgccatatctgacactgtgcgtgtagatgctgtatctactataacaaggctcatgcagaaggggatttaaacagtcctcttgtcaggagccagggaagaggcagttgcacctggagcagatacagttggaattgaaaaatgattctgtcgaacatcctaatcgaaaacaacagaaatctggatttatttcctctctgaaagctgctggacatcatgttgcaatggtaggtgatgggataaatgatgcaccctctttggctgtggctgatgttgggattgctctgcagaatgaagctcaagagaatgctgcctcggatgcagcatctatcatacttctggggaacaaaatttcacaagttgtcgatgcgctagacctagcacaggcaacaatgggaaaagtgtaccaaaatttgtgttgggcggtcgcatataatgttgttgccattcccattgctgctggtgttttacttccccattttgactttgccatgacaccgtcactttcaggaggactgatggctctgagctccatcttcgtggttggcaactcactgcttctacagcttcatgggtctcagatctctagaaaggttgggtcaactatagaaatcatatcttcccattcgaacacagatatgcttaatttaaaataaccatcggagttgtgtgcattatagagtaagccgtaatatacgttcgagcacagatacgctcaatgtaaaataatcatcggagctgtgcattattatatagaatattctactctcatgaagtatcctagcatgcatttagtatattttcttatacttttatcatgaacggtaactgtgacggaatattataaatcaattagtttcaactgaataacaaattaattttaaatatatattttatctttagaat

SEQ ID NO: 5897 - DNA, 1050 bp, Glycine max
gtcagctacgtaggcccccccccccataagatttgaaagcgccataccaaaagggaaaatacagaaaaagaaagaaaaaaatccctaaaagccatccgaatttcccaattgtggcataggaatgccctcttgttctctatttcaccacacaaattcccaattctaacttggtttttttttgtctctcacacactcctttcaatctccaattaattacttttcttcaatttgaagcgtgtctgaagttggttgaagcattgtgttattgttctggttttggtctccgaggtttgtgtcggattccgatgtattatgtaaaagaagctgcgcatgtcgaccccatgttcgtagctgataacaccaaccccaaggattattacaaagtgctggaggttgaatatgatgcaaccgatgaaaatatcaaattaaattaccgaagactcgcgctgaaatggcatcctgacaagcacggaggagatagtgctgttactgcaaaatttcaagagataaatgaagcttacaatgtattaagtgatcctaccaagcgtttggactatgatttaactgggatatgcgagattgaaaaatatagcttgcaggagtatcttgccagatttaaaagcatgattcttacctgcaatggacttggtatcaatcagacagacagatggtctcagcaattgattgaaaattttgagtccctagataaataaggcatctgaatcacaatttcggccagtggagtgatgaataagaatatctaagcttgtcttttttctttaacatgctcttaaattccaccacactcgatttcactgagttttgaaacctccgtaattgacaatgcaacctggtctgacggtatcatccgtactactgtaacattatgctacatcaatgtgtacgtttagaatgatctgttgtaataaaccttgtacaagttttctttcatgcatcttccctcttagtttgttgactggtcggtaataagttgcatttacctgtatatttaatcaattaatccatttatcattctctatcaaaaaaaaa

SEQ ID NO: 5898 - DNA, 1592 bp, Glycine max
  misc_feature (94)..(94): n is a, c, g, or t
atgttgaagttccagggcaatatttcactgatcaggaaattgcaccagatcataccgtgaagttggatagggttgctgctgatattccaattgngcagaggcatgggagcagttgccggcgcttgactctaattggctctgatggttcccaacgccattttattgtccagacatctttgactcccaatgctagaagtgatgaacgcatactgcagcttttccgtgtgatgaaccaaatgtttgagaagcacaaggaatcaagacgccgtcacatatgcattcacacaccgataattattcctgtttggtcccaggttcgcatggtagaagatgatttgatgtatagcactttcctcgaggtctatgagaatcattgtgcaaggaatgaccgtgaggctgatcttccaataacctatttcaaggagcaattgaaccaagctatatctggccaaatatcaccagaagctgttgtggatcttcgtctgcaagcctataatgaaataactaaaaatctagttaatgacaacatcttttcacagtatatgtacaaaactctacctagtggcaaccatagttgggctttcaagaagcaattcgccatccagttagccctttcgagtttcatgtccttcatgctgcaaattggtgggagatccccgaacaagatcttgtttgcaaagaacactggaaaaatatttcaaactgattttcatcctgcatatgatgcaaatggattgattgagtttaatgagccagtcccatttaggctgacaaggaacatgcaagccttcttctcccatggagtggaaggccttattgtatcttcaatgtgtgctgctgcacaggctgtggcttcacctaaacaaagtcagcacctatggcatcacctagcaatgtttttccgtgacgagctactgtcttggtcttggagaagaccgcttggtatgcccatggcccctatggctgcaggtggtactatgagtcctgttgacttcaaacagaaagttatcacaaatgtggaacatgttattacaagggttaagggaattgctcctcagaatttttctgaagaggaggaaaatgttatggatccaccacaacctgtgcagaggggtgttactgagttggttgaagctgccttgaacccaaggaacttgtgcatgatggatccaacgtggcatccctggttctaagttttgatggcagtcttttcttgagaagtatgtagcagtaccgtaaatatgtgtgtacatattccagcttttttattatattgaaacccaattgtaaatcattatattgggtttcatttatcttcttctgctataggctagagcgattcaccgtagaatattacctacaagaacatgacccggtacccatatttattattacgtggtgtcattgctttgtagaagtggtccgcgggttatttaacgcggtacgatgcgtgtacatctgtaaatcatgagtagaagacgattttttatatttgtgcagaattaacctgttgcttttattatttaaataattaattagttgttatctagcctcaattgagaactaaaaaaaaaaaaaaataaaaatcaaaa

SEQ ID NO: 5899 - DNA, 2015 bp, Glycine max
ggctcgagattatattaatctcagctacgtaggccccccccccttcaaattccaacaacaccaaacaccatgaacaaagttcacatcctggcgttcccatacccagcacagggccacatcctcccactcctcgacctcatccaccacttagccctacgaggcctaaccgtcacaatcataatcacaccaaaaaacgttcctatcttaaaccctctcttatcctcgcatccaaacacggtccaaactttagttctcccatttcctccccaccctaacatccccgctggcgcagagaacgtccgtgaggtcggcaacagaggaaactaccccttcatcaacgccctctccaaactccaaccagaaattatccactggttcgcaacccacagtaaccctcctgtagcactcgtctccgatttcttcctcggttggactcagcaactcgcttcccaactcagtattcctaggatcacgttctactgctccggcgcgtccttaatcgccatcctccagcgctgctggaaaaatctacacttttacaattcacagggagataataatattattaattttcccgaaattccgggaacgccgtcgtttaagagggagcacctccccacgttgttcctccgctacaaggaatcggagccggagtctgagtttgttagagagagcatgcttcttaacgacgcgagctggggatgcgtgttcaacacgttccgcgcgttggagggttcttatttggatcacattaaagaagagttgggtcataagagtgtgttttcggtcgggccgttgggattgggtcgggctgagtccgacccaaatagaggatccgaggttttgcgttggcttgacgaggtggaggaagaagcgtcggtgttgtacgtttgctttgggagtcagaagttgatgagaaaggaacaaatggaagcattggcggtgggattagaaaaatccgaaacgagattcgtgtgggtggtgaagacggcttccacgaaggaagaaatggatgaagggttcgggttggtaccggaggggtttgcggatcgggtttcgggtcggggcttggttgtaaccgggtgggccccacaagtggcgatactgagtcaccgagctgtgggggggtttgtgagtcactgcggatggaactcggtgttggaggcgatgacgagtggggttgtgattgtggggtggcccatggaggcggatcagtttgtgaatgctaagatgttggtggaagatagagggctaggggtgcgggtttgtgaagggtcggattttgtgcccgacccggatgagtggggtcaggtcgtgaaagcggttatggttagagacagtgctgagaagagaagagcgaagttgatgagagaggaagctattggggctgtgagggaaggtggcgagtcttccatggatgtagagaagctcgtgaaatcgttgttggagcttggtgttaaacaaggataagtgagtgttcttccttaatctatttgttgtgttcttttatctaagtctaacctagagtttactagacatagtctaaaagcattcaactgcgactgaaagcattcgaatatcaatttgaaacatgcatacaagataaatgataggtcggttggtatacaaccatgaaggaccttgggatcatcctttgttagcatacaacaagtaaggatacaacaaatacataagtgtcaagcctctggtgctcaagcacaaaaaggtctgaatatattatcggaatccgtgtggtcaaaccttcctaatctgaagctgcacgatggctgcccactgattggaaagaacacataatcttctagccttggtggatgagcatgaagagagtctaagtcctaagtgagaatacaaattttatttgggaagaaacttcaaatgtgacttgtattttcaaagcaattaatgattatgaaattaaaagtgtaatttttttttttgataaaatcttattaatatacgctcatcgttagttttcatagtgtaaaaaaaaaaaa

SEQ ID NO: 5900 - DNA, 1785 bp, Glycine max
agatccatttctcttcactttcccgaaaaagaagaaaaaaaaagcaaagaaaatcctgtttcccgataaaaaccccgtccgtacatggtctggtcacgcggatcgggttgattgagatgcacaccgcgagcaggagcaacggcggcggcggcggcgtgctggcgtcgcggacgagttcgcggtcggtgacggagacggtgaacgggtcgcacaagttcgtgataaagggatactcgctggcgaaggggatcggagtcggaaaacacatcgcgagcgagacgttcacggtaggagggtaccagtgggcgatatacttctaccctgacggcaagaacccagaggacaactccgcctacgtctccgtcttcatcgcgctcgcctccgagggcaccgacgtccgcgccctgtttgagctcacgctgctcgaccagagcgggaatgggaagcacaaggtgcatagccacttcgatcgctcgctcgagagcggcccctacactctcaaataccgcggcagcatgtgggggtataagagatttttcaaacgggctcaactcgaggcgtcaactttcctcaaggatgactgcttgaagataaactgcactgttggtgttgtggtgtcttccattgattgttccaagttaaacacaatacaggttcccgaatccgatattggggcacatttcgggatgctgttagagaatgaggagggatcagatgttactttctctgtcggtggagaaaggtttcatgcacataagcttgttttggctgctcgatcaactgcatttgaaaccgagttttttaatgggatggaggaggatgatcatgatgtagttgttactgacatggaaccaaaagttttcaaggctttgcttcattttatttatagagacactctaatagatgatgaagagctctttatgtcacgttcatcattcttgccttcggtatctgaatcatttgctgcaaagttgttagctgctgcagaaaagtatggtttgccaagacttaaactgatgtgcgagtctgtactttgcaaagacatctccatagattctgttgcctatattctggctcttgctgatcgttatcgtgctacagaattgaagtctgtctgtctacaattttctgctgaaaaccttgtcgctgtgatgcaatctgatggttttgagtatcttaaggaaaattgtcccttgctgcaatcagaactgctaaagactgtggcaggatgcgaggaggaatttagtggagaaggaaagtgtcgaagtgtgtgggcccaattttctgatggtggtgacaccaatgataggagtgtaagacaacaaacctgggaaaatggtgttgaaagaagtcaaagcttatgggttcacctttctgatggtgttaacaacaatgataggagtccagggcaagaaacctgacaaggtaaggtacaccatcatttgtctgttaggcttaaatggtagattaaaagctactgcagggataagattaaccaattgtgcggactggcaaaaggttagaaatgcaaacaatgtaaagaacgaaggctgagatactgcctccattgtaataatattatgtcttataaatactgttttttctttgataatatgattacaaggatgcagtggtagcaataagtaattacattgatcattgtatgaaagtttgttgagaacattttcattaagaactggtcttgtttacttggcggttgtatttcatgaagaaatttgttttcgagctataaaaatagccgtattttctggtctaaacacaaaa

SEQ ID NO: 5901 - DNA, 852 bp, Glycine max
ctcagtatagccctcctcaactacatttgcaatctcataatgaaccccaaccactacagtatcagcctcagcctcatccacacttactgtctcagcccccacccccaccacacttgcatcctcagccccaaccccagccacaatatcagccccaacccgggcccattcagcaacctcaaccgcagtcacaatttcagaatcaacattttgaataccctgcaagatatcctcccccaccatgggccgctacacctggatatgccaactatcaaaacaactcacctgctacaaatatgattcctcaagccaacactgcggcatcttattcatctgcaccaagggttaggcccgtgcaacacaataactcattcccctccagaggtagcggtggagctcctgcaagtgcaactggacaaaagctgtttgttccatcttacaggttatttgaagatttgaatgttttcggaaacacggatgcaagggtaaagatgaccaacagtggctcatcatccagcttgtcagggtcaatgggacctggtatggttggtgggcgaaagtgaaggcttttattcatgtgtaaaaaagatgtgttgatatactgtataaaatgggaccagctgtattgttagtttcttctcatttgcaggttatgtaagttctttagattgatacgagtgactccttcctattttatgagtagatcataaagtcattactcattagtttgagtgttacctcaaacgacactttgaacattctttgatgcaagtttagtttgtggtaaaaaaaaaaaaaaaaaaaaaaaaaaaaaaaaaaaaaaaaaaaaaaaaaaaaaaaaaaaaaaaaaaaaga

SEQ ID NO: 5902 - DNA, 1345 bp, Glycine max
gattgtgcagtggtgtactgcacatggagttcctcttgagccaccagaggtcacggatgcgatgggtgaagctttcccatcggcctgtccctccaaagctgcccttgaagccaacagagccacagcaacacttctcattcaacagctcgctggtgggtctcaagctgggaagactgtggctgctagggagattcggttgctcgcaaaaactggaaaggaaaatcgtgccttcattgcagaagctggggcgattccgtatcttcggaatttactttcatcacccaatgcggttgctcaggagaattctgtgactgcgctgctcaatttgtccatttttgacaagaacaaaagtaggattatggacgaggaagggtgtcttggatcaattgttgacgtgttgagatttggacacaccacagaggcaaaggaaaatgctgctgcgacgttgttcagtctatcggccgtccatgactataagaaaataattgcagatgagatgcgagcagtcgaggccctcgcaggactgttgcaagaggggactccaagaggaaagaaggatgctgtgacagctttgttcaatctttccacacacactgagaattgtgttagaatgatcgaggccggggcagtgacagctcttgttagtgctttggggaatgaaggagtttcagaagaagcagctggtgcactggccttgatcgtccggcagccaattggggccaaagcagtggtgaatgaggaatcagcagtggctggattaattggaatgatgcgttgtggaacaccgagaggtaaagagaatgcggttgcagcgatgctcgagttgtgccggagtggaggtgcagctgcaacagaaagggttgtgaaggcaccagctttggccggattacttcaaacccttctttttacggggacaaaacgcgcaagaagaaaagcagcttcacttgcaagagtttttcagagatgtgagcatgcaactttacattatggtggattaggtgttggctatgcgtttgctagcaattcaaatacaactagggataccagctttgcgggtgatgtttcagtaccaatgtccatttctgtgttatagtggtaatactcctgtgtttacttaagttcccaatttttgttgtaacttgtaagtgtttacagattcttttattgaaatttaaagtcataagaaattatagcaatatcatcatgtattctaagagatccaggagtgttgttgagcagttagcctcaacacatatgttatgagtcaaatgatgtaagaatagagaatgctcataaaaaagagagacccatgtctggaatcaatataaaatatattaaaatattg

SEQ ID NO: 5903 - DNA, 2126 bp, Glycine max
  misc_feature (507)..(507): n is a, c, g, or t
  misc_feature (527)..(527): n is a, c, g, or t
  misc_feature (539)..(539): n is a, c, g, or t
  misc_feature (1106)..(1106): n is a, c, g, or t
tcagctacgtaggcccccccccccgaataaggaaacaactttgatggcagtgagtttccgtgagccaaatcaccatacatgttcaaaaaaagaggattaggttgatggagtgacatcaaacttcaaagtattcgcatccacggagcgtgaagtccaacgtgcttgacactacgtggagagagagagtgtcctcagaaaccaaaacaaaaccccaaaatttttgaaataaccctctctcacgtttcttcttcttctccccactctcactccacttcgtaactcaccaccaacctacgcgccgagatctataccgccgaacattctcgaaccctcccaggatcgaacaagttcgtgttcattcctctctctctcttttcctttcataccatttctcaattctcactttctttcttaggaaagaaaggggtgagagtgatgggggatgaaaaaggtgagaagaaagaaaaaactagtcccagtgccagtggagggaacgatagcaagaangaacgagaagaagaagaaangggtttatttcngcgaatttggaacgcgattttcaggtcgaaccgctaccacttttgagaagaggcttgagtatattacaaaagaggaaaacatggctgtgactagattgagcaacagatctcgctcttggaggcgaacctctcgccaactaattctattctctgttttatttgaggtcattgctgtaggttatgctattatgacaacaagatcaatggatatgaattggaaaatgagggcaatccgagttttgccaatgtttcttttgcctgccttgtcttcggctacatatactgcatttgtcagcttcaccaggatgtgtgatcgcaaggaccagaaaattcttgaaagtcttagagctgaaaggaaggcaaaaattgatgagctcaaagagaagacaaattattacattactcaacaactcattcagagatatgatacagatcctgcagcaaaggcagcagctgcaactgttttagcatccaagttgggtgcagattcgggtttgaaagtgtatgtgggggatgaatcttctggtgtttcaacagggaagaccaaggatgttgaagttgttcagntctagtgggcttcgaaatcgcaaacaagtgacctctagatccactagtccagggacaactacaccaaattattctgatcaacaattagttggttctgggaaaattgatcaaacccaaactcatgagcataatcagcttgtagttgttgaacatcacaatcctcaaagttcaacaatgaacgatggaggatggattgctcgaattgcagcattgcttgtgggtgaggatccaacacagtcttatgagcttatatgcggtaactgccgcatgcataatggtcttgctcggaaggaggatttcccatttattacttattactgcccacactgtcacgccctgaacaaaccaaagcaatcggatgagcgtatatctggtttaaattcccataacactcagtctcctaaaacagatgacggtgaagaagttaaaaatgctagtgattctgcagcccagagtgtaatcagaagcgataatcccgtaaatactagccctgagattgaggaagtatctgaaccggctatttcagaggagaaaagctagttaaaagacaagcctgatttggggatggactgtttagatgacatgtctaggcccctgtttcaggtcacagaccaactataaggaaaccaactacagaccaactataaggaaaccaactacagaccaactataaggaaaccaactttgcaacaggaagagttttgataactttgagacttgtgatttataaattataacacataaattacatggcttgcttatgaattaaagcaattttgggatttccatataatttttctttctattttttgtccggatagtcttatttcaaaaatgagattgtgtaaagggtttaaactttgaatgttgttgcaacttgcaaaggttgtgtttagatctggtcaatgtaaaatttgttgaaactatatccatggatcattcttgatggacaatggcatcttgtgatgcatgtaacatgattccccccgatggatattggattgttgttatttgaataac

SEQ ID NO: 5904 - DNA, 1907 bp, Glycine max
cccacgcgtccgtacggctgcgagaagacgacagaagggggtgttggatgaggcgaaactcgagagtgtaaggttttgcatttcatttgacgaagagtgagagagtcttatctgtcgtctctgatctctgatcgcatcttcattccgaaaatggctgtttcggctatcactggagcgaggctaactctagggatgtctctttcctcttccacgcgatcacgaaccgtcgcaatggccgtatctatcgaccccaagaccgataacaaactcactcttaccaagtccgaggaagctttcgctgcggccaaggagctgatgcctggaggcgtgaactccccagttcgtgccttcaaatccgtgggtggtcaaccaattgtgattgattcagtcaaagggtctcgtatgtgggatatcgatggcaatgagtacattgactacgttggttcctggggtcctgcaatcattggtcacgctgatgatcaggtgcttgcagctctgggtgaaaccatgaagaaaggaaccagctttggtgcaccctgtctgctggaaaacactttggcagagctggttatcgatgccgtccccagcattgaaatggttcggtttgtcaattcaggcactgaagcttgcatgggtgcgctccgtctggcccgtgcttataccggaagagagaagatcatcaagtttgagggctgttaccatggccatgctgatccttttcttgttaaggcaggtagtggagttgccaccttgggacttcctgattctcccggtgtccccaaagctgccacttttgaaacccttacagccccctacaatgacactgccgccgttgagaagctctttgaggctaacaaaggagaaatcgctgctgttttcctcgaacctgttgttggaaacgctggtttcattgttcctaaacccgattttcataatttcttgcgcaagatcaccaaggagaacaatacccttcttgtgtttgatgaagttatgactgggtttcgtttgtcatacggaggtgctcaagagtattttggcataactcctgatataacaactctaggaaagatcattggtggaggtctgccggtgggggcttatggagggaggagggatattatggagaaggtggcaccagctggcccaatgtatcaggctgggaccttgagtgggaaccctttggccatgactgcaggaatacagaccctgcagcgtattaaggagccaggaacttacgagtacttggacaaaatcactggtgagcttgttgagggcatcatcgaagctgggaagcgggcaggccatgcaatatgtggtgggcatataagggggatgtttgggtttttcttcacagaaggaccagtgtataattttgcagatgccaaaaagagtgatacggccaagtttgctaggttcttttggggaatgctggcggaaggtgtctatttggcaccttcccagtttgaggctggcttcaccagcttggcacatacttctgatgacataaaaaagacgatagccgctgctgagaaggttttcagggagatctgatggttaaattttgttttgttgcaaatttaattttcggagggtgaatttttaggtcaatttagattattgttatggcagttgctttcgttatgatctgtatcattttcgcatcctgtatctatccagtgtattatgttgagctgtgagttacttgaatttgaagcttgtaagcattcgaattcattgtttaactcctcattctagtttcacatgttatgtttttaatgtaggcatgcattttgctaatgcattacatatcagtatacatctttgtggactacacactttcggggtgggaatagatagagaattgtctttgtgctagataaattgaactaatttttgagctgtgatcc

SEQ ID NO: 5905 - DNA, 1241 bp, Glycine max
aagttccgggggcattttcggctacaaagtcaaaatcacattttcctttggttcctacttccctgttttgtattttctcatttaccacacactcaggaccctttctctattctcttctgcatcaccattcaccgctgagagaacatcacaacacaacaaacaaaggagcctctcggtttccaatgtgaagagagcgaacatggctctaatcgctgccaggattctcggttccaattcgaggccggcggtcgcgctccaccgctggcagtggctggcgtactcctccgcctccgcggcggtggcggagccggagaccacggaggtgaaggactacgccgattaccggcgctccctgtacggacagatcacgcacaaggcgctcctcgtcgacgccgttggcacgctcgtcctcccttcgcagcccatggctcagatatatagaaagattggggagaagtatggagtggagtattcggaggatgagatactgttcagatacagaagagcgtatggtcagccttggggaaaatctcgtctcagatatgttaatgatggtaggcctttttggcaatacatagttagttattccactggctgttcagatcctcaatattttgaagaactttataactattatacaacggacaaggcatggcacctcaatgatactggtgcagaagaagtattcagagctcttagaaaatcaggtgtgaaattagctgttgtgtcaaactttgacactagattaagacctctcctgcgggcattaaattgtgacaattggtttgatgcagtagcagtgtcagctgaggttgcggcggagaaaccaaatccaactatatttctcaaagcatgtgaattattggatgtaaaacctgaggatgctgttcatgttggggatgaccgcagaaatgatatatggggtgccagggatgctggctgtgatgcttggctttggggaagcgatgttcactcctttaaggaggtagcacagaggattggggttcaggtctgaaagatgatttctttacaataagtttgatgttatgcgtgtatagagtcctttaggctttagctttaaggctgtacatgttctgctcctttttgcaatgtatgtatatatgtatgaagaagatgtgagcctgtaaaaactattaatagttgtaggtaggagcttttatcttttccattgatccgtgttttctacgaagtttattttaaaattataaataaaacaaatg

SEQ ID NO: 5906 - DNA, 1789 bp, Glycine max
aagtcaaccagttgtggttttctttcgtccccctctctcccttgatggtcaaaagtcaaaaaagcatgaagcttccaagatcacccacaaggcaatcacgttcacacacacagaaaacaaaagaaacaagctagactttggaacaggaagccagcatttgcattcaataaggctgttaaaaaccgcgcttgacagctaacccttcatgtggaaataggttcctttcacacttgcattgtttttttttttttttttctccttttcacgggctttctcttcttttcctctggcttcatcatcatctctctatctgcaccccttttgagaacttcaacttgttacttaattactctactctcccctttctagcttctgtgttcttcttcttcggttctctcttcatggggtgctgcttaagtgccaggatcaaagctgagagccctccacgcaatggtttgagttcaaaggatggtaacaaggaagaagatggcttaagcagcaaggcctcaactccctctgttcctccaactccgcggacggagggagagatcttgaagtcctcaaacatgaagagcttcaacttcagtgagctaaaaactgctacaagaaactttcgtccagatagtgtggtgggtgaaggcgggtttggttgtgtttttaaggggtggattgatgaacagacacttgcaccagttagaccagggactggcatggtcattgctgtgaagaggcttaaccaagaaggtcttcagggacacagtgaatggttgacagaaatcaattacctggggcagctgcgtcatcctaatcttgtgaaactgattggttactgcttagaggacgaccaccggcttttggtgtatgagtttttgaccaagggaagtttggataatcatttatttaggagagcttcttactttcaaccactttcttggaacatccgtatgaaggttgctcttgatgctgctaagggtcttgcatatcttcatagcgatgaagcaaaagtgatatatcgagacttcaaagcttcaaatatcttacttgattcgaattacaatgcaaaactttctgattttggcttggcaaaggatggaccagctggtgataagagccatgtctctacaagggtaatgggcacatatggctatgctgctcctgaatatatggccacaggtcacttgacaaagaagagtgatgtatacagcttcggggttgttctgctggaaattatgtctggcaaacgagcacttgacagcaacaggccaagtggggagcacaatttaattgaatgggccaaaccttacctcagcagcaagcgcaggatcttccaagtcatggatgctcgcatagaaggccaatacatgttgcgcgaagcaatgaaagtagccactcttgccattcaatgcctatctgtggaaccaagatttagaccaaagatggatgaagtggtgagagcattggaggaacttcaggattctgatgacagagtcggaggggtgggaagctctcgtgatcaaactactagaaggagtggccctagacaacatagaggtagacaacatgaaacaacaaggaagtgaaaagtgaatgttgatttcatgttgtgaacatgattttgctccagttgctattttgtatgtatgtatgcatatcatgatgaacttaagcattgcttgcttaagatgtctgattgctgtacagttgttgttgattgagcaataatattgaaatcttcatttcaaaaaaaaaaaaaaaactccccttccctttccacctttctatcattata

SEQ ID NO: 5907 - DNA, 1495 bp, Glycine max
ttgtccgccttatctagttagttcctttgcttctaagtccagtttcagactattgttcactcatctccattctcttcttaaattctcaacacatcttctctctctaaagtctaaaccatgcctgtagtgacagaacacatgaaatggagaagaccaagaaaccaattcaggcaccccatttcagaaactgatgatccaaaccctcaaatcccttccataatccaatcctctcacagcaaatccaccttctcctctctcttttcttctttctccacctccaatgaaaccagagaccaaaatagaaacaacaacaacaaaagcaacagaaaattctctgcagcaaccttcagaggcttcggctgcactgccggtgcatcgcagaaggtgtcggtgccggtgcctgcggtgattcgctcctcggcggatagggaagggaagagtagcagaaaaaagaagcacagaaggaacagtaacagtggcaacagcacaagtgatgatgatgatgatgatgtttggtgtggccctggaattgggttctcaactgatgctgctgctgcatctgtggaatgtgttgtggctaggaagaatgtgtctgcaagaggaaaacttgatgtggtggaggacagggtaacacacagggagcgttcatcttattttggaaggcgcactgtaaagccagaaagcttctcctttctggaagatgaacctgacatttttgcagcacgccctggattagagccttttggaactgctagattctatcgccatgttccacatccttcccctgatggtcttgctgagataatgatacttcaaggaagaataatgatggggggacgatttgattcacacgaccaatttagagactggagacttgatgttgataacatgtcatacgagcaattgcttgaactgggtgagagaatcggttatgtcaacactgggctcaaagaagatgagatgggactcaacataaggaaagttaagccttcaagttcaaatgatgcatcaaagcatcaactagacaaaaagtgcagtgtttgtcaggaggagtatgaatcagatgatgagctggggagattgaagtgtgaccacagctatcattttcagtgtataaaacaatggcttgtgcataaaaatttctgcccagtttgtaagcaagaagttgtggttcgacactaagtggcactatcctcaacgttttttacccttaaattggtgtatagtttttcatatgcaatataagcaatcttcattacatattttaaaacttttggcttccttagcgaggagtcggcaatattatacttgtaagttttatattatgatctcgtaattggacagtgattttgcatattatacgcaaggttttgaaatttgaatgttgtcactcaggtaaacaacgatttgataagggagaactcacttgctattcctttttgccccgtccaattctaaggttgctaggggagggaaacattggtatttttttccc

SEQ ID NO: 5908 - DNA, 1930 bp, Glycine max
gttgtgttggttgtgctgagtcagggatcggcgagttggactcggggactgaggagactcgtgctgagtcgcgccaccgggttggggcatgtgggcttggagatgctgattcgggcgtgtcccatgttggaggccgtggatgtgtcccattgttgggggtatggcgacagagaggctgcggcgctatcgtgcgccgcgaggttgagggaactcaacatggataagtgtttgggagttactgatattgggttggccaagattgctgtcgggtgtgggaaattggagaggctgagtttgaagtggtgcttggagatttctgatctggggattgatcttctttgcaaaaagtgcttggatttgaaatttctcgacgtgtcatatctcaaggtaacaagtgaatctttgagatcaatagcttctctgttaaagcttgaggtttttgttatggttggctgctctctagtggatgacgttggattgcggtttcttgaaaaagggtgtccactgcttaaggcaattgatgtatcaaggtgtgattgtgttagctcttccggtttaatatctgtaattagtggacatggaggtcttgagcagttggatgcaggatattgcctctctgagctttcagcacctcttgttaaatgcttggagaatttaaagcagctgagaataattagaattgatggtgttcgagtttctgactttatcctccagacaattggcaccaattgcaagtctttagtggaacttggtttaagcaaatgcgttggggtgaccaacaagggaattatgcagctagtatctggctgtggcaatttgaagatacttgatttgacttgttgtcagttcatctctgatacagccatctctactatagcagactcttgtccagaccttgtctgtctgaagctagaatcttgtgatatggtgactgagaattgtctttatcaacttgggttaaattgctcacttctcaaagagcttgatcttactgattgctctggcatcgatgacatagctctaagatatctatcaagatgttcagaactcgtaagattgaagttaggattatgcacaaacatatcagacataggattggcacacattgcttgtaactgcccaaaaatgactgaacttgatctctatcgatgtgtacgtattggagatgatgggctagcggcactaacgagtggatgcaaggggttgacaaacctcaacttgtcatattgcaatagaattacagacagagggttggagtatatcagccatcttggtgaactatctgatctggagttgcgtgggctttctaatatcacaagcattggtataaaagcagttgcaataagttgcaagagattggcagatttagatttgaaacattgcgaaaaaattgatgattcaggtttctgggcccttgctttttattcgcaaaacctgcggcagataaatatgagctactgtatcgtgtcagatatggtgttgtgcatgcttatgggtaacctgaaacgcctgcaagatgccaaactggtttgtctttctaaagtgagtgtaaaaggattggaagttgcccttagagcttgctgtggtcggattaaaaaggttaaactgcagaggtccctcaggttctcgctttcctctgaaatgctcgagacaatgcatgcacgagggtgcaagatcagatgggattagccaattgtcacgctattaatctgttatactttcttttcttggaagggtgctgcttcattaagatcttttttattcaaaattttatatttctctagcattttcttttctttaaactctgttaccagatttctacggaaggtatttttttcaccttcttaagttacatcatctccaataaagcatgaggttacttatcttcgaactaaaaaaaaaaaaaaaaaaaaaaaaaaaaaaaaaaaaa

SEQ ID NO: 5909 - DNA, 2068 bp, Glycine max
gcgagaagacgacagaaggggatggtcagtagtaggtaacttgttttctcttcctcgatttgatcgatcgttccttctctctcttgtgtttatgccaggaatgacagcgtatcagtggcagtgcaggaaacgagagggagagttttcattgggaaggtaaaagcctttgtttgtagcagtgccttacatgaaccctcgccccccttctcttgttcgctaccactaactcatcgttttctcagtgtgccccgcgtgcgttctgctgtgtcctctcactcacaggtgtaaccgtgtaaccactagaatcatacttagtggcatggaaagaaagaaagaaagattaacctaaaaaccctgtgcaggctttcccagaaaagccaagtgagaaaaccaaaccctctattaccacttactacttacttcatgtaactgactatagccaccactatcactatttaggattttctgtaaaaagcctgatactcttttaccataaaacccgggagagccctcataataaaattgagagagagaataagagaattgtgtgtcgtgtttgtttttgtttggtttgttgtaaggttagctagtgagtattctacacaagggtggtggtagggcaaaaaggataagacagtgaatgtgtgtgtgtgtgtgtgtgtgtgtgtgttgttgacaagcaaaagctatggagggtggtagtagtagctctaatggcacttcttatctgttggcttttggagaaaacaacagtggtgggctatgcccaatgacgatgatgcctttggtgacttcccatcacgctggtcatcatccaataaatcctagtaataataataatgtaaacacaaactgtctcttcattcccaactgcagtaacagtactggaactccttctatcatgctccacaataatcacaacaacaacaaaactgatgatgatgataacaacaacaacactgggttagggtactatttcatggagagtgaccaccaccaccatcaccacggcaacaacaacaacaatggaagctcctcctcctcctcctcttctgctgtcaaggccaagatcatggctcatcctcactatcaccgtctcttggcagcttacgtcaattgtcagaaggttggggccccgcctgaagtggtggcaaggttagaagaagcatgtgcttctgcagcgacaatggctggtggtgatgcagcagctggatcaagctgcataggtgaagatccagctttggatcagttcatggaggcttactgtgagatgctcacaaagtatgagcaagaactctccaaacccttaaaggaagccatgctcttccttcaaaggatcgagtgccagttcaaaaatcttacaatttcttcctccgactttgctagcaatgagggtggtgataggaatggatcgtctgaagaggatgttgatctacacaacatgatagatccccaggcagaggacagggatttaaagggtcagcttttgcgcaagtatagcggatacttgggcagtctgaagcaagaattcatgaagaagaggaagaaaggaaagctacctaaagaagcaaggcaacaattacttgaatggtggaacagacattacaaatggccttacccatccgaatcccagaagctggctcttgcagagtcgacaggtctggatcagaagcaaatcaacaactggtttattaatcaaaggaaacggcactggaagccttcagaggacatgcagtttgtggtgatggatccaagccatccacactattacatggataatgttctaggcaatccatttcccatggatctttcccatcccatgctctagaaaattatccctcgtttgtgggctgctgataatagattcataaactcgtgctgtcacttattaaaaccttacaattattaatattaattaatatgcattctaagaaatcctagattgctatactataatatagtacgcaggtgtatcccttgctagctttttagacggtcctttgtgtggatcatctagttgaaggagttatgaataaataaaattccataaatttaaagtttttaaaaa

SEQ ID NO: 5910 - DNA, 1503 bp, Glycine max
ggctagctagtgagtgtgttctacaactgtagtgagctagctacgtaggccccccccccaggcaaaaaggataagacagtgagtgtgtatgttgttgacaagcaaaagccatggagggtagtagttgctctaatgacacttcttatttgttggcttttggagaaaacagtggtgggctatgcccaatgacgatgatgcctttggtaacttcccatcatgcaacaaatcctagtaatcctagtaataatactaataataatgaaaacacaaactgtctcttcattcccaactgcagtaacagttctggaactccttctatcatgctccacaacaacaacaacactgatgatgataacaacaaaaccagcactaacactgggttagggtactatttcatggagagtgaccaccatcaccgcaacaacaacaacaatggaagctcctcctcctcttcctcttctgctgtcaaggccaagatcatggctcatcctcactatcaccgtctcttggcagcttacgtcaattgtcagaaggttggagccccaccggaagtggtggcaaggttagaagaagcatgtgcttctgcagcgacaatggctggtgatgcagcagcagcagctggatcaagctgcataggtgaagatccagctttggatcagttcatggaggcttactgtgagatgctcaccaagtatgagcaagaactctccaaacccttaaaggaagccatgctcttccttcaaaggattgagtgccagttcaaaaatcttacaatttcttccaccgactttgcttgcaacgagggtgctgagaggaatggatcatctgaagaggatgttgatctacacaacatgatagatccccaggcagaggacagggaattaaagggtcagcttttgcgcaagtacagcggatacctgggcagtctgaagcaagaattcatgaagaagaggaagaaaggaaagctacctaaagaagcaaggcaacaattacttgaatggtggagcagacattacaaatggccttacccatccgagtcacagaagctggcccttgcagagtcgacaggtctggatcagaagcaaatcaacaactggtttattaatcaaaggaaacggcactggaagccttcagaggacatgcagtttgtggtgatggatccaagccatccacactattacatggataatgttctgggcaatccatttcccatggatctctcccatccaatgctctagaaaagtatccatcctttgtgggctgataatagattcataagctcgtgctgtcacttattaaaaccttaagcaattattaattaatatgctttctagtgctcatataagcattctaagaaatcctagattgctatatactatatttatagtacgcaggtgtatcctgctagcttaaagagacggtcctttgtgtggatcatctagttcaaggagttatgaataaataaaattccataaatttaaagccaaaaaaaaaaaaaaaaaa

SEQ ID NO: 5911 - DNA, 1222 bp, Glycine max
  misc_feature (1215)..(1215): n is a, c, g, or t
caaattcataatatatatatatatatatatatatatatatatatatatatatatgtatgtagtgctccttctccattttctatctatcgtcaacgttagtgctttgtttaggtgaactaattcggagaccttgcaagacttcatcaatggctgtcaaagtttatattgtgtactactccatgtatgggcatgttgagaaactagcagaagaaataaagaaaggggcttcctctgtggaaggtgttgaggccaagttatggcaggtacctgagacactgctggatgaggtgcttggtaagatgagtgcaccacccaagagtgacgtaccagtcattacccccaatgaactatccgaggctgatggctttgtattcggcttcccaacaaggtttggaatgatggctgctcagtttaaagcctttctagatgctactggaggcttatggagagcacaacagcttgcaggcaagcctgctggcctcttctacagcaccggttcacaaggtggtggacaagagactacagcactcactgctatcactcaactggttcatcatggaatgatattcgttccaatcggttacacattcggtgccggcatgtttgagatggagaaagtgaaaggtggaagtccatatggtgctggaacttacgccggtgatggctcaagacagccaagtgagcttgagttacaacaagcattccaccaagggaagtacattgctggcatcacaaagaagctcaagcaagctgcataatgttgccttgccttcatattagatcatactattattattaaaccataccacaatattgcttgaaaatcattgtccaatttttagacttgaaatatattgagtttttttttcctgtgcttgcaagtattttttttttctttctaatcttggtaaaggaaatgctttgtatgagtgttacatgttgcagtggatgttgcaatttgttgaatgaggaaagtttgtgtctagtcctttagtgttaggcggaaacagtacttgttcctatcttttgtattgccccgttaagcacataaacattgcaacgaccagtttgagtagagaatcggctttattattctctcgtatataataaagatggcgtgtttgaagaaaaaaaaaaaaaaaaaaaaaaaaaaaaaaaaaaaaaaaaagaaaaaaaaaaaaaaacaaaaaaaacaaataaaaaaaaaaaaaaaanaccacgg

SEQ ID NO: 5912 - DNA, 1521 bp, Glycine max
gctcgagtgaagagcatctactccgagcagtcatttgtgcgggtttgtttcctggacatatcctctgttgtgaacaaagataagtcaatagcgctgaaaacaatggaggatggtcaggttcttttgtattctagctctgtaaatgattccttagggattcaactggaatatcagattcagtgcttctcttatttggtgggaatgtatccagaggtggactagatggtcacctgaaaatgttgggagggtatttggagtttttcatgaaaccagaattagccaagacttacttgagcttaaagatggaactggaagaactgatacagaaaaaacttttggatcccatgttggaaacacaatcgcatagtgagctgctttctgctgttagattgttggtatcagaggatcattgtgatgggagatttgtctttggtcgccaggtcctaccacaatcaaagaaggaaacaaactccaaaactggtggtggagctgaggggaaaaattataaaaatcatcttcaagcattccttaacagggctggacatgattcaccaacttacaaaacaaaggagctgaaaaacaaccaattccgtactactgtcgtatttaatgggttgaattttgttggtcagccatgcagcagcaaaaaattagcagaaaaatctgctgctgctgaggctctattatggataaaaggggatggccattcatctgatgatattgaccatgcatcagtgcttttgaaaaagagcaacaagaaaagtaggcgagattcgtttagtggtgctaaatggagttgagctgcctttaaaagcttaccttggatagattcgttaatagcattgtatactgaggaaaactttccagtcattatttcaacagcaagtgtacagagctattgagagaatatatgacaggtacagaactacagatcagagcccgtgtttttgtaaagagtgattgcatcctgtctatctagatttggggcacaattcaatgagtatttgcacaattgcttttggctaattttgcccggagcagagattggctggctgagcagcttcggactacttgcaaatgaattcttacaatagaggtataagcagcaaagaattgtatccataagctgctgatgctttcgttttgcactgctctcgcggtagatatagttttcaagaggattcacttgcaacaattcattgggggacaacagaaagatcaggcattttatggaagaaataaccgtgtcctttaatttgtattcatagtcagatgtgtggtagttgctcaggaacatgtttaagttaatcaagccagctgacatagaatatatgtatttaggatcaattttaccctcaaaagcctattacgaggcttgttagttgttacacctgtgggtggatttttttttggtactgatgttgtaaactgtgggaggtaatttaatccaataaatttcagtctgagtagaaaaaaaaaaaaaaaaaaaaaaaaaaaaaaaaaaaaaaaaaaaaaaaaaaa

SEQ ID NO: 5913 - DNA, 2654 bp, Glycine max
aattcggctcgacgaagaaggaagctgtagataatggggtggcggttgaaggtggagatggtcttgctgaaggtgaagaagttcaggacttgaagaatgaaactgtaaataatgggatggaaactgagggtggaaatggtgttgctgaaggcgaagtttggaccttgaagaatggcgttataaatagtggggtggcaattgctgatgggagtgctgctgctgaagatggagaggtttcaggctcaaagaatgaagttaacggggtggcatttgctgatgggaatggtgttactgaacatggagaagtttggggatcaaagaatgaagctgtaaataatgaggtggcaattgttgatgggaatggtgttgcttacggtggagaagttcatggctcatagaatggagctgtaaataatgaggtgggcattgcagatgggaatggtgttactgaaggtcaagaggatcactgcttgaagaatgaaactgttaataatgtagtggcaaatgcagatgaagggaactctggtgcagttgagtgttttcaaacatacaagaggcgcaagcatgcaaagtcaagttcagaatttaaagtccaggagaacagcagacttcatcgcggtgctgcacgcctgcgcgggcccgtggggaaaccatttgatttagctgttggcaacacttcaaaagatcattcacatgaccattgggggaatgttgtactaaagcatttatatcattcattaggcaatgacaatggtggcatgaagtggtgtataagggaagcactcatgagctgtcctaaaattagttgcgcccctacaatgaaggaaactcttaaaattgtcaaagatggtcaggagtgctctccgcaattagaaagtttgttttatagattacagagtgaagctaatggacatgaaaatgttgtgcacaacggattttctagtgagtcaaatggccgtgatacaactgaggggtgccagcgtgtgttccgcgatatcttagcctctgaaaagttcagttcattatgtaaagtgctacttgaaaatttccaaggaacgaaacctgaaactgtatttgactttagtttgataaactcaaggatgaaagggcaagcttatgaacaatcgcctacacttttcctatctgatgttcaacaggtttggcgaaagcttcaaagtactggaaatcagattgttgctatggccaggagtctctccaacatgtcaaaagcttccttctgtgagcaggtgggaatttcagcgcagagttcctttgaagatgaaaaggaagtgctctgtaaccaggaatccatctctcacatgaaaccagagcagacagtagaatgtgttgcattcagacttggcacttgctggcattgtggagacaaagcagatgggacagactgtttggtttgtgattcatgtgaggagatgtatcatctgtcctgtattgagcctgctgtgaaggaaataccctacaaaagctggttctgtgccaattgtactgctaatggaattggatgtcgacacaagaattgtgtggtgtgtgaacggttgaatgccctgaagaccctggatgatattgttggtgaggaaaacatccctacaaatgaggaaacactgaatgaattagaagagaattcaaattgtacttatgatgggattcaaatttccacagataggagaaactcatccgactgcaaaatttgtaaaatggcggtggatggtgaaaaagtaaaaatctgtggtcactctttttgccctagtaaatactaccatgtaagttgtttgtcaagtaagcagctaaagtcatatggtcactgttggtattgcccttcttgtatatgccaagtttgcctcaccgacaaagatgacaataagattgtactctgtgatgcctgtgatcatgcataccacgtctactgtatgaaacctccacaaaattctattccgaaagggaaatggttctgcataaaatgtgaggcagggatacaggcaatacgccaggcaagaaaggcatatgagagtaacaaagggaaagttggtcagaatgattcaaagccaaatgaagatattgacaagaaatggaacaaaaagcgaggacgggaattagacaatgttggaggaatgatggacatgcttataactgctgcaaatactctgaattctgaagaggacttaaatgcaatgctgattgactcaaagaaagcattaacatgagggcgtgtgtactaactgctaatacctaatgttttctatttcctgcatttgtttaagtctttagataactgattttgttaccgttggagagaaaggattatagaggccaaggagcaaaaagcatcaatagaaaaaaaactgtgataagtgaagtatgggatattttgcaggccagatactgatgcaatatgtggttgatatgaaatttaataggttgctttgctccctgcagtatataatgttttggattgtcatgattacttaagcgaagacttcaaattagaataatatcgatttccaatttgtggataatcaaaagggatgatgttttaccctttagatttcaatgtttcagtgccaattttgcacaagccttgaacagtattctgttcttgattttcttatccgttcaatgaatgactctgggagtgtttg

SEQ ID NO: 5914 - DNA, 859 bp, Glycine max
tgttgaaaccttagtctgaatccaacaccactcactcactcactccttgtctcatcctataaatcagagcctgtaagcaaaaccaagtttcacaaacttaagattcatctccttgtcctacaaaacatggttccaaccccccaactcaagtatgttcttctcctcttttattgtacttttgcctttaacttgttatccactcctgcctgtgccctcaacataggagctgaaaccactggagtcgctgtctctgtgagcaaagagtgcagtagacaatgcgagtcaagtttctgctcagttcctccattattgagatatggcaagtactgtggacttttgtatagtggatgccctggggaaagaccttgtgatggccttgacgcttgttgtatgaagcatgatcaatgtgtgtcagccaaaaacaatgactacctaagccaagagtgcagtcaaacattcataaactgtatgaataactttaagaactcgagggctcctacattcaaaggaaacacgtgcgatgcggatgatgttattgaagttatacatgttgtgatggaagctgctttactggctggaagagttctccacaagccatagagagtaatgttgtctgccactcaagtctcaagaaagaaaatgattcttcttcctattgttttgagtaattctcttaccaaattaatcaaactccaatgctttatttattcacatcaatgcactcttttaccacactcttattattacatcatgtctcacgcttgattattaaaaaagaagactaatctaaaacaagcataaggcataaaccatttataaagagtcttcaaaacaatattgaaaagagtgttttggtact

SEQ ID NO: 5915 - DNA, 1047 bp, Glycine max
atcctaatcgaaaaaattaaaaataggaatggtgaaggtaaaggtgaaggaaagtgagtggaagccaggggcaatccgatagaaaagggttttatttctttttctcttcaattattttcttttcctgtctttgttgttcagttccgttgttgtgttgtgtgctgcaacacaatcggtggtctgagaaatcttgtttgtgttgggtttgttatggctcggagagcagaggaagagtacgattacctgttcaaggttgtactgatcggtgattccggtgttggaaaatccaatcttctgtcccgattcactcgcaacgagttttgcctcgaatccaagtccaccattggagtcgaattcgccactcgcactcttcaggtggagggaagaactgtgaaagctcaaatatgggataccgccggacaggaacgatacagagcaattaccagtgcatactacaggggtgcccttggagctcttctagtctacgatgtaactaaaccaaccacattcgaaaacgtcagccgatggctgaaggagctaagggatcatgccgatgctaacattgtcatcatgttgatagggaacaagaccgatctcaagcatctcagagctgttgccaccgaggatgcccagggttattccgagaaggaaggcctttctttcatcgagacttctgctctcgaagcaactaatgttgagaaggctttccagactattcttgcagagatataccgcattatcagtaagaaatcactctcttccaatgagcctgcatctgccaatattaaagaaggcatgactatcactgttgggggaccccaatccaacgcaagcaagccttcttgctgtacatcatcttgaaaccccgccttatacttcctacttgctcagtatcattcttttttcttaacttatctggatttcttcttatgattggttgtgcctgctcattgcaaaccttatattattcatattgttgtctttttggtttggttcccttcgctatctactatctggaacgagattactcgaaaaaacaaaaaaaaa

SEQ ID NO: 5916 - DNA, 905 bp, Glycine max
ccccccgcgtccgcccacgcgtccgtacggctgcgagaagacgacagaaggggacaacacaacgcaacacaacgcgcactctctcttttctctcttaacacaaaaaccctatcgttcttcgcggtttcgccgattctcgccatgccgaaagccaaatccgacgccaaagccgccgatagccggttgaagcgcaagggcgctggtgctggaaggaagcaatcgaagaaagctgctaaggatcctaacaagccaaagagacctccaagcgctttcttcgttttcatgtccgagttcagagagcagtttaagaaggagcatcctaacaacaaatccgtcgctgttgtcggtaaagctggtggtgacaaatggaaatcgctgtctgatgctgaaaaggcccccttcgttgccacggccgaaaagaagaaacaagagtatgagaaaactattttggcttacaataagaaattggaggggaagaattcagaggaagacgagtctgacaagtcaaagtctgaagtcaatgacgatgaggaagatgaggaggaggaggatgatgatgacgacgagtgaagatggtgatacaagatgaagcgtaggaggatgtgggaaaagaaaattgttttgcatagtagttgttgggtttagaatttcataggatggttcccaacccacatccctttatgataattagtttctgaatttttattttgtcctcccttactagggttagattagcgcacaatcgtaattagggttcagtatcatgatcatgtacttaaaagtcaatgctatgatacgtttcaattctattctcgaagaaaatccacagcctctttcaaccccaaaaaaaaaattgtttgatgtcgttacatgtttttacgtggcatcgtttcttggttctgcga

SEQ ID NO: 5917 - DNA, 886 bp, Glycine max
gttttctctacactgcccttcctcgcagcccgtcttacggctgcgagaagacgacagaaggggacaacacaacacaacgcgcactctctctttttctctctgttttttgttctctcttcgcttaaaccctatcgttcttctcgttttcgccgattctcgccatgccgaaagctaaatccgacgccaaagccgccgatagcaggttgaagcggaagggcgctggtgctgggaggaagcaatcgaggaaagctgctaaggaccctaacaagccgaagagacctccaagcgctttcttcgttttcatgtccgagttcagagagcagttcaagaaggagcatcctaacaacaaatccgtcgctgttgtcggcaaagctggtggtgaaaaatggaaatcgctatctgatgctgaaaaggcccctttcgttgctactgctgagaagaagaaacaggagtatgagaaaactatttcggcttacaataagcaattggagggaaagaattcagaggaagacgagtctgacaagtcaaagtctgaagtcaatgatgacgaggaagatgaggaggaggatgatgatgagtaaagatggtgatacatgatgaagcgtaggtggatgcgggaaaagaaaattgttttgcatagttgttgggtttagaatttcataggatggttccctacccacatccttttctgataattagtttctgaatttttattttgtcctccctcagtaggtttagattagtgcacaatcgtaattagggtttaatatcatgatcctgtacttaaagtcaatgttatgatacgtttctattctattctcgaagaaattccactgcctctttcaatttctacaaaaaaaaaaaaaaaactcgagactagttctct

SEQ ID NO: 5918 - DNA, 1961 bp, Glycine max
tttcggtccggcttacttacacgagttgaattgactcactaggcaccccgagtcgagagttataactcgttcgctctttccttacactcacactctgtctctctttcttcaaaaaacttccctcgtcatgattgccaattctctttactggtaaccagatcctccaaaaatgatgaatcacgattccaacaacgaacaacatcagattctccatgtctcgcaggacgacgagataatggaatcgctaatcctcgatgacgacggctcttccgttcagcagcaccaccgtcctacgtcgccgcagagccctaattcccctttcaactcgttcctcgaccctccctcctacgccgacgcgatcttcacctccttcgattccaacggtcacgaccaagccatcgaatcccccgccgcccgatccggctccgaagactacctccacatctccgtcaccgatcctcagaaggagcaggacatcgccacctccctcgtccccggcgccgccgccttctacacctacctcatcaccacgcgcactaacctccccgaatatggcggcatcggtgctgagttcgccgtccggcggcggttccgcgacgtggtgacactctccgaccggctctcggaggcataccgcgggttcttcatcccggtgcggccggacaagagcacggtggagagccaggtgatgcagaagcaggagtttgtggagcagcggcgcgtggcgttggagaagtacctcaggaagctggcggcgcacccggtgatcgggcggagcgaggagctcaggttgtttctcgaggccaaggggcggctgccgctggccaagaccttcgatgtcgcgtcgcgaatgctcgatggcgccgtgaggttgccaaggcagctgttcgggggagaggcggagctgggagaggtggctcagccggccaagggcgggagagacttgctcaggattttcaaggagttgaagcagtctgttgccaatgactgggttgggagcaagccacttgttgtggaggaggataaggagttcatggagaggaaggataagttggtggattttgagcaccatcttagcaatgtttctcagcaggctgaatcccttgtcaagtttcagcaagacatgggtgaaacggttggtgaattaggtctggcttttgtaaagcttaccaaatttgagacggaagaagccatatttgagtctcagagagttcgagctgctgacatgagaaatgtggcaactgcagctgttaaagcaagcaggttatatagagagctgaatacacagacaatcaaacatttggataaactacatgaataccttgggacaatgctagctgttaacaatgcattttctgacagatcgagtgcattgttgactgttcaaacactctcatcagaactagcttctttacattcacgggtggaaaaacttgaagttgcttcatccaaaatatttggtggagacaagtctaggatgcggaaaattgaagagttaaaagaagccattagagttactgagaatgctaaaatttgtgcagatagagagtatgaacgaatcaaggaaaataataggagtgaacttgaaagaattgaccaagagaggaatagcgacttcctaagcatgctgcgagggtttgttgtcaatcaagcaggctatgcagagaagacggcagctgtgtgggagaagcttgcggaagaaacggctgcttactcgagtgacagcagctaaaatgtacttggctgtataaattattgtttttgccttttctatgcagaaattctagattttggttccattaatgtaatcttatgtagttacattactttagacgaacttagcattagcccagagttgtatatgcatatatccttttatttttgtccgaccttcaagatttcaatgggtttaactaatcagagttgtacaaaaaaaaaaaaaaaacttagtttaattggag

SEQ ID NO: 5919 - DNA, 764 bp, Glycine max
tctacttacataatgggcacaattggctacatagaccctgagtatgctagaacttcgcatctcactgagaagtctgatgtgtacagttatggtattgttttactcgagttgctaactggaaggaaagctgttgacaatgaatccaacctccaccatcttattttgtccaaggcagcaaccaatgctgtgatggaaacagttgatcccgacattactgccacatgcaaggacctaggagctgtaaaaaaggtttatcagcttgctctattatgcacaaagaggcagccagctgataggccaacaatgcacgaagtgacacgtgtactcggaagtctcgtgccatcaagcatcccaccaaagcaactagctgacctaccacctgcttcaaatccatctgccaaagtgccatgctacgtggatgagtatgcaaacctcaaaaccccacacttagtaaactgcccctcaatgagcacttcagatgctcaactcttcctcaagtttggagaagtaatctctcaaaacagtgagtgagtgagaggattttgaaatgaaaatcaatttcaagaatcatgtatattatttaaaaaccaaaaaagagaagcaaaaaaatggattaggggtaatagttaatgtaaatgtttataaaaagtttttagtactagttttttatggttggttcatttgaacaggaaagatatgtatcatcatcatcatcacaatttgaaaggtgaagtaaacccaattcttattcttgtttggtagca

SEQ ID NO: 5920 - DNA, 2129 bp, Glycine max
  misc_feature (443)..(443): n is a, c, g, or t
cactcgttcatgaagatgcagtaacccttttccgtcattatgctctcttagaagaacgcggttcaagcattcctgacgaagaacttgtccaaaaggttgttcgaatctgcaagggtttaccacttgccgtcaaagtaattgggagatcactcagtcatcagccttctgagttgtggctaaagatggtggaagaattgtcacagcattctatacttgattctaatactgaactacttacatgcctccaaaagatcttgaatgttttggaagatgatcctgtcatcaaggagtgcttcatggacctagggttatttcctgaagaccaaagaattcctgttacctctctcattgatatgtgggcagagtcgcatagtctagatgatgatggcccagaggcaatggccatcatcaacaaattagactccatgaatctggcttatgtnttggtagcaaggaaaaatgctagtgacacagacaattactactaccggctccgctgcccccccccccatgaccttctgagagagcttgcaatttatcaaagcactcaggaaccagcggaagagggaaaaagattgattattgagataaatcaaaataaacctcgttggtggcttggggagaagtcaacactgcttaagccccaacaggccactgcccaaacattgtctatatcaactgatgaaaattgctgttcagattggccccaaatacaactagctcaagttgaggttctgatttttaatcttcgaactaaacagtattcctttccagatttcatggaagaaatgaacaaacttaaagttctgattgtcacaaattacagtttctatccttctgaaataaacaactttgagctacttggctctttatccaaccttaaaagaatcagactagagcggatttctgtcccttcctttgttgcaatgaagaatcttaaaaagttatccctctacctgtgtaatataaaacaggcttttgaaaacaatgacatgctaatttcatacatttttccaaatcttgaagagttgaatattgactatagcaaagatatggtgggattgcctaaggggctctgtgatatcatctccctaaagaagctcagtattactaattgccacaaactctctgcactgccgcgagaatttgggaagttggagaatttggaactcctaaggctcagttcctgtactgatttggaagggttaccagattctattggaaggctttcaaagctacgacttcttgatatctcaaattgcataagccttcctaatttgccagaggactttggtaatctgtctaatctacaaaatctctacatgacaagttgtgcaaggtgtgaagtgccaccctcaatcgccaatcttgagaatttaaaggaggtggtatgtgatgaagagacggctgcttcatgggaagatttcaaacctctacttcccaatctaaagatagatgttcctcaagttgatgttaacttgaattggcttcatacaatttcctcgtaatacttgcttcatgcagttcaggttgtctttcccaagagtccatgatcacaccaaaaagcaaaaacaactaaatacagttttcacattggattatggtaaaaggaaacatcccccttattaatcagtgctgaaggggatttgctgttaaggaactcatcaaacacaaaacctttatgaatatccaagttcaacaaagagattcataattttgtgatcagctaagatatccatccttttatatatccatcaattggatggaagaaagacagcttgagtgtcaactcactatgtccgaagcatctaatggtatgacataactgagcaatggttctggggtctaattcaaaattctagtagcaatgtgcttgtttgtctgtaaaaagcttgaatattttggaacataaggccattgagtgttttagggacctatgtatttttattcctaaagaccagaggatcccgatcatgccgctgcagcagagaaaatttatgaacaggtcaaactgaacatggctgattttgttgttacagggtatggtggcatgctcttaaataatttgatgtgctgtgctataatcatgtaaagcttaagccacttataagaataaacaggatacaata

SEQ ID NO: 5921 - DNA, 2374 bp, Glycine max
ggagtgcgtaagtgcttgcgttcgtgtgtgtgctgtctgttgtgtttctttttttctttttttaatttctctgtgaggatgaacaaattaacttgccttccataacgtataaaaggtagaagaaaaaccggtgtagactagagaggaaaaattctagggtttgagtttcacagtgagagaagctcgtggtgtcggggagtccatttccagctagaaattagaatggggaaaaaccagaagacaggggtgggaagagcgttggtgaagcagcacaatcaacagagcaaggaaaatgggcgtttacagaagaagaatgttctcgaatcgttcacagagatcagcgacatcgatgccataatcgaacaagctgaacaccctcaacaacccctcttctccatccctcagcgccccatcaatctggatctgagctccagcattggcaaaaatgaaatgacacttgaagaaatgaggaaacagcagacgagggaggaggccttgcatgcgagcagctacgtaggcccccccccgccaccatggagagcatacatgtctgtcgaggagcttgatgacaatgaaagacaagctttcttaatttggcgtcgcagactggcaagacttgaggaaaatgagaatcttgtcctaaccccgtttgagaaaaatcttgatatttggagacaactctggcgggttgttgagcgcagtgatttgctcgttatggttgttgattcccgagatccgctattctatcgctgtcctgatcttgaggcatatgcacgagaggtggatgaccataaacgcacattgctcttggttaataaggcagatcttttacccgcttctgtcagagagaaatgggtagagtatttttgtgctcataatattctatatatcttctggtcagctaaagctgcttcagcagctgttgaaggtaaaatgcttaggtcaccattggaagctgatgattcagggaagaacaataatccagacacgaagatatatgacagggatgagcttcttgcacggatgcagtcagaggcagaaaagatagtagagatgaggagaaattctagctctgacacagggccgtctaacattcaatcttctggtgaaaatgttggtggtagttcctcatcaaataatgtaattgtgggatttgttgggtatcctaatgttggcaaaagttcaactattaatgctctggttggtaaaaaaaggacaggtgtcacctctactccagggaagacaaagcatttccaaacattaattatttctgaccaactgaccctttgtgactgtcctggattagttttcccatctttctcaagctcaaggtataagatgattgcttgtggagtgttgcctatcgataggatgactgaacatagggaggctgtccaagttgtagccgataaagttccaagacaggtcattgaggagatttataagatcagtctaccaaaacctaagccatatgaaccccaatcacgcccccctctggcatctgagcttttgagagcatattgtgcttctcgtggatatgttaccgctagtggactgcctgatgaaactagagctgctcgccagatactgaaagattacattgatgggaagctgcctcaccatgaaatgcccccaggaatgtcaaatgtggaaccagacccagttaacttgcatggctctgtttcatatggtactgaagatgttgacagcaaagttgcacctgattttgagcaagtgttggatgacctcaattcatttgacttggctaatggacttgtttcaaatgaagttacaatcaagaagtctgatgcatctcataatcaccataagaaacctcaggggaaaaaagatcgttctcagagaacagagaataatgatgctgacgggatgccagttgtaaagttccttagaaaccattaaacacaagtcatgtgaaggtctaatatgttcatacccctcggatatctgtacagcagacaacacctgatctgtgagcccagtatgtacattgttagtcaaagactgaataagttaaagttatatatatactttgtaatgcattgtagaactaagtagacaatcacgatgagtataacacaaaagtattttgtatttacagtgatgaggtatttttattattaatctatgtaatataagctaattttgtatgcatatctgcaatacttttgcataggatacagcattattaatctatctactctctttatgggacagagactatgtttcttgagtcctcaattaaataattcgatcacttttttaataaaaaaatgattcaatcacttaaaaacctccctcctagctaagtacgcattggaggataatgaagaaacctaatgctttatgggaaaaa

SEQ ID NO: 5922 - DNA, 1025 bp, Glycine max
acgacagaaggggaacaacgacttaaggcattctctcttctattctattctaaactcgaaacaatcttagagaaagaagcagaagaaaatgccgatttctagaattgccattggaaattcttcggagttgaaccaatctgatgcacttaaggctgcactagctgagttcatctcaatgctcatctttgtttttgccggggaaggctctggaatggcttataataagctgacaaacaatggttcagcaacaccagcagggttagtggcagcatcactgtcacatgcctttgcactttttgttgcggtctctgttggagccaacatttctggcggtcatgtaaaccctgctgtcactttcggtgcctttgttggtggccacattaccctctttagaagcatcttgtactggattgctcagttactcggctctgtcgttgcttgcttgctccttaaatttgccactggtggactggaaacatctgcatttgcactatctcctggggtggaagcagggaacgctctagtgtttgagattgtgatgacttttgggttggtttacacggtgtacgcaactgcagtggatccaaagaagggtgatcttgggataattgctccaattgcaattggtttcatcgttggtgcgaacatcttggcggggggtgcatttgatggtgcatccatgaaccctgcagtgtcgtttgggcctgctgttgtcagttggacctggtctaaccactgggtttattgggtcggcccatttgctggtgctgccattgctgctattgtctacgagattttcttcattagcccaaacactcatgaacagctccccgtcacagattattagagcttaactctctgccttcctttgttgtcactgctctgtgtttttttgttttgcatttgcttgttttcaaatgttggttctctgaactttgtaacatgaacatctttttctttttttttcattatgaaatgttcatttcatctaaactagaattattgtgttagccaagcttccttgc

SEQ ID NO: 5923 - DNA, 1789 bp, Glycine max
agcccgactttaatgcagaggctgttcctaaaaatgggaaccaaatgagttatcaggatgagttccctgataattatttcatgtcctgcattggcagtgttactggtttcaaagatggtgatgtggaggtgacatgggcaactggtttcacaaccaaggtatgatggttgcaccttatgaaattttccggattgagaaacatgaaggttcaactgttacccccactccttttgagacaaatgttgaagagttcactcatgagataatcgaacacaggagtctaccttctgaccagaagggaaaggacttgttaaatggtgatggtactaggaagaattgtgaaaagaatcttggggaatgtagttccttttcccttcctcgagctgcctttgaacttttctccagcattaaagccagcattttccaaacttttagtggaactctactttcaggagcagtttcctcagtacctacatttgaaaaggagaatggatatgcttatccagacaagaaggattcggaaacttgtgacctctttactgaacaacatccaatgactgagttgcaatatacagaagacaaaacttcatatcctgaaaatataaagattcatgagaagaatgattttccattttctttagacagcaacagttcaaaccagttcaagcagtttgatgtaatagaaaattgccctgaccaccatttttttgttgagggaaaagggttgtcaacatctcaggtaaaaagaagttgggtgaaaaaggttcagcaagaatggagcatcctcgagaaaaatcttccagaaactatttatgttcgtgtgtttgaagaaagaatggatctcatgcgagcagctattgttggtgcatctggaactccttatcatgatgggctgtttttctttgacatatgcttccctccggagtatcccaatgaaccacctatggtgcactacaattctgcagggctccggttaaatcctaatctgtacgagtcaggaaaaatctgtctgagtctcctaaacacttggacaggcacagacactgaagtgtggaaccctggagcctccactattcttcaagtccttctctctctacaggcacttgtccttaatgagaagccttatttcaatgaggctggatatgaccaacaaattggcagagctgagggagagaaaaactcagtcagttacaatgaaaatgctttccttgtcacaaccaaatccatgatgtatctattaagaaagccaccaaagcattttgaagcactggtggaagagcactttagaaaatgctcccaacatatacttcttgcttgcaaggcttatcttgaaggagcttctattggatgtgcttttggtagtggaaaaactggacatgaaaaccagaaggggacttcaacaggatttaaaattatgcttgctaagctcttccccaagcttgtagaggcattttctgataagggaattgattgcagtcagtttgttgatctacaaaaagaacctttacttactaagttgtaagtatctgccaaaaatcccgaccgagatatcccaatcttatgtgtaatatcaatatatttacattctcagtataatatcaattttaatctctgggttttgtacttttgtggtttgttactgtggtgtagttgatagataaatcaacataacatgtgcttgtagtatgtgtatgtatcacagcatggtttgtggatgtaaaatatggaataagaaatgcagccattggagtgattagctttaaaaaaaaaagggcgccgccgactattg

SEQ ID NO: 5924 - DNA, 1556 bp, Glycine max
tcgagtcagctaagagcaccgaaatcgaatagtctttttcatctccttcacgtttagtttcaacttccaatctgttcattcacgattcaaaccctaagcagttacaagtttctatcactgccactattatcaagtttctttaccatcgtccaaattccattttcttcgaagccatacacttttcactaaaacaaaattgattaatgttagggttttggaaagccaatttcagagcagactcgaaaccctagattccacaaatccatgccagcttgatctcgcagcttccgtcaatggcgatcatcggcgacgcgcttcgccaggcgttcatgccgaagcgcgagtacgagagcctcagagaagaagacaaggcgtggggcaagcttcagaggcccgtgacggtggcttccgttgccgtcatcgtgctcgcaatcgccgtgtccactgttatcagtttgaaaatcgtgtttccgagtagcgatggaagaagagcgttttgcgtcgatcgaaggcttcaacctattcaaataggtatgaaaggcggttccgattcggatctgtttcctggtgctttttatctcacggaccaggagattgctgattattactggatgcttgtgttcattccctccatgatcgttttcgcgctctccgttgtatatctcgttgctggcatgactgttgcatattctgctccaaataggcatggatgcttgaaggtggttgaaaataattattgtgcttcgagacggggaggtgttcgctgtctgtccatcttaaaccttatctttgctatcgtctttggtggtcttgccttgtttcttggttcaactctcttgacattgatgagcaactgctctaaacctctgttttggtgctatgaaattgcatgttggggactggttgtactatatggtggtactgccttcttcttgaggagaaaggcagccacaattcttgacgagggaaattttagtggtcgaaatctagggttggaaatgctggaagcgagccccctggaagtcacaccagaggtggaaaggcgtgttaatgaagggtttaaggcatggatgggtccatcccttctttcttctgatgaagaagatgaacctgacagctatgatgaggcacctcattcaacacatactaacttaaacaggcaaagactctgaactggataaattcagtgtgaaacatcatcttttccagccttcatgccttaaaagaatgctgtatggtatggaaatcagttttggacaaaaatgttgacatgtatcatatgacaaaagcaaatgttgattaaagaaggatggatttgatgctcaactttgaactacgatttcatctggtctggtccaataggtacagtttgtgtagtttagcttgtgaataataattaaattgggaatgaccaagctttgcctttcctaaggtggatgggttgccgaaccgcacttgctggtcttctctctatgggcctgccttttcttaattgcttttttagtctcaaaaaaaaaaaaaaaagcacttttatttaaatttagtatttattatgt

SEQ ID NO: 5925 - DNA, 1720 bp, Glycine max
  misc_feature (1671)..(1671): n is a, c, g, or t
aattcatcactctcttcctcacgaaccctaatccctaatctcatcatctattgaggtttctcatctcattcttcactccttgatgatcgcactctacatttcccttcctccccttctcaattccccaatcaatagcaaccctcgatcccttattcctcttccaatcgcacctaaagataaagaataaatactcgttcaaacccccaaatccctgaatcccaattcactttatcacacactctctgtttcgatcatggacgtggacggtggcaacaagcgcgtgtacaaccgcctcggtggggacgccaagcaccagaaagtgtgcttccactggcaagcgggcaagtgcaaccgctacccgtgccccttcctgcacagcgaattgcccgcgaattctcaccacgccaatggcgcctcctcgaagcgggcatacgacaattcgggcttctcgggcccgcgccgcagccccagtttcaacaacacgtggggccgtggcgggagccgtggtggcggtggtgccggtgccggtgccggtagaggggtggtggtgaaggcggagaaagtctgtaattattggattcaggggaattgtagttatggagagaggtgcaagttccttcacacttggagtgtgggggatgggttttctttgctgacccagcttgaagggcatcagaaggctgtgagtgcaattgcctttccctctggttcagataagctgtataccggaagcactgatgagactgcaaggatttgggactgccaatctggaaagtgtgtaggtgtgatcaatcttggtggtgaagtaggttgtatgatcagtgaaggcccttgggtctttgttgggatacccaattttgtcaaggcctggaacacacaaaatttatcagagctaagtcttaatggtcctgttggacaagtatatgcacttgttgtgaataatgatatgctctttgctggtacacaggacggatctatattggcatggaagtttaatgtagctaccaactgctttgagccggctgcatcacttaaaggtcattctcggggtgttgtttcattagttgttggtgccaatagactttactctggttcaatggacaatacaataagagtatggaaccttgaaaccttgcagtgtttacagacactaacagagcacacatctgttgtgatgtctgttctctgctgggaccaattccttttatcttgttcattggataaaacagtgaaggtatggtatgctactgaaagcggaaacttggaagtgacatatactcccaacgaagaaaatgtatttgttaatttaattactttttcccctggatagttgtttctattttaatatgatattgcttgtccaggttgaaatgatgttttctcagaattgtgtggaatcaattcttacctctgctatcaatgttccagctactactcttttgaattaatggttttagaaaatataagaaatgtgctcaagtttctgatgatgaaattggctcagtattgcatacaaccagataggtacttgaccagaaaggggcataatggcatatagatgttgtagcttagtttttaaagtcattccttggtgataatactattctaaatatttccatcctcacaaataatgaggcataggaaccagatacaaaataaaaaatgactcanatctggatatagcaactaaagcagccttgtatagggcagaattaatgag

SEQ ID NO: 5926 - DNA, 1934 bp, Glycine max
cgttttcttcttcgtattttcactttttggtcgcatattaataatcggagacgagaagtgtagttttagtgggagaaggaagaagattgacagagagagagaggaaggagcgcgaaaagactaaattgaccttggatcttcgtctttcctctctctccgattcgtttttcgttggtcttctaaaagcttcttccaccatgaacagcaaggccaacgtttccaaagagctcaacgccaagcacaagaagatactggaaggacttcttaaattaccagagaatagggaatgtgctgactgcaaagctaaaggtccaagatgggctagtgtaaatcttggcatctttatatgcatgcagtgttcaggaatacatcgaagtttgggggtacatatatcaaaggttcgttctgcaaccctggacacttggcttccagagcaagttgcattcattcaatcaatgggaaacgagaaagcaaattgtttctgggaagcagaattacctccaaattatgatagagttggaattgagaatttcattcgtgcaaagtatgatgaaaagagatgggttccaagagatgggaattcaaaaacaccttctggatttcgggaagagaaaagtccttcacattggcagaggcctgtggagagaagtggttatgctgctgtttctgaaaataaatttgaggaaaggaagaaaatccaaccatcaaatgcaatttctaccacaagaattaatgttcctgctcctcccagagcatctgagcaggtaactcctattaccaaacctcagcatgtggagaaagtggaaccagtagcaccacaaccaccagcttcccaaccacaagctgaaacatcaaagcaagctacagacacagttcaaaatatccctccaaaagttgactatgctacagaccttttcaacatgttgtctatggatggccctaatgaaaatggctctgaggcagctggtacaactactgatgataatcactgggcaggttttcagtctgctgcagaggtgtcaacagctgagaagactagtcccctgaaagcagctgatagtactccaggttctgcatctggaattgaggatcttttcaaagatttacatcctgtgacaccaagtttgactccagaaaaaccacagaaagatgtgaaaaatgatatcatgagcctctttgagaagggcaatatggtgtctccattttctatgcatcaacagcagcttgccatgctagcacagcaacagtctcttctaatggcttctgcagctaaatcttctggtggggatcctaggtatcctgctagcatacaacaacctagacccaatgttcctatccaaagttggccagctactggctattcaattcctggagtaatgcccatgggtggtcagggagagttgcaaaaacttgtgcagggtcagactaggaacatgaccccagcacattttgcagggagttctgttcaatatccaccatccagtttctatggtatgggacaagttcctcctccagttaacggtatgacaatgggagtgagtaaacctcagtcaggagctcctgcagtgtcatctaccacttcacagtctgcgaaggattatgatttttcctccttaacacagggaatgtttatgaaacagtgattgatcttttttgttgggcaatgccagctatgtcatatactaccatagaagattagttaaaattacagcaggtgcgctttcttttctcatttttcccttgacctgtccttgtggtgtaatccatttgtagagctagttcaggttttttctcgttcatttcaggtgattgcttcatttgtatccgtagttgtattcactatttatttatgcacaataaaattagtgatatttattatatattgatattccttcccttgccaaaaaaaaaaaaaaaaaaaaaaaaaggggggg

SEQ ID NO: 5927 - DNA, 1832 bp, Glycine max
accaaattgaccttggacttcgtctttcctctctgctccctgtgaactctcgttccgattcgttttcgttggtctgccccccccccccccccccatgaacagcaaggccaacgtttccaaagagctcaacgccaagcacaagaagatactggaagggcttcttaaattaccagagaataggggatgtgctgactgcaaagctaaaggtccaagatgggctagtgtaaatcttggcatctttatatgcatgcagtgttcaggaatacatcgaagtttgggggtacatatatcaaaggttcgttctgcaaccctggacacttggcttccagatcaagttgcattcatccaatcaatgggaaacgaaaaagcaaatagtttctgggaagcagaattacctccaaattatgacagagttggaattgagaatttcattcgtgcaaagtatgacgagaagagatggattccaagagatgggaattcaaaaacaccttctggattgagggaagagaaaagtccttcacattggcagaggcctgtggagagaagtggttatgctgctgtttctgaaaataaatttgaggaaaggaagaaaatccaaccatcaaatgcaatttctaccacaagaattaatgttcctgctcctcccagagcatctgagcaggtaactcctattaccaaacctcagcatgtggagaaagtggaaccagtagcaccacaaccaccagcttcccaaccacaagctgaaacatcaaagcaagctacagacacagttcaaaatatccctccaaaagttgactatgctacagaccttttcaacatgttgtctatggatggccctaatgaaaatggctctgaggcagctggtacaactactgatgataatcactgggcaggttttcagtctgctgcagaggtgtcaacagctgagaagactagtccgccgaaagcagctgatagtactcccgtgtctgcatctggaattgaggatcttttcaaagatttatctcctgtgactccaagcttgactccagaaaaaccacaaaaagatgtgaaaaatgatatcatgcgcctctttgagaagggcaatatagtgtctccattttctatgcatcaacagcagcttggcatgctagcacaccaacagtctcttctaatggctgctgcagctaaatctactggtggggatcccaggtatcctgctaacatacaacaacctaggccaccaaatgttcctatccaaagttggccagctactggctactcaattcctggagtaatgcccatgggtggtcagggagacctgcaaaaacttatgcagggtcagcctaggagcatgaccccagcacactttgcagggagctctgttcaatatccaccatccagtttctatggtatgggtcaagttgctcctccagttaacggtatgatgacgacaatgggagtgaataaacctcagtcaggagctcctgcagtgtcatctagccctacacagtctgcgaaggattatgatttttcctccttaacacaggggatgtttacgaaacagtgattggtcttttttgttgggcaatgccagctatgtcatataccatagaagattagttaaaattacagcaagtgcgctttcttttctcatttttcccttgagctgtcattggggttgtaacccatttgtagagagctagttcaggtttttcctcgttcatttcaggtgattgcttcatttgtatccgtagttgtattcagtatttatacttatttattcacaataaaaagttagtgatctttactataaaaaaaaaaaaaaaaaaaaaaaaaaaaaaaaaaaaaaa

SEQ ID NO: 5928 - DNA, 1288 bp, Glycine max
  misc_feature (922)..(922): n is a, c, g, or t
  misc_feature (926)..(926): n is a, c, g, or t
  misc_feature (975)..(975): n is a, c, g, or t
  misc_feature (998)..(998): n is a, c, g, or t
aataagaagctgagttttggagtggctggttatgatttgatgttgatgttgataagagtagacatgagagagattggggtataaaaagaaattccaccaaatttgcagttgcagatgcaacaacaagcactatagagtttgcttgattcacaattcaggcaggtaggcaggcaggtcttttgtctccatccatccatactgcatgcctattcccttggcgtccaagcaagcatcaaacgtgagtgataccttcaactctttctcttaatttataagttgatatccattcccagacaataggcaattccatgcacgaagaagatcaagcatgaggactaaagctcatcaacccggcctcaacttgaagctcctcattgtagcggtcttggttgccattaccctcctatttgtgctaattagatcatcaaacacgaaaggagtgaagcagcaagaggcattattagtaaagagtgatgggagttgcaacaagatgaagataccgggatcggtgtcggaagcactgatccactactcaacatcaagcataaccccacagcaaacggtgaaagagatatcagtgacagcaagagttctggagaagaagtcgccgtgcaatttcctggtgttcgggttggggcacgacagcctgatgtggaatgcgctgaatcacgggggaaggacgatattcctggaagaagacgagtcgtggattcagcaaatgaggagaagatttccaatgctggaggcgtaccaagtgaattatgagagcaaggtgaatgaggctgagagcatgatggaggttgggagaggaggagagtgcagggcagtgggagatccgaggtactccatatgcccacttgccttgaaagggttgccgagtgtagtgtatgagacgaaatgggatttgataatggtggatgcncccnctggctattacgagaatgcccctgggaggatgacagccatatacactgntgggatgatggccaggaacaganagagcggagagacggaggtgtttgtgcatgatgtcaacagagtcgtcgaagaccaattctccagggccttcctttgtcaaaagtacatgaagaaacaggaaggcaggctaagacacttcacaattcctagttacagggaccaccaccaggacatgcccttttgccctccatagctacctctcttcttcttcttcttcttcttcatgcaatcaaataaaattctcctttcctttcctctaaaaaaaaaaaaaaaaaaaaaaaaaaaaaaaaaactcgagactagttctctc

SEQ ID NO: 5929 - DNA, 713 bp, Glycine max
atagccaacttcaacctcagcctctcaccaagggtactcgcactcttccaatttctctctcatccattttattactatttgtgctgtttcactctgaacatatcgaagacttgcaggcgctctattacagcctgtgagttcaaaacatgtgcgaaatcgcataccatcctcttttcaattcagatcctcttgatgtgcatgtcttgagggttttttttttgcagaatgatgaacattctcaataatgatctatttgcattgtttcgggcgttacccttttttttatatttattttgtaaagggaacaatttttgcaagtgaaacttgttttttcatttgaggattttgtttagtatacctgctgtgcttatggacggtcttgtactgattcgttatgtcatcagcacaaaacataaacctaagctacatctaatgttgccaccatgaattttttgtgtgttccaattcatatgggaataacacttctgcattgtggcaaaagttataattactttctaatatcacaatctaaataatctttttcgagtcccatttaaggagttttaaatttgaagcctttttttggtttcacagaataattatgtatttttatggctaagctgtcagttatatttgcttttatttcagtcatagccaataatgcaatgaactctgtcatttgttttaaatgtcaatggattgtaacaatttac

SEQ ID NO: 5930 - DNA, 1518 bp, Glycine max
cctagagcatcctaatcgaaaacctgcttggttgctgagaaaattttccaaatatttcccctttcgattttctcccctttccgggattgcgaaaaacgacgctaattcgtgtagctgcatttagaatcgccaactcagaagcagtcctaattcctcaatggagagttctgaagaggaaactgatggagtctctggtaatcatgctcctaaggaactgattcgtttggcatcaaatggtgcaaaatttatagatgaagtactcaatggtcaaaatgaatgctgtctggataattttcgcatggataaacatgtattctataagttgtgtgatatcctgcaagccaagggtttattgcgtcacacaaatcgaatcaaaattgaggagcaactgggcatatttatgttcattattgggcataatctacggacaagggcggttcaagagttattccgttattctggagaaactattagtcgtcactttaacaatgttttgaatgctataatgtcaatttctctggatctctttcagcctcccggctctggtgttccttcagaaatcattgaagatcctagattctatccatattttaaagattgtgtcggagtaatagatggtatacatgtaccagtaacggtaggtgtagatgagcaaggaccattccgcaataagaatggtttgctttcacagaatattctggcagcttgctcatttgacctcaagtttcattatgttttggctggatgggaaggatctgccacagacttactagtttttaattcagcaatcacaaggaggaacaaattgcaggtccccgaaggtaaatactacatcgtagacagcaagtacccaaatgtgccaggtttcattgctccatattccagtactccctactactccaaggaatttctcagcgattaccacccacaagatgccagtgaactgttcaatcaacgacattcattattacgacatgttacagatcgaacttttgggatcttaaaggcacggtttcctatattgatgtctgctccttcttatccattacaaacacaagtgaagttagtggtggctgcatgtgcgttgcacaattacattcgcagagagaagccagatgattggcttttcaagatgtatgaagaagggtcatttccaatggaggaaccacaacccccattggagatggaagtacctccaaagatggatgttgagacccagacccagccatctgttcatacttttgattcagaagaaattggacttgcttcacagttaagggactccattgctactgaaatgtggaatgattttatccacgatttcccccccatgtaaatttctttagttaagcttatatatgatcatattaggtttgattttttctcagggtctacagtatatgagactatgttgccttagtttacagtggcattttgttcataaaacagaagtatgcatgtagatcatatctcatcacataagcttttgcttttaattcttataagatggattataag

SEQ ID NO: 5931 - DNA, 1099 bp, Glycine max
ctattttcctgttttttttcgtgtcagctacgtaggccccccccgctctttttcagttctttctccctgccttgtttcagttctttctttggtcactcactgctctctaacctagttccacatttttccactcaccaagtctctatctttcatctcatatttctcttcattcacatcacttctctgatctgtctcttcactctctttgacccagatcaaattttttaccttttgttcttctctctttctctccgttaatgctttgcttcaaaccattctcagaaaaaccaatgcttccatctgggtctaccctctttctggatttttgttatctgattttgtaaaatgggttgttttttatatgcagaaatttgattcaatataggagatttcttacagagaaattttagtacattttgacaacaagggcttttggcaatgggcagaggcagaggaaaagggaagaagcaatctgttattgctgaggatcctggaagtggtgaagaggataaagtcccagcttatagaagaaggggaagaccagtgaagccactaacagatgaaattgaagaagtggaagtaactgaaataattgagaaagacgaggagaatgtgaaaggcaatggttctacggatgatttgaaaactcaggctatcacagttaataaaagaaaaaggaagagatctacacaggttaaagagaagatagatcccttgaaagaggacaatggcatcctagcaaagtcaggccctgaagattcaataaagactactggattccgacagaatggtagccggcgtaagaacaagcctcaccgtgctgctgaagctggggtagattgcaagtgagcaaggttctcatgatatttctgttttaagccctcggaatagatggagtttgttatcacaagacagggattgtttgattgtgtaaggcttgttatgtttgcttgttattactcattttgcttttgtgactttcatgtgctatttctgattttaattttgagtattcatagcagactgtgctcctttagtcttctctataaaactattgctaaaagaaagcctgaaattttgtagatattctttaaaaaaa

SEQ ID NO: 5932 - DNA, 955 bp, Glycine max
atgtatctagcaaaccccaacaagaggattttttttttttctctcccttcaacgcaaaaacacacacaacccttagtaatcatcatgtcctctcctctcttcttgccctcatcattagaccctcgctttcatcatcaccaccgcatcttttacctcccaccaaccgcaccaaagccatcatcctcctccgcctctaacatcaccaccacaacaacaagaacaagaagaaagagaagcaaggagagagagaagggttagaagggtgaagaagcatgtcttcactcaagaagaagaaaccctattacccgcttccgttaattcctatctagtactactactttacttctgattcaaaagggtgatcttcttcttcttccaagcttatcaattatcatgcatatgctactttcttctctcttctcggggaattgaagcgttgtggtccgattgtttgctagatcaagcaaattaacctatatactggtctatatcatcatcaccttgcacctctctctctctctctctctctatatatatatatatatatatgtgggtttaatctcttactttctttatcttttcacttttttcagttttggtttgatttaattacttgattaaaacttacatatatggatttgaatatatagtacgtggttttcgagcttggtgtttctagatattataataatatgatggtgaaaaacaaaactagtactctctttttcttttttgtcgttttgttgttgagcagtgagagcactgtcactttgtgccttcttttacttgtaaattcgagatggagcttgagctttgttactattgcttcaatttaagtttctggatacagttggaggtatagatctggatttccatatatatgtatgttaataaatgttgttcttcatgagaataacacagttggattgtgcaaaactatgatgtttttgtgtac

SEQ ID NO: 5933 - DNA, 1578 bp, Glycine max
caagtttgctcgttacagcaagtttgaagagtgtggcagcttacgaaggccccccccccagagatttgcttagttctgccaatgtaatgtgtgctttaagttttgaccgtgatgaggatcacattgcagcaggaggagtttcaaagaaaatcaagattttcgacctcaatgctatttcaagcgattctgttgacatccagtacccagtagttgagatgtcaaataaatcaaagcttagttgtgtgtgctggaacccttacataaaaaatcatctggcatctactgactatgatggtgtggttcagatgtgggatgcagacactggtcagccattgtctcaatacatggagcaccaaaagagagcttggtctgttcacttttctttgtcagacccaaaaatgtttgctagtggaagtgatgactgctctgtcaaactgtggaatatcagtgagagaaattctctgggaaccatctggaaccctgccaatatatgctgtgttcagttctctgcttactcaacaaatcttctattttttggatcagctgattacaaggtttatggttatgatcttcgtcacactagaatcccttggtgcacattagctggtcatggcaaagctgttagctatgtaaaatttatagattctgaagcagttgtctctgcttccactgacaactctttaaagctttgggacctgaacaaaaccagctcttctggtttgtcatctgatgcttgtgccatgacctttaaaggtcatagtaatgaaaagaatttcgtgggattatctgttttggatggatacattgcatgtggttcagaatctaatgaggtgtactgttatcacaaatcactgcctgtgccaattgctactcataaatttgagtcaattgatcacatttctggtcatctaaatagtggtgataataatggacagtttgtttctagtgtttgctggagaaagaaatctaacatgcttgttgctgccaactcagttggaattgtgaaactattgcagatggtctgacacaaaagagaaaatatttggttaacatttaagcctgaaaagctattcatttcctgactcgataatattttgatttagtatacctgtcagaagactagttctttattcaggcttcaatgattaatagggtataaagcttaaatgggttcaccatttggcattgcttctgaggcaagcatcaatgtacaattgtgaaccaaagtaagctgaacaagaaatgtacatagcatgtacaaatgtaggcttttgaactgaagcactgatgaagctggagcatgcaagtctctctcaaatgcggtattgcacgttactagtggttttctctaatgtctgatccattacttctgtatatagcacgccctcctaagcagagatacatactaattacctttactttcagatcacttttagtttctcggaaaagtacaggagatgatctatgctttgcatttactttgacatatattaactgttgtagttaatatgatggttcaaatattaattttacgctttcatttaaaattgaaaaacaagggtgaccgctcgcgttcta

SEQ ID NO: 5934 - DNA, 1272 bp, Glycine max
tcctgaagtgctcaacgatggagtttgcacattttcatcaaatatttatagccttggagttctcctttttgagttgctgtgcaatattgagccatgggaggcgcattcaactgcgatgttggatttgtgtcagagaatcttaccacctaaatttctagcagaaaatccaaaggaagctggcttttgtctttggcttttgcatcctgaaccttcttctcgccccaatgccagaatgattttagactctgaagttatgcgtgaatcagaggaatcaaattctgtagatgatgttggaatatctgatgacgaggctgaaacagagcaattactagattttctaattttattcaaagaagcaaagaaaaaacgggaagcgaagctggaagaagagctaaatttattgaatgaagatatgaaggaggtagaaagaagttattcatttgtgacagattcagtatttcctttggtgcaaataaacaatcctgaattgagaggagacagtttacattttcaagattcttccggttcagacattagtagatccattcgaaggttgtttggttatgaagaaagatatatgagtaacataaatcagctagagaattcttacttttcctcgagatttcgagtcctgccaaaagaagcttcatctgtttcaatcaatgataaaaatgtgatggaaagtagatggaggttgcctcaagtagagaatgttaataaggagtctagaagaattcagagttctgttggttgtgtaggatccttctttgaaggtttatgcaagtttgctcgttacagcaagtttgaagagtgtggcagattaagaaatagagatctgcttagttctgccaatgtaatgtgtgctctaagttttgaccgtgatgaggatcacattgcagcaggaggagtttcaaagaaaatcaagattttcgaccttaatgctattgcaagcgattctgttgacatccagtacccagtaattgagatgtcaaataaatcaaagcttagttgtgtgtgctggaacacttacattaaaaatcatctggcatctactgactatgatggtgcagttcagatgtgggatgcagacacgggtcagccattgtctcaatacatggagcaccaaaagagagcttggtctgttcacttttctctgtcagacccaaaaatgtttgctagtggaagtgatgactgctctgtcaaactgtggagtatcagcgagagaaattctctgggaaccatctggaaacctgccaatatatgctgtgttca

SEQ ID NO: 5935 - DNA, 1890 bp, Glycine max
tgaacatccatgtgagtagtagtagtaagaccctattaagaagcggaaggactcgaaaaagcgtgatcacatgagaatcacttaacctctgaccttaaaataagcttcaccttcgagcgagatggcggcagagataccgtgctgtggaacaaagttttcactgtacgtgttggtgatcataggattggtctgcttcgctggcctaatggctggtctcactctcggactcatgtctttgggaatcgtcgacctcgaagttctcatcaaatctggtcgtcctcaggatcgcatccacgctgcgaaaatttatccggtggttaagaaccagcatcttctgctttgcacgcttttaattggaaactccttagccatggaggctcttcccatttttcttgattcactggtgcatcccgctgcggcaatcttgatttcggtcacgctcatcctcatgtttggagagatattgccccaagcaatttgtacaagatatggattgacggttggagccacgctggctccacttgttcgggttcttcttatagttttcttcccgctttcttatcctatcagcaaggttcttgattggatgttgggtaaaggacatgctgcccttttaaagagggcagagctcaagacttttgtgaattttcatggaaatgaggctggtaaaggaggagatttaactcatgacgagacaaccatcataactggtgcacttgaattgacagaaaagactgcaaaagatgccatgactcccatatcaaaggcattttcccttgatctggatgcaactctaaatttggagacactgaattcaataatgacaattggtcatagtagagttccggtttatgcaggagaaaaaaccaatattattggacttgttctggttaaaaatctctttatggttgattcaaaggctgcagttcccctaagaaaaatgctcatcagaaaaattcctcgtgtttcagagaacatgcctctctacgatatactgaacgaatttcagaagggtcacagtcatattgcagttgtgtatagggatctaaatgataaaaacgaagccccaaaaaaggttaacgatggggaacaacttgatcttaaggacaagcataagaataacggagagaatgcatccttggctaaaggtgtgaaattggagtcacatgattctttgattactgatggcgctcagcaagcaaagaaaagtccaccagcaactcctgcttttaaaaagcgacatagaggttgttcatattgcatcctggaccttgataatgctcccctgccagtgtttccacccaatgaagtggttgttggtgttattacaatggaggatgtcattgaagagcttcttcaggaggagatactagatgaaactgatgaatatgtcaatatccacaacaagataaaagttaacatgaatgcttctaaggagaaggctcctgatacaaatctgttgcagccttctcaagcagttcaaggacacacgccaactaattcaatttctacagctacttctgcaacgggctcacctaccacaattgatctaatctccgaaagtgagtcactaaggaatcaatagttcataaagaataagagaatgacataggtttgtgtttgtgttgaaaaggtagagcagtatatagtttcttgtaaaaatttccctgtatgatattatgttaataaattaatgtagagaaaggaacactacggtagcgtgtggctcgccagacaaaacagaatggagttcattttggtttcacttttaatgaaagtggaatcaaaagctatcactttttaatatcacatccagttctgttcattttttaatgtacgaaacataaaacagaatttttatgttatattctatctcattttagcaaagta

SEQ ID NO: 5936 - DNA, 1793 bp, Glycine max
atcattttttcaaagctggcaaccctcttcttccccaccatcacaccaaccaaacctcactctccctttctcccctgaccctctccctgccatggtcatgggagcctttggccacttcgaaccggtctccaaatgcagcaccgagaaccggtctaaccaaaccgtggcctcggacttggacggcaccctcctggtgtcccccagcgcatttccttactacatgctggtcgccatcgaagccggcagcttcctccgtggccttgtcctccttgcctccgtccctttcgtgtacttcacgtacatattcctctccgagaccgcggccatcaagtccctgatcttcatcgccttcgcgggcctgaaggtcagggacgttgagatggtcgcgtgctcggtgctgcccaagttctacgccgaagacgtgcacccggagagttggagagtgttcaactctttcgggaagcgttacattgtcacggctagtcctagggtgatggtggagccgtttgttaaggcgtttctcggggctgacaaggtgcttgggactgaacttgaggccaccaaatcggggacgttcactgggtttgttaagaagcctggtgtgcttgttggggagcataagaaagtggctctggtgaaggagtttcagggtaatttacctgacttgggtctaggtgatagtaaaagtgattatgacttcatgtcaatttgcaaggaagggtacatggtgccaagaactaagtgtgaaccactaccaagaaacaagcttttaagtccaattatttttcatgagggtaggtttgctcaaaggccaactcctctagctgccctcttgaccttcctatggctgccaattggcatcatactctccatcttaagggtctaccttaacatccctttgcctgaaagaattgcttggtacaactacaagctcttaggaatcagagttattgtgaagggtacccctccaccgcccccaaagaagggtcaaagtggtgtcctatttgtttgtaaccaccgcacagtattagaccctgttgttacagcagttgcacttggaagaaaaattagctgtgtcacatatagcataagcaaattcactgaaataatttcaccaattaaggctgtggcactctcaagggaaagagagaaagatgctgccaatatcaagagactacttgaggaaggggacttggtgatttgccctgaaggcacaacttgtagagagcctttcctcttgaggttcagtgcactttttgctgaactcactgataggattgtcccagttgctattaacacaaagcaaagcgtgttttacggaacaacggttcgcggacacaagttgttggacccctactttgtgttcatgaatcctatgccaacatatgagatcactttcttgaaccagcttcccaaggagctcacatgcagtggagggaaatcagcgatcgaagttgcaaactacattcaaagggttcttgcagggactttgggatttgagtgcaccaatttgactaggaagagcaaatatgcaatgcttgcaggaacagatggaacagttccatctaaggagaaggcttgaaaagagagagggataaattaagcccccttttgattattctgtattggtgcccaatgtgtttccaaaacacatagaattatgatagaaataaaatcttatcattgtggccggtaaaaaaacaaaaattacagtttatgtatattttgttattctgatatatacaaatcataacgactgttattgggtcattcctgaaatctagttactacat

SEQ ID NO: 5937 - DNA, 1792 bp, Glycine max
cttttaaaacccccacttctccctcccctctctcctcataacatttcaaagctgcctaccctcttcttccccaccatcacaccaaccaaacctcactctccctgccatggtcatgggagcctttcgccacttcgaaccggtttccaaatgcagcaccgaaaaccggtttaaccaaaccgtggcctcggacttggacggcaccctcctggtgtcccctagcgcctttccttactacatgctcgtcgccatcgaagccggcagcttcctccgtggccttgtcctccttggatccgtccctttcgtgtacttcacgtacatattcttctccgagaccgcggccatcaagtccctgattttcattgccttcgcgggcctgaaggttaaggacattgagatggtcgcgtcctcggtgctgcccaagttctacaccgaggacgtgcaccccgagagctggagagtcttcaactccttcgggaagcgttacattgtcactgctagtcctagggtgatggtggagccgtttgttaagacgtttcttggggctgataaggtgcttgggactgagcttgaggccacgaaatcggggaggttcactgggtttgttaaggagcctggtgtgcttgttggggagcacaagaaagtggctgttgtgaaggagtttcagggtaatttacctgacttgggactaggagatagtaaaagtgattatgacttcatgtcaatttgcaaggaagggtacatggtgccaaggactaagtgtgaaccactaccaagaaacaaacttttaagtccaattatttttcatgagggtaggtttgttcaaaggccaactcctctagcagccctcttgaccttcctatggttgccaattggcatcatactctccatcttaagggtctaccttaacatccctttgcctgaaagaattgcgtggtataactataagctattaggaatcagagttattgtgaagggtacccctccaccacccccaaagaagggtcaaaggggtgtcctatttgtttggaaccaccgcacagttttagaccctgtggttactgcagttgcacttggaagaaaaattagctgtgtcacatatagcataagcaaattcactgaaataatttcaccaattaaagctgtggcactctcaagggaaagagagaaagatgctgccaatatcaagagactacttgaggaaggggacttggtgatttgccctgaaggcacaacttgtagagagcctttcctcttgaggttcagtgcactatttgctgaactcactgataggattgtcccagttgctattaacacaaagcaaagtgtgttctacggaaccacggtttgcggacacaagttgttggacccgtactttgtgttcatgaatccaatgccaacatatgagatcactttcttgaaccagcttcccaaggagctcacatgcagtggagggaaatcagctattgaagttgcaaactacattcaaagggttcttgcagggactttgggatttgagtgcacaaatttgactaggaagagcaaatatgccatgcttgcaggcacagatgggacagttccatctaaggagaaggcttgaaaagggagagaaattaagttctcccttttgattattctgtattggtgcccaatgtgtttccaaaacacttagaattatgatagaaataaaatctgatcactggctggaaaaaaattacagtttatgtatattttgttgttctgatatatacaaatcataactactattattgggtcaaaaaaaaaaaaaaaaaaa

SEQ ID NO: 5938 - DNA, 792 bp, Glycine max
tttccgaaacgagagtttatcaaaaaacaaatctaccaaacaggcccgtaaatgtcatatacaatttcgaccctcttcttttgtgcttcgccatcgcaaagtttgtggttttagtttctgaatcaatttcgaagtcatccaaccagccactggattcttggagagcatggacactcagaaaagtcaacctgagaagcagtcttcatccactgcaactgccccatctgttacttcatgtcgaaagaagaagaatgaagaagctgctttcttggacgatttgaaggaccacattgatgagtttattaatgcttctatggatgaacacaaaacttgttttaagaaaacaattcagaagatgtttggtatgtccaaggctgttgcagaaggtcagtccaatgcttccaaagaagttgaaagttctctgcctcttcagacaactgtacaagactagatttcttgcttttgaaccactaggttttaaccgaggcgtgtggttataccacccagatatttagttatattaggctatttgaaactaaattttgtttgtgaaaactacattcatgggttgttttttgtttttactagtatggtttctatgcttaagtattgttgaattatggtagctgatccaatttctaaagtgagtcccaaccatcaactcctgtaccccttttccattccactgatgtaggatgttgacccatcacgatgtaagatgttgacattgcaccaaaaacttggaagacctatttttctatgaagtcaacattgttaaaggtctgcactaac

SEQ ID NO: 5939 - DNA, 1947 bp, Glycine max
caggtttttaggctgctatttgattttgctgtttcaccaaggtttttgagtggcaaaggtgggataatggaggagaatgttggggacattccttctgtttacaggtgggaattgaccaatagggctgttcatgctgctgctagaggaggaaatctgaagattttggaggagcttcttgccaattgctctgatgttttggcttatagagatgctgatggatctactgttttacatgcagctgctggcagagggcaagttgaggtaattaaatatcttacatcatcctttgacatgatcaactccacagaccatcagggtaacactgctttgcatgtggcttcttccaggggccaattaccaacagctgaagctctagtctcagcatttccctcacttatgtctctgagaaacaactctggagaaacttttctccacagggctgtgtccggttttaaatctcatgcattcagaagattggacaagcaggttgaacttttggctaccttgcccccccccccgaactttcatgtggcagacattatcaatgtcaagaacaatgatagaagaactgctcttcacatggccatcataggcaacattcacactgatcttgtgcagctcctgatgactgccccatctataaatgtgaatatatgtgatgttgatggcatgaccccactagattaccttaggcaacaccccaaatctgcatcatcagatatactaatcaaaaagttgatctcagctgggggaatgtttggctgccaaggccatagttcaagaaaagcaatagcatcacacttgagaatgcaaagcattggaagcagtccagggacatcattcagagtctcagacactgagatgtttttgtacactggcattgagaatgtgtcagatgctagtggtgatcatggaagtggaggaatgagttcatcttcatctgaacacattccatacgatctgaatgccactgagaatcgcgtaccaatcgcagccaaaaggcctagtactgtgaaccatgcagcagcaagtttgaagagagttcttctgtggcctagggtgaaggacaagaaatctgaagggttcaaaaagtcttctacaacagatgagggttcagtggactcatgccggaagcggaataacagctttgatgaaactccaaccccacttagacaaagattttctaggccatcttcacttcccaacaacaaaagaactctttctgtcaggagtcagcaatcaagtccaaatgccaagaagaggtttgcttcaggaccagtgcatggagtcatacaatccatgccacatgcaaatgtttctggcagatcaaggtctagttccttttcaaagtcgtcaatttcttcacctagatcaatagacaagcaaaagggcattttcattgacaatgacattgccggaccatcttgctcaagtcaaccatcaccaccacctgatgatgatgaatcaccaaagttggtaaagagaacttctgttggaaggaagttgagggaccattatttctgttttggtgcacctggcattaatgtcaaaaactcagttcacaggcagcaagaaagccagagttacaaggctcatgttgttgcagtggcttaatgggatgagcttatataggtaattctcctgaccaggctaattcaacaaataagggatgaagctgattcatcaactttaaactttactgttaagggtcccttgggggttccttagttgcaagcttttatagattatattttgttacttaaggattagctcatcctcaacttcacttgttaatggtaaaatgctgttaaaatatgattatcatattagcatcaaattaactcaatttggtgcttagtaatgtaagaattagtgttgccaatgtactgattaaaccttttggattaagcagtcatctgcatttttgttaaatgataatctactaaa

SEQ ID NO: 5940 - DNA, 1444 bp, Glycine max
aacaaaagggactaaggagaattaaggtagtaagagtgtaagacaggacatacacagctggttttttataataatcccctcaaatgaataaacaaacaaacaaacaacatttgtgtaataagaatgccaaaaacaggccaatgatgaaataatgaggtctttcttcaattctatattcaagcttgggtgtggccaatgatgaaataatgggttctttcttcagttcagtattcaagcttgtgacacacccgagtcaacagaatggtactgttgggaaaatccattatcagcatctttaaaatcatgattcttctcttcctctttctctaaactaggatgacaaatttcctcaatcttgcttgccaccacatccattgaaggtctcttatcaggatattgagcagtacattcaagggcaagctgcaaaagcttgaccatttcctcctcaacactttggtaccttagaagctccatgtcaaatacctcagtgttccactcatcttgaatcacagattggacccatcttggaaggtccaccccttcatcattaagtgaagaatgagtaggagccttccctgtaagcagctccaaaagcatgataccaaagctatagacatcggctttttgggatattttgcgtgcatcagtgacctctggcgcacagtaaccagacacacggtttggtgtagaggttgggagagcaaggtacgcaaggccaaagtcagagacgcgagcttcaaaagttttggtgagaaggatattcgatgacttgatgtttccatgggaggatgttgggccaagtgaatgaatgtatgcaatcccacgagcagcgccaagggcaatggcagaccttgtttcccaattcagtggagtcctccccactccaccatttgcatgtaagagagcagataagcttcccataggcatgtaatcatacacaacaagcttctcatccctgctaaagaaataaccccttagtgggaccaagttgtgatgaaccatcttccccacttgctcaatcttctccctgaattccttctctgttgcagtaacatccttcaacctcttcaccgccacactcgcccccatctccatcgtcgccttataagtcgtcccaaaggtgcctttccccaaaacttcagctgatgccctcaacaactcatccaaactaaaaactctactcacattcccaaaaaacaccaaactcttattatctccaccaccaccactgctactccgaacctcactcttctccactgaacctgaattcccgccactctcattactcttctcacgagacactacttcaccttccacgacacgcttctcaggtggcaaagtttcattctcatctttcttgttcctttttctacacaaaaagaacaaaagcagcagaatcaacaacacaccaaccacggaaccaataacaatacccgctcgagcc

SEQ ID NO: 5941 - DNA, 1796 bp, Glycine max
ggctcgagcttttttttctctagttcattatcttagtccaccaaaatcttataagtagtgccaagccaaaccaaccacacctacaacgcacctttctttctcttttccctttttcttaggcacaccacacacccactcaaataatagaaactgagatgaatcctgatcagtttcagaagaacagcatgttcgtagaaacccctgaagatggtggcaaaaacttcgacgatgatggacgagtcaaaagaactggtacatggataactgcgagtgcccatatcataacggcagtgataggttctggagtgttgtcacttgcatgggcaattgcacaaatgggttgggtggcaggccctgcggttctctttgccttctctttcatcacatacttcacctccactcttcttgccgactgttatcgttcacctgaccctgttcatggcaagcgaaactacacctattcagatgttgtcagatccgtgttaggaggtaggaaatttcagctgtgtggattagctcagtacataaatcttgtcggtgtaactatcggttacacgataacggcttcaattagtatggtggcggtgaagaggtccaactgttttcacaaacatggtcatcatgataagtgctacacgtcaaacaaccctttcatgatcctctttgcctgcattcaaatcgtgcttagtcaaataccaaatttccataagctttggtggctctccattgttgcagcagttatgtcttttgcttattcttccattggccttgggctctccgtagctaaagtggcaggtggtggagaacctgtacggacaaccttaacgggggtgcaagttggggtggacgttacgggatccgagaaggtctggaggacgtttcaagctattggtgatattgccttcgcttacgcttattctaacgtgctcattgagatacaggataccctgaaatcgagccctccagaaaacaaggtcatgaaaagagcaagtttgattggcatcttgactacaaccttgttctatgtgctatgtggctgcctaggttatgcagcatttggaaacgacgcaccaggaaatttcctcacagggttcggtttctacgagcccttttggctaatagactttgctaacatctgcatagccgtacacttggttggagcatatcaggtcttctgtcagcccatatttgggttcgtagagaactggggtaaggaaaggtggcccaatagccattttgtaaatggagaacacgctttaaagtttccactatttggaaccttccctgtgaactttttcagggtggtatggagaacaacatatgtcatcatcactgctttgatagctatgatgtttccattcttcaatgacttcctaggcctgattggttcactgtcattttggccattaacggtttacttccccatagagatgtacattaagcagtcaaagatgcaaaagttttccttcacttggacatggctcaagatattgagctgggcttgcttgatcgtttctattatctcagctgctggctccatccaaggcctcgctcaagatctcaagaaatatcagcccttcaaagcccagcaataattaaatttgttccaaagtgttctaaattgctttcttccctaagtcactttgttttaataagtttcagcatgttcatggataatgtattgttatcaagtgcttatgaaagaaagaatatagcacacagctgcattgtataaaatgtcaagaacaattctaagatttatgaaagtgtgcactatcatttaaaaaagtcgtcta

SEQ ID NO: 5942 - DNA, 3691 bp, Glycine max
cacgcgtccgcttcagttgcacgccgtgtggatgatgccatttcaagttggtattggtttgttcttgctgtacaactgtctaggagcctcagtgattacggctttacttggacttcttgctgttattgtatttgctgtggtgtctacaagaaagaacaagcgttaccagtttaatgccatgatgagccgtgattcaaggatgaaggcagtgaatgagatgctcaattacatgcgtgtcatcaagttccaagcatgggaggagcatttcaatgggaggattttgggtttccgaaagtccgagttccagtggctttccaagttcatgtactcaatctgtggcgttattattgtgttgtggagcacgccattgttgatatcaactctcacgtttggttcggcgcttttgcttggagttcgactcgatgcagggacggttttcaccaccacaactgtgtttaagatcctgcaggaacctattaggaccttccctcagagtatgatatctctttcacaagcgctggtgtcacttgggaggttggataggtacatgtctagcagggaattgatggatgattcggttgagagagaagaagggtgtggtggacacactgctgtggaggtcaaggatggaaccttcagctgggatgatgatggccaacttaaagacttgaaaaatattaacttgaagattaataagggggagcttacagcaattggtgggactgtacgctcagggaagtcttctctccttgcttcaattcttggcgagatgcacaaaattttctgggaaggttcaagtttgtgggagtactgcttatgttgcacaaacatcttggattcaaaatgggaccatcgaagagaacattatctttggtttaccaatgaacagacagaagtacaatgaagttgttagagtttgtagcttggagaaggacttggaaatgatggaacatggggaccagacagagattggagagcgcggaatcaacctaagtgggggtcagaagcagcgcatacagcttgccagggctgtgtatcaagactctgatatatatcttcttgatgatgtttttagtgctgttgatgcacacactggcactgaaatattcaaggaatgcgtgaggggggctctgaaaggcaagaccgttattcttgttacacaccaagtagacttcctacataatgtggatcttatagtggtgatgagggacggaatgatagtccaatcggggaagtacgatgatctacttgcgtctggaatggattttagtgctcttgttgcagcacatgacacctctatggaactagtggagcaaggtgcagtcatgactggggaaaatttgaacaagccattgaaatcaccaaaggcagcttcgaataacagagaagccaatggtgaaagcaactctcttgaccagcccaagtctggcaaggaaggttctaaactcatcaaagaggaggagagagagactggaaaagttagcttacatatctataaactctactgcactgaggcttttgggtggtggggcattatagcagtaatctctctttctgtgttgtggcaagcatcaatgatggcaagtgattattggctggcatatgaaacatcagaagagcgtgctcagttgttcaatccttccatgtttatttccatctacgcgattattgcggtagtttcagttgttttaattgtgctaagatcctactctgtcacagtcctggggttaaagacagcacagattttcttctctcaaattctccacagcatcttgcatgcccccatgtctttctttgacaccacgccatctgggagaattctaagcagggcatccactgatcaaaccaatgttgatgtctttatccccttgttcatcaattttgtggtggctatgtacattacagtgatcagcatcttcataatcacgtgtcaaaattcttggccaacagctttcttgttaattcctcttgcttggttaaacatttggtaccggggttattttcttgcttcatctcgcgagttaactcgtctggattcaattacaaaagcaccagtgattcaccatttctctgaaagcatttccggggtcatgacaattcgcgcattcagaaagcagaaggaattttgcggagaaaacattaaacgggtgaatgctaatttgagaatggatttccacaacttcagttccaatgcgtggttgggtttccgcttagaattgcttggaagcttagttttttgcctttctgcaatgttcatgatcatgttacccagcagtatcataaagccagaaaatgttggtttgtctctctcatatggcttgtcattaaatgccgtgatgttctgggctatatacatgagctgtttcattgaaaacaaaatggtatctgttgagaggatcaaacagttcacaaatattccatcggaagcttcatggaacattaaggatcgcctgcctcctgcaaattggcccggggaaggccatgttgatatcaaagacttgcaggtcagatatcgtccaaacactcctttggttcttaaaggcatcaccctaagcatcaacggaggggaaaagattggagttgttggtcgaacaggaagtggaaaatcaactttaattcaagttttcttcaggctggtggaacctacaggaggaaaaataatcattgacggcattgacatatccgccttggggcttcatgatcttaggtcacggtttggtatcatccctcaggagcctgtcctttttgaaggaaccgtcagaagtaacattgatccaactggacagtacacagatgaagagatatggaagagtttggaacgttgtcaactaaaagatgcagtggcttctaagcctgagaaacttgacacttcagtggttgataatggagataactggagtgtggggcagaggcagttgctttgtttagggagggttatgcttaagcaaagcaggctgttgtttatggatgaggcaacagcttctgttgattcccaaaccgatgctgttattcagaagatcatcagagaggactttgcagctcgtaccatcatcagcattgctcatagaataccaacagtaatggactgtgatagagttctagttgtagatgcagggcgggccaaagaatttgattcaccagccaacttgctccaaaggccatctctctttggggcattagttcaagagtatgccaaccgttccagtggcctataagaaagttccatgcatgtgtctctctcagccattcagacaataacagaaaaccaaacttaggctaagccttttaagttttgattgatcttccaagtgccacgagaaaggagaaaggcattttactttagagaggtgcaattaccatcctgcataattgctgtttggacaagtgaagaatgagcaaaccttgtgaatggtttttctaattacctctggcttaagtagctctagtatacaaacaaaatatagccttttttaggtcctaatttatataacacagtgcccagtgtacaattacacagttgctccactgcctttatattgaattatgcatcatcagtaatatactttggacttctcgttgagcattagcttacagcattaaatattgttgaccttgttcatgtcgcgaaaagagttctaaatggaagatgcattttagattatcttataaaaaaaaagattttattagtggt

SEQ ID NO: 5943 - DNA, 2823 bp, Glycine max
gccatggagctgtaagatagttgaatatctcattcaaaacaatgcagttggcctactcagagagataattcttacgggttcggctcgtgcagaaaattgtttttccattggcaagggatcatcattggagcgtgtgcttattgctgtaatatctcatgttggtcagaagccatgtatctgttcacatattaatccaagatatagctctgcatcacagatcatcactattcctttcttgtggcatctcttcccaaatttacaacagatttttgcagcaaacaacctgaatcaatgttacattcatcaaatggcaaagtttgggcaaaatctgatcaagttgctacctaaggatatatcaaatgaatttccgagccatgcgtgtatgcttggaaatgtattagaaactgctggaattgctttgtctcatcctaactgttcatttgatatggccgtagaccttgttgctgtcactacgtttttgctggaggcactcccatctctgaaaacttccaatagtagagaaagctctgtgattgctaaggatgatatgattgaagacgatgaagtcatggaaatagctttagatagtaaattggagcagcaaatttataatgccataaatcctcgcttccttctgcaactgacaaatatactatttaaagagatttcatctgtcaatggttcagattatggacccaacgatagagatgttacagctgttgatggggtttgtgggtttttgaatgttaccttcaacaaactgccacttgaacggattatgacagtgctagcttacagaactgaacttgttccaacactttggaattttatgaagcggtgtcatgagaaccaaaaatggtcatcacacttctcaaatgatgcacctggttggctgttacctctggctgtattctgtcctgtctacaagcacatgcttatgattgtcgataatgaagaattttatgagcaagagaaaccgctatcactgaaggacattagaagcctcatcattatattgagacaggttctgtggcagctactgtgggtgaatcatatcacatctgctaattcggtaaaatctgttccagttagttcagctagtaaggggcagtctgttcagaccattcaacagagggtttgcattgtagtctctgagcttctctcccagctgcaagattggaacaataggcggcagtttacatcccccagtaacttccatgctgatggggtgaatgacttatttagctctcaggctgtaatagaaaacacacgagcaaatgaaattttgaaacaggcccctttcttgataccatttacaagcagggttaaaatattctcttctcaactagctgctgttaggcaaaggcatggacctcaagctgtattttctagaaatcgattcaggatacaacgagatcatattttggaagatgcttacaatcaaatgagtcagttgacagaagatagtcttcgaggatcgattcgtgtgacttttgtcaatgaatttggagttgaagaggctggaattgatggtggtggaatattcaaagatttcatggagaacatcacacgtgctgcctttgatgtgcaatatggattatttaaggaaacagcggatcacctgctttatcctaatcctggatctggaatgatacatgaacaacatttccaatttttccacttccttggtactcttctcgcaaaggctatgtttgaagggattctggttgatataccatttgctacatttttcttgagcaaattgaaacaaaagcacaactatttgaatgacttgccttccttggacccagaattatatcgtcatctcatttttcttaagcattataagggtgacatttcggagttggaactatactttgttatagtaaataatgaatatggagaacaaacagaggaggaactgcttcccggaggaaggaacctacgtgtcactaatgagaatgtcattacttttatccaccttgtagccaatcaccgcttgaattttcagatacgccaacaaagttcacatttcttgaggggatttcagcaacttatgcagaaggattggattgacatgtttaatgaacatgaacttcagcttctgatatcaggttcacttgacagcttggatattgatgatctgcggctgcataccaactatgcaggaggctatcataatgagcattttgttatggagatgttttgggaagttctcaaaggcttttcattggaaaacaggaagaaatttttgaagtttgtgacaggttgctctcgtgggcctttgcttggtttccgatatcttgaacctatgttttgcatacaaagggcttccggtaatgccgttgaagaatcacttgaccgattaccaacatcggctacttgtatgaatctactaaagcttccgccttatacaagcaaggagcaattggaaaccaaattactgtatgccataaatgctgatgctggctttgatttaagttaaaaggaggcagtggaatttacgatatctgtagatttgaaggcggtagaaaatgactcacaaatgaccattgtcagtggaatgggaaacgacaaataatctgatggatagaattgaataaaaatatcctgtgtgcgagtgtatgtatatatattcttattcaatcttcattctcaatttgtctcttttctaaatgtacatatctaaattgtgaattattttgtaaagttcactctttggcagggtttttcctgattattttggatgattattataacaaaactcaacagggaggttgtaatttgcattcagggtgagtttggaaattgggttttgaaggg

SEQ ID NO: 5944 - DNA, 1698 bp, Glycine max
aaaggctcctccaagagtttcaggggaagactcttctggagtgaagttgccgtcaggtgcaaaattcaaccctgatacacatagctcagcaatgcaaaggaaaaaggttaaagacaatgaggcctcaataaaagcaaaagttaaggcctccaagagcaatcatgacgatgactctgacaaatctgaagagcatgacatgaagagtcctgataatacaaagccaactgacaagtccaaaagtaacaatctcaagccatccataggatctactaaaaagctgaaaagaaaaagtattggaggattggctaagtgtacaacaaaggaaggtgaaagtgatgctgaagatctaattggctgcagaattaaagtttggtggccttgggataagaaattttatgaaggcactgttaagtcttatgactcttttaagaggaaacatgtgatattatataaggatcgggtagctacgtaggcccccccccccagaagttctcaatttggaaacggagcgatggcagcttagtgacagcaaacctactaagaagctaaagctctcaaaaactgtctcttcccctgaagtgtctactgggaagaagcagagaagttctagtggttcagcaagtaaaaagacaaaaaaaatagttaatggtaagaaatctccaagcaaccatgtaaaacatggacaaaaaggtgcctcaaaaactaattcccatcatgaggatgccaaagagagttctgagttatcaaaccctgaagatatatctaaagctgagattaactcaggtggttctgaagcagaacaggctgaagggtctgatgtaattgtaactaagcagaagaaatctaacaagaaaccaaaatcagtttcacgaggaaagaaacttaaaaaagagaagagcttgaggtataagaaagagtcagatgaagagaagcgggaatcagaccaagagaagcaggatcatggtgagaggcttgctgaagagaatatcccacaaggagatcaaaatgatgatgcagaaagtagttcaaaagagacagatggcaatgaatcaagaggagctttgggggaaaatgataatggagaagaatcagattctggagggaatcaaaatgacagtgatggggaaagtagtcctagagaagtggaaaaatcacctatagagtcagcaagtcctgatggtgccaaaattgctgaagtttctgatgatgagccactgagcaaatggaggcgtccctcgggaaagaaaagctcagggcaaaaacggtgagcagtttgacaattgtagcacaaatccctgaagatttcagtagcagcagtgctgtggcagcatttcgtgtgtttcagttcaagtataggtatcagagtggatgatgactgccatttattgacactaatagatatgctatgcatgtcttgcaactaccttgtagatgtaatattaacagttgtcatccccacgtttagaattttttttttatttaaaaaaagagtagtgctttagggttttttagggttgtaatgctaaatgacctttcattagtgtaggtgataggtttagcatatgattcatgaggatgttttcatccttccaacacaattgatatttcattgagtggggcaacatgtacagctatacgtggggataattgtatttgtaactttagtttgtttgtacttttgtagtcttaaaaaaaaaa

SEQ ID NO: 5945 - DNA, 1466 bp, Glycine max
tcagctacgtaggccccccccccaactctctctctacttttaatcgttcccttcattcactcccctttcactttttcccttccaacaacacaaattttttgttcatttcatactaattgtcattaattttgagacccaaaaacatggacagccaacgaagtcctcttcttagttgggctttctactgccacggcaagtcgatggaggagctgaagcagtctctgatgtacactacccttgagctggaacaaacaagagcaactgtccaagaagagctaagaaaaagagacgatcagcttctcaccctaaaggagcttctcaacaaagtcataagagaaagagatgaagctcaagagaaatgccagagactagtgttggagaaaatggtttttcagcaccaaaccgcacctgcttctggagtttccagcattgaggacgagccaagaaggggaattaatgactcctccaacaatggcctctcttcatcagattgtgaagaaagcattgtttcctctccagttatggagcatttgccaccacaacagcaacagttgccagagtcaatgattgagctaatctcaccagataaaccgttgccagaaaagggtaagcttttgcaagcagtgatgaaagctggtcctttgctgcagacactgcttcttgcaggaccacttcctcaatggagacaccctccaccccctcttgagtcctttgagattccacctgtcaccattccttcaccaccacaaccacaacttcctcatcaagattccttcacctcgaactgtgggagagtcagtaggaaaagggttttctgtgagggcactgattcccccacacagaacaagttccaaaggattgtactccactgacaactactactattgttactgagtcagctttatttattatccttttagtttttcatttataatatgttttaaaggttaggtgttcgattcgactgatctagcatatgtacagtggtttttgttttaacttggtggaaggaaaagaacttgaagggaagaaaaagaaaatggttgattttgggtttctgctggtgatgttttggtggatgaaggatttgtccttggctggcatttttgcccttctcacattttccttttgtttcgtgtgaagtgaaagggtcactgaaattgtaatgtaactaggatactactgtagtgcagtaagtaatatgagtgtgtgtgtgtgagagagagattgatgtattagatcacatcaacaattaaggggatgggtgatttgggtgtgtagtcgttggggttggggttggggggatggtgtggccaaccaccaagagcgacggccacgagttctgtgtgtcgggttaggtggacccacaaatcagaatcaggatctattactggtgtggtgtatgattatattaagctttattagacaagttatcattattcacttctaaaaaaaaaaaaaaaaaa

SEQ ID NO: 5946 - DNA, 1907 bp, Glycine max
ctcgtagcattgcatttcgttactttcatttgttgtgcaatcttacaagttccaaacttctctattttgttattatttgttctcacttctcacacatacagatttgagccttttatattatcatggcttctaaggtggtttcggttttggttatagcgatgatgttgtttgccatgaactgtaactgcactagtgttggccacatgccttcaaccaaagaggaaggtcacgattttcaggagtctaaagccaagaccacacaaactgcgaacaaggccatggaaactggtaaagagggacaagaagccgcagagtcatggacagaatgggctaaagagaaactcagtgaaggtcttggcttcaaacatgatcaggaatccaaagaatccaccactaacaaagtctctgattatgccactgacactgcacagaaatccaaggattatgcaactgacactgctcagaaatcaaaggactatgcaggtgatgctgctcagaaatcaaaggactacgcaggtgatgctgctcagaaaaccaaagactatgccagtgacactgcacagacatcaaaggactatgctggtgatgctgctcagaaatcaaagggctatgttggtgatgctgcacaaaagaccaaagaatatgttggtgatgcagcacagaagacaaaggattatgccactgacgcagcacagaagaccaaagattatgctactcagaagaccaaggactatgcaagtgatgcaactgatgctgcaaagaagactaaagattatgctgctcagaagactaaggactatgcaagtgaagctagtgatgttgcacagaacacaaaagattatgctgctcagaagaccaaggactatgccagcggtggtgcgcagaagaccaaggattatgccagcggtggtgcgcagaagaccaaggactatgcaagtgatgctgcgcagaagaccaaggactatgcaagtgatggtgctcaaaagagcaaagaatatgcgggtgatgtagcactgaatgccaaagattatgctcaaaaaagcaaagattacgcaggtgatgctgcacagaatgtcaaagattatgcaagtgatgcagtgcagaagagaaaagagtattctggtgatgcttctcacaagagcaaagaggcttctgattatgccagtgagacggctaagaagaccaaagattatgtcggtgatgctgctcagagaagcaaaggggctgctgaatatgctagtgatgcggctcagaggaccaaagagtatgctggtgatgctaccaagagaagcaaagaggcttctaatgatcatgccaatgacatggctcagaagaccaaagactacgccagtgacactgctcagagaaccaaggaaaaactccaagacattgcatctgaagctggtcaatacagtgcagagaaagctagagaaatgaaggatgcagcagcagagaaggcaagtgacatagcaaaggctgcaaagcaaaaatcacaagaggtgaaagagaaattaggtggacaacaccgggatgccgagctttgagaattgagatgtttgaatcactttgaaccttttaattatgccacaatagttgtctaaatctgccagaaataatgttgtgtgtatatattatatggcagtatctgtctttgtgtgatcaaggggtttggtctgatataatatattagcaactacgtagtcgaggttggaatattttgtactgaatatcctcatgttttcttcaagtttagttaaaaaataatagatactcagcatgtcatttctctgaataaagtacccaatttgtaggttccatccaaaaaaaaaaataaaaaaaaaaaaaaaaaaaaaagggggggcccccaaaaaaaaaacccccccccccggggaaaatttccggggggg

SEQ ID NO: 5947 - DNA, 1661 bp, Glycine max
tcagctacgtaggccccccccccttgaggaaacttgaaactaggagacaaacaacttttctttctctctctcaaagttacaaataactgttgcttaacgcctctcccaggagcctccaccccaaaacaagaaacagactttgcgtttctcctcagcctcttaaaaccaaacagattttattctctcaaatggagagtccccattcactgtctccctcttcctcctccgacggcgtcggcttcgagacggaggagccgcggacgccgctggccgtgcgccgcgcgctgcagctcctcaactccggcgatcccgacctgcgcctccaagctgctcgcgacatccggcgcctcacgaagacgtcacaacgttgtcggcgccagttatcccaggctgtcggtccactcgtttccatgctccgagtcgactcgcccgagtcacacgaacccgctctcctcgccttgctcaacctcgccgtcaaagacgaaaagaataaaatcaatattgtggaggccggtgcattagaaccgataattagtttccttaagtctcagaatctaaatctgcaggagtctgcaactgcatctttgctcactctatctgcctcttcaaccaacaaaccaatcattagtgcttgtggtgtcattcctcttcttgtgcagatccttagagatggaagccatcaagctaaagctgatgcagtaatggctctctctaatttatcaacacacactaacaatctcagcatcattctcgagacaaacccaatcccttacatggttgatcttctcaaaacctgtaaaaaatcctcaaaaacggctgaaaaatgctgtgctttgatagaatccttggtggattatgacgagggcagaactgccttgacatctgaggaaggcggggttcttgcagttgtggaagttctcgaaagtggcacactccaaagtagggagcatgctgttggagcactgttgacaatgtgccaaagtgaccgatgtaaataccgggaaccaattcttagagaaggtgtcattccaggacttcttgagcttactgtccaaggaacaccgaagtctcagtcaaaagcacgcaccctcttgcagttactgagagagtctccttatccgagatctgaaattcaacctgatacccttgagaatatagtatgcaacatcatatctcagattgatggcgacgatcaatctggtaaggcaaagaagatgctggctgagatggtccaagtcagtatggaacagagtctgagacatttacagcaaagggctcttgtatgcaccccaagtgatcttcctatagctggctgtgctgcttctgaagtttcttcaaaatgatagttgccgctggccaactgtctttttttcactttttttgtctttgcaattgcggtttgtgaggtaaatttccatagtagaaaacgtaaaaaaaagaaaaaaaagaagaaggaataataatacatagtgaaggatgccagtcctggccattgtggaggtatcgagtgactggtaagtgtcaataaactaagttgtcattggtaaagagcaggattttgtagttggcttgtaaagaaactggtgtataaaatgacatacaagtagtaaaaactggtgtaagaatttacaacttttgattcacaaaaaaaaaaaaaaaaa

SEQ ID NO: 5948 - DNA, 654 bp, Glycine max
atcactgctgttgatggtggtgggaatgcagcaagagcagggttaaaggcaggggaccaagtcctttacactagcagtttctttggggatgaattgtggcctgcggataagcttggatttactaaaaccgccattcaagcaaagccagactctgtctactttgtcgtcagcagaggtgctgaagtagacgttaaaaagctcacaaaacggcctgctcctcctcgatttggaagaaaactgactgagactcaaaaggcgagagctactcacatttgccttgattgtggatacatatacaccttacagaaatcttttgatgagcagccggacacatacgggtgtcctcaatgtcaagcaccaaagaagaggtttgctcggtatgatgttaacactggaaaagctattggtgggggcttgcctccaattggagttattattggactcctggctggagtagggccagttggggctttgcttgtttatggtcttcagtaacattttattaattttgttcattttctgttctccaaagctgtccaacgttggagcttgtatctcagaaactccttggatgctcatgtcaaagttgaatgaagctttctatatgagattccaaataaatttcaaactactactttttagtttaaaaaaaaa

SEQ ID NO: 5949 - DNA, 1096 bp, Glycine max
taaaataaaaaagaaaaggagaagctttttcctctcattattcagaaggaacgtgtgttcgtttgttcggtggtgaattcctatccacacgtctcaccggaaacatgtcagcggtggttgctggttcctcctcttcattctctgccaccttcacccccataaggagcccctccttaaaaaactctcaactctctcattccaaggcactcacttcacctcaatgccagaaaacatctttacaagggctctcacttcatgaagccaaaaggggtgtttcagaatccttcctagttgagaacaacaatggttcctccattgctggaaggagacttgagatcacagcacgaactgctggggcttcaaagacaattgaggtggaggttgacaagccacttggcctcaccttaggccaaaagtctggtggtggtgttgtcatcactgctgttgatggtggtgggaatgcagcaagagcagggttaaaggcaggggaccaagtcctttacactagcagtttctttggggatgaattgtggcctgcggataagcttggatttactaaaaccgccatccaagcaaagccggactctgtctactttgttgtcagcaggggtgctgaagtagacgttaaaaagctcacaaagcgacctgctcctcctcgatttggaagaaaactgaccgagactcaaaaggcgagagctactcacatttgccttgattgtggatacatatacaccttacagaaaccttttgatgagcagccggacacatacgggtgtcctcaatgtcaagcaccaaagaagaggtttgctcgttatgatgttaacactggaaaagctattggtgggggcttgcctccaattggagttattattggactcctggctggtgtaggggcagttggagctttgcttgtttatggtcttcagtaacattttattaattccacgacatgttaattttgtttattttctgtcctccaaagttgtccaatattggagcttgtgtctcagaaaaactccttggatgctcatgtcaaagttgaatgaagctttctatatgagattcaaaataaaaatcaaaatacaaaaaaaaaaaa

SEQ ID NO: 5950 - DNA, 1463 bp, Glycine max
tacggctgcgagaagacgacagaagggggggtaagagattctctttctttgagttgcgtgtgcaaagaaaagtggtctataaaaatctgctctcagtcccacttcccaattcattttcattccacgagatatggcttcaactctgcttcccctggcaaccttcttcttagttctctccgcttcttatctccagattgctggggcgaaagcacaaccgttgactagtctcaagcttaactctccgatccttcaggagtctattgctaaagagatcaatgaaaatcctgaggcaggatgggaggctgctataaatcctcatttctccaattatacagttgaacaatttaagcgccttcttggagtcaaaccaacgcctaagaaggaactgagaagtacacctgctatatctcacccaaagtcattgaaattgccaaagaattttgatgcaaggacagcttggtctcagtgtagcactattggaagaattctagatcagggtcactgtggttcttgttgggcatttggtgctgttgaatcattgtcagatcgcttttgcattcattttgatgtaaatatctctctctctgttaatgaccttcttgcatgctgtggctttctgtgtggatctggttgtgatgggggatatcccttgtatgcgtggcaatacttagcccaccacggtgttgtcactgaagagtgcgacccatattttgatcaaattggctgttctcatcctggttgtgagccagcttaccggactcccaagtgtgttaaaaagtgtgtaagtgggaaccaagtttggaagaagtcaaaacactatagtgtcaatgcatacagagtgagctctgatccccatgatatcatgacggaagtttacaagaatgggccagttgaagttgcattcactgtttatgaggattttgctcactacaaatcaggagtttacaaacacatcacaggttatgaactaggtggtcatgcagtaaagctaattggatggggaacaactgaagatggggaggattattggcttcttgcaaatcagtggaacagagaatggggagatgatggttacttcaagatccgaagagggacaaacgaatgtgggattgaagaggatgtaactgctggtttgccttccaccaaaaacctcgtcagagaggtgactgatatggatgctgacgctgctgtttcattctgaatgcaaatatattattaccttaccaattatattctgtatgggtattgtaattgaaaaatcagaactagatgttgcctgtagtctgaacctctctgttttaaggggaacaatctaaattatgattacgatgttcaaagatgttaagcttttgttgtttatctgttatacgaaataagagattaactgctatagttactattcagtagttggagaaaaatcatgtgttggtatttttaatgctgatgatgctttggcttgattt

SEQ ID NO: 5951 - DNA, 1487 bp, Glycine max
tcagctacgtaggcccccccccccccccggtcccacacccaccccagttgcgtgtgcaaagaacattgctctataaaaatctgctcccagagtcccacctctcaattcattttcattccacgaaatatggcttcaactcatctgcttcccctagcaaccttcttcttacttctctccgcttcttatctccagattgctggggcggaagcacaaccgttgactagtctcaagcttaactctcatattcttcaggagtctactgctaaagagattaatgaaaatcccgaggcaggatgggaggctgctataaatcctcgtttctccaattatacagttgaacaatttaagcgccttcttggagtcaaaccaatgcctaagaaggaacttagaagtacacctgctatatctcacccaaagacgttgaaattgccaaagaattttgatgcgaggacagcttggtcgcagtgtagcactattggaagaattctagatcagggtcactgtggttcttgttgggcatttggtgctgttgaatcattgtcagatcgcttttgcattcattttgatgttaatatctctctctctgttaatgaccttcttgcatgctgtggctttctgtgtggatctggctgtgatggaggatatcccttatatgcatggcgatacttagcccaccatggtgttgtcactgaagagtgtgacccatattttgatcaaattggctgttctcatcctggttgtgagccagcttatcggactcccaagtgtgttaaaaagtgtgtaagtggaaaccaagtttggaagaagtcaaagcactatagtgttagtgcatacagagtcaactctgatccccatgatatcatggcggaagtttacaagaatgggccagttgaagttgcatttaccgtttatgaggattttgcttactacaaatcaggagtttacaaacacatcactggttatgaactaggtggtcatgcagtaaagctaattgggtggggaacaactgatgatggggaggactattggcttctcgcaaatcagtggaacagagaatggggagatgatggttacttcaagatccgaagagggacaaacgaatgtgggattgaagaggatgtaacagctggtttgccttccaccaaaaacctcgtcagagaggtgactgatatggatgctgacgctgctgtttcattctgaatgtaaatatattacctttccaattatattctgtatgggtattgtaattgaaaaatcagcactagatgttgcctgtagtccgaacctctgctttaaggggaacaatctaaattatgattacgatgttcaaagatgttaagcttttgttgtttatctgttatacgaaataatggattaattgctatagttactattcaaaaaaaaaaaaaaaaaaaaaaaaaaaaaaaaaaaaaaaaaaaaaaaaaaaaaaaaaaaaaaaaaaaaaaaaaaaaaaaaaaaaaaaaaaa

SEQ ID NO: 5952 - DNA, 1377 bp, Glycine max
  misc_feature (2)..(2): n is a, c, g, or t
  misc_feature (5)..(5): n is a, c, g, or t
  misc_feature (7)..(7): n is a, c, g, or t
  misc_feature (28)..(28): n is a, c, g, or t
  misc_feature (37)..(37): n is a, c, g, or t
  misc_feature (64)..(64): n is a, c, g, or t
tnttntnttttttttttttttttttttnttttttttnttttttttttttttttttttttttttntttggggtcttttttttttttttttgatctaatattctctattataatattattgttcagtgaagattcaactcaaccatgataatttgtacgatcatacaggtggaaatggcaagtctagtaaaagaaagaagccaacacaatcttcagaatccaagtctggttgaactgcaaggaaatgcaaacctccacaagctttcttagcagcttcccaagcttcagcttcactagttgtctcaggagttttcttataggtggaatatatataccgggtagaaattccactagaaagaatcaggcgagcacgagcagtatccgcttccaccgcgcaaacctccaatccatttatcaaagctgccaatgctgtagaattagaagacgcaacagacagtcctgggatcaatgtcttgtcatcaatgtcaagacccaataaatcaagatctagcccagaaccacaaactcctctctcaaaggtcgatatctcctctcgaacagctgagtaaggtaattggacaaatgcccatctttccccataaagaatgtcaggaagttccgtgggaaaaggattatcaagtgccaaaagaggtttggatccttcttgaaatccaggatgttttttatatacggtctcatagcgctcctctagccatagaattattgacacgcaccgtttactaggaacaggccttatgcgaagctcattacacgcatttgtaataattgtctgcatctgcgacctaaagaagcgaatgtttctgggcaacgggacacccaactggtcactaacggcaacaatagcatccttcagcgtaatgctgttaatgacgttgttcgggaaatacttggtgtactgcaacgatagcgtcttgtcgcacacaactaactcccaaaccttcttccctctggcgtcgagaatgggcctggagcagaagtccagctcccactccgtgatgctctcagggtcagttactgggtccacgtagctcagttccgcagatgggtcatcatcatcatcttcttcttcttcttcttcttctccgagaaccgcttcgggtgcttctttctgggtgctttcggacaccgaacggggtcggaagtggagcagtttggggtggctgttggagggagtggtgcatggaattgtgatgcgttttgatggagtggtgagtttggaatgtttgaacgttggggattttattctaacagggttgaagcttagagtggccatggctgtggtatggtatggttatggttattgtgtgtgagtgtgatgagtgtttttagggagaggtcgcgccgtgctccaggtagtt

SEQ ID NO: 5953 - DNA, 2392 bp, Glycine max
gtgttcaatcacgtaatttgtttcaactattattttgaaagcataggacacgacaaatagtacacaatataaagccagaacaaacattggagatattatatatatatatatatatatatatatataatcgtacaatttttcattttggaagtccaaatatacagaaaaataaaaaacataaaagcatttcaataagaatatatcaactatgctccctgctttatttctttttctgcactcttttcttaatagattttttcttcttctcttattcacaccaatgaacaatgagaatttttctccctttgcactaggcaatctataaacaacttgtgtgttgtccaattattccttggcagtgctgtttctttgccctgatgatgccattagcacagcaacagccactataaacataaacaacatactccctagcagtatatatgttcttcttgatgatttcctgtactctccaaacagaatcacgccccaaaaagtgcttacaagtggaagtgcctggactgcatctgctgctgcatatcctgctgcttgaccacccataaattgaagaccattcccaaacccacaaagtagaccagccaacaaggcccagactctgccatctgagtctgccaaataagccttaaatgatgacttgggtaggtttaggacagggtggtagaggaaggtgatgtttagaatcatggcaataacaaaacaagatattgaaaaatagaagaatgcagtataaactgtcaaatggggaaccccttttttcaaagtattccattggtcatttgttgctatgttgaatgctggtgagaacatagagaagcaaagtccagcaaagaatgttagagccaatccaatcaaagtgctcttcccaaaaaccttaatagctcttttttcctcaagctccacgagaaaaactgcagttcctgcttcgacattgtctgcagaactacttccgctctcgagatcttttgatttaactatatccccctccttggaagagatgtctccatctttataatcaccggtgaaattgctgagctttgctttattatcagcagcattagatgaatgaacagcagagcctagaaaaactgcaatcaaaaagcaaccaactcctgggaaaaggatctcagctttgttgattttgtcatccaaaaagtaattcaaggttgtgcctataacaacagttatgcttgccgtgatcacttcagtaacagatagcccaacaaaagcaaatgcatattggcttgacagattcccaaggctaaggaacagaccaccccccattgcaaaaagaacggagggccaattatcctgagcaagttgaactaagaaatttggctgatcatgagtgcccttgcctatcccaccaagtgtaaaagcaatgagtaaagcagacaagaaattggtgattgagtaatcaaggtaggtatgctgaggaagacgaccacgcctttctaacatagtcaaaagagcaggccatgtccccaagaagaaaagagccaagaacatgcatgttatggcacctcctttgctctccaccaaatacattttcaacccagtagtgcacaaaatgctctcggagagtgaagaaaccaaggaacaaagaccagagaactccttggaagccatagatcagaaacaaacagggagacagccaaaattatgagctataattaaggaccccataaaaatttgtccacacaaaaggggtgagaaattcatgcaacatgataaaggaggaggtgaatctcttgaaacagatacaaaatcaaaatccaaaagaaagacaaaagtgtacacaactgcatataaactgcttataaattacttttaataatggaaaactcattggataggggtgaaaaggagaaacattatctacacacaaacacaaccaataagggttagatctggtgaaagggactagttcccatgacgtggtgaataaggttcaatccttactgtgaaaggtgtttacatttagtgttgacaaacaaatgcatgagacaggattgcctccagaagaggatatctgtgatgaaccaaaaaaatctacacagaaacacatggaaaggaactgaaaatagagattgattatcatagaatccatgataagtcaatgaaaccttaataagtcacctgatcctcttcactgatatgaagaaaggggtgaccagctaaagacaagtatatataattgagttaaaattcagttttcttattaaccatgaagtacccaaatgggataatagggggaaaaaaaaaggattcatcttcacaaagtcaagcatggagatacacattgaatggcagagaactgaacgaattgcagctaccttggaagccatggggggggggggcctacgagctgactcga

SEQ ID NO: 5954 - DNA, 2354 bp, Glycine max
gtgccacaataccatttaggtagaacaaattaaagattggtttgatagtgggttggagcaaatcttaaccattatttgttccctctctttacttgagttcattcctagctcgttattcttagctaaagtagcaactcgaatattcaccaggaaccttattgggaaaagaatgacaggagtagaggctatggaaaaaaatgagaaaagtgtgacagatgaggagccaaagattaactacagaggatggaaagtcatgccctttatcattgggaatgaaacttttgagaagctaggaaccattggaaccttggccaacctcttagtctatcttacaaccgtcttcaacttgagcagtcttgcagctacaaatattgtcaacatctttaatggcagcgccagtttatctaccttgctcggggcttttctttgtgacacttattttggccgctacaagacactgggattctccacaatggcttcttttctggggttgcttgttatacaactaacagcatggattaagaaaatgcatccacctcactgtggaagagacagcatcacatgcataggcccaaccacagggcaaatgggatttctacttgctggatttggacttctaattgtgggggctgcagggattagaccttgtaacttagcatttggagttgatcagttcaaccccaacactgagtctggaaaaaagggaatcaacagcttcttcaattggtacttctttacctacacatttgctcaaatggtgtctttgtcactaattgtctacatacagtcaaacgttagctgggcaatagggttgggaattcctgcggctttgatgctaatctcttgcacactctactacacgggaagcaattattacgtgaaagttaaagcaactggtccagctccactaacaagtttagctcaagctgtagttgtggctataaagaaaagaagactgaatctatcagaatatccactggattcttcgctctttgcctatgtttctccccagtctattaactccaagcttcttcacacgtctcagttcaggttcctagacaaagctgcaattataaccccacaagacggcataaacccagacgggtctgcatcagatccttggagtctttgcagcatgcaacaagtggaagagctaaaatgcttgctgagagtgatccccatttggttcgcaggaattttcttctacattgcaatagtccaacagaacacaatgctggtcttccaagcccttcaatccgacagacgcattctcagcaccaacttcaagatcctagcagcctcctacaccatcttccagatgctgagcctaaccatatggctacccatctacgaccgaatcctcgtgccgtcgctccaaagggtcaccaaaaaagagggtggcatcacagttcttcaaagaataggctttggcatgttcctctctatactatgcacaatggtgtctggtgtagtggaagaaagaagaaggacattggctttgaccaatcctattggattagagccaagaaaaggtgccatttcttcaatgtcaggtctatggttggttcctcagctaacactggcagggttatctgatgcattcgcgattgtgggacaagttgagtttttctacaaacagtttccagagaacatgaaaagccttgcagcgtctctatttttctgtggcctcgcgggatcaagttatttgagtagtttgctgatttctattatccatagggcgacagctaaatcttcaactgggaattggttacctcaggatctcaataaggggagattggattatttttattacattataactgctctagaagtcgttaatttcggttactttatattgtgtgccaagtggtataaatacaaagggactggttctagcagcagtggtgaccttcaactcgatcaagtatccaaaccatccgaaagaactgttaacactgtctagtggttctcatttaaacctgtggttatattaagtacttagctttaagttttgtggtttataatgatgttattttactgatcgtctttcatacagaatgtctgtaatcttaaacctaaaaaaatggttgagcttacggttcataatgtttctttagaaagaacaaataaggtagtctttctttatttttaggattggattggggaaatagttttattgtaaaccttcttgttttttttagtattgatagcttgcctttagtgaaaccaaaaaaatatatgaatttattgaaatgtactttgatttagacgcggccccggacccggttcgccctaagctttcaaggaaaaaaaaaaaaaaaaaaaaaaaaaaaaataaaaaaaaaaaaaaaaaa

SEQ ID NO: 5955 - DNA, 1699 bp, Glycine max
ttttttttttttaaaataaagtcagtaaaaacattggatatatatatgtctatatatatatatatatatatatatatatatatattatggtacaaattttcattttgaaagtccaaatatatacaaaaaacaaaaacataaaagcatttcaataacaatatatcaactatgctccctgcttttatttcttcttcaacacccttttcttaatagcttttttttttcttctcttattcacgccaatgaacaatgagaatttttctccctttgcactaggaaatctataaacaacttgtagtgtgttgtccaattattccttggcagtgctggttctttgccctgatgatgccattagcacagcaacagccacaataaacataaacaacatactccctagcagtatatatgttcttcttgatgattttctgtactccccaaacagaaccacgccccaaaaagtgcttacaagtggaagtgcctggactgcatctgctgctgcatatcctgcagcttgaccacccataaattggagaccattcccaaacccacaaagcaaaccagccaacatggcccagactctgccatctgagtccgccaaataagccttaaatgatgacttgggtaggtttaggacagggtggtagaggaaggtgatgtttagaatcatggcaataacaaaacaagagactgaaaaatagaagaaggcagtataaactgtcaaatggggaaccccttttctcaacgtattccattggtcatttgttgctatgttgaatgctggtgagaacatagagaagcaaagtccagcaaagaaagttagaaacaatccaatcaaagtgctctttccaaaaaccttaatagctcttttttcctcaagctccatgaggaaaactgcagttcctgcttcaacattgtctgcagaactacttccaccctcgaggtcttttgatttaactatatctccatccttcaaagaggtgtctccatttttataatcaccggtgaaattgttgagctttgctttattatcagcagcattagatgaatgaacagcagaacctagaaaaactgcaatcagaaagcaaccaactcctgggaaaaggatctcagctttgttgattttgtcatccaaaaagtaattcaaggttgtgcctatgacaacagttatgcttgccgtgatcacttcagtaaccgatagcccaacaaaagcaaatgcatattggcaggacagattcccaaggctaaggaacaaaccaccccccattgcgaaaagaacggagggccagttatcctgagcaagttgaactaagaaatttggctgatcatgtgtgcccttgcctatcccaccaagtgtaaaagcaatgagtaaagcagccaagaaattggtgattgagtaatcaaggtaggtatgctgaggaagacgaccacgcctctctaacatagtcaaaagagcaggccatgtccccaagaagaaaagagacaagaacatgcatgctatggcacctcctttgctctccagcatatacattttcaacccagtagtgcacaaaatgctctcagatagtgaaggagccaaggagcaaagaccagagaactccttggaagccatagatcagaaaacaaagaggaagtcagcaataataaaagtcaaaagataaaagccctcggccccaaagtggccaaaacttccacgcaaaat

SEQ ID NO: 5956 - DNA, 1678 bp, Glycine max
  misc_feature (1624)..(1630): n is a, c, g, or t
  misc_feature (1632)..(1632): n is a, c, g, or t
  misc_feature (1638)..(1642): n is a, c, g, or t
aatccttactaatcctgaaaagtgaaaaaaactgtgagtgataattttgctttgcgtgtttagcgggagagcgaagctgaagagaatatttttgtttctcaagccttcgaaatccagcgatctctcattcttcaatggccaccctctccgcatgcgcttctcctccatggccaaaccctgattctcccaattcaaatccaaaccctaatttcctccccgaccaatctcaaaccctcgacttcgactccctcatgcctccgcaacccgaatccccaccgcccaaccatcaccactcccccgacgcctctccaccggaatcctccccgtcgccgccgcctccgtcgatcctctacctctccttcaaccaggaccaggcctgcttcgccgccgccgccgacaacggcttccgcatctacaactgcgaccccttccgcgagctcttccggcgcgagttcgacggcggcgggatcggccacgtggagatgctcttccgctgcaacatcctcgccctcgtcggcggcgggcctaaccctcagtacccgcccaacaaggtcatgatctgggacgaccaccagggccgctgcatcggcgagctctcattccgcgccgccgtgcgcggtgtccgcctccgccgcgaccgcatcatcgtcgtcgtcgaacagaagatcttcgtctacaacttcgcggacctcaagctcgtgcagcagattgagaccgttccaaaccctaaggggctctgcgcggtttcgcagctgtccgattctctcgttctcgcgtgccccggtttgcacaagggtcagattcgcgtggagcactacgcgcagaagaagaccaagttcatctcagcgcatgattccagaatcgcttgcttcgctctcacgcttgatggacagttaatcgccaccgccagcaccaagggtacgctgattcggatttttgacactgatcatggcacgcttcttcaggaagtgagaagaggtgcgaatgctgctgagatctatagtttggcattctcttctactgctcagtggctagcagtctcaagtgacaagggtactgtccatgtattcagcctcaaggttaattctagcatccccgagcaggaaaagtcacaaagttcatccaattcagatgctgccattaccccatctagctcttctcgctccttcattaaattgaaaggggtgttgcccaagtacttcaattctgagtggtcagttgctcagtttcacttacaagagggctctcattacacagttgcatttggtctccaaaagaatacagtcattattcttggtatggatggaagcttctatagatgccaatttgatccagtacatggaggggagatgactcagctggaatatcataactttttaaagccagaaccagaaacagccttgtgagacgcgatgtgaagaaatcctgagcgcttgacatttcagcttagttaggttatgcagatatgtatactgaagtaacactgacctcattttattattattactaactcagggtcgacctcgttgcttcttccattgtaatatttgtaattatatagttttctaatttttttaataataaatattgagagctttgctgaaaaaaaaaaaaaaaaaaaaannnnnnnanaaaaannnnnaaaaaaaaaaaaaaaaaaaaaaaaaaaaagggggcg

SEQ ID NO: 5957 - DNA, 2057 bp, Glycine max
gaagaatatagtgttaaagagagcaagttctgtttaacacagacgagctgtggtagcagctagcgggtgaaggtttttgcgccgcgccttatatcacaccgtcgtccgaaagcgtcgttgccgtgaaaccctagaaagaaacgacgacgtaaatggaggtggagcccgtggagccgcagtcgctgaagaagctaagcttcaagtctctgaagcgcgctctcgatctcttctctcccatccacggacacctcgctactcccgatgccgaaagcaagaaaatacgcactagccacaaggtgagcgtggagtatggtggaatcaaaagcactgccaatcaacctcctcctcgtcaagttagttctgccacccaggatccagggtcctctaacactctggctcttccaggtcccggagattccaaggattctcagaaaggaggaccccaaaatgccttggttgttggtccaactatcccatccacaacaccgaatgatactggttttcagaacaaaagtacagcggttgtttcagcctctggttcatctgaaagaaatttatcaacatctgctttgatggaaagaatgccaagtaaatggccacgtcctgtatggcacgcaccatggaagaactacagggtcatcagcggtcacttgggatgggtgagatctgttgcagttgatcccagtaacacatggttttgtactggttctgcagatcgaactatcaagatatgggacttggcaagtggagtattgaagctcacattaacaggccacattgaacaagttagaggtcttgctgttagcaacagacatacttacatgttctctgctggtgacgataaacaagttaaatgttgggatcttgaacagaataaggttattaggtcttatcatggtcatctgagtggtgtttattgcttggctcttcatcccacaattgacgttttactaaccggaggacgtgattctgtctgccgggtttgggatatacgaagtaaaatgcagattcatgctctttcaggtcatgataacactgtctgttctgtgtttacgcggccaacggatccccaagttgttacaggttctcatgacactaccatcaagatgtgggaccttagatatggtaaaacaatgtcaactcttacaaaccataaaaaatctgttcgagcaatggcccagcatcccaaagagcaagcttttgcatctgcttcagctgacaatattaaaaagttcacccttccaaaaggagaattttgccacaatatgctctctcaacagaaaactatcatcaatgcaatggctgtcaatgaggagggtgtgatggttactggaggcgacaatggcagcatgtggttctgggattggaagagtggtcacaatttccagcaatcccaaacaattgtccagcctggttcattggacagtgaagctggtatttatgcttgtacctatgatcttactggttcgaggctcataacctgcgaagctgacaagacgataaaaatgtggaaagaagatgagagtgccactccagaaacccatccccttaacttcaggcctcctaaagacatccgtcgattctagacatgctcctcatttatctcaggcaacttattctgctaatacagagtgggtatgtgctatctggagggcttggtgtaaatttacttgttgggagattcacagttctcttcttagcaggcttttatcatcatttttgtatcacgagaaatgttaggaaaatactctcaaatactcttttgaacacaatctttcttattgattgaaaatcacaaattggtggatgctcaaattggtggatgctacatatttaacgaacctccttattttgtattttctgataattttcaactagtaggagagtgtggtgtcagaaagtatgtgttaaagagtgtgtaacacttctgtgtgcatcattggattgcttgtaagattattcctacatagttcgtgtgtctcaatagctttgcatttcagttgactagactccttgtagaattgaatagaatgacgtattttagttttggagaagtt

SEQ ID NO: 5958 - DNA, 879 bp, Glycine max
atctccaatagcaactgagttagttctatttattctccatcagagttttttctccaaggccctgcaatcttttgctcatatatacattgctacataaaccatgcaggccagggagatcacaggactcaattatttactcccttcagacccttgtccttaccctggtcactacagcatggttcagaacaccatccccacatttcaactccacaaactctcaaaccaattctatggtttgcagaatcctcctaaagtgcttgcagacttcagcccccctcagtcctcatgcatcagcagcaactcaacctctgatgaagcagatgagcagcagcaaagcctcatcaatgagaggaagcacaggaggatgatatcgaaccgcgagtcggcgcgccggtcacgcatgaggaagcagaaacaccttgatgaactgtggtcacaggtggtttggctcaggaatgaaaaccaccagctaatggacaagctgaaccatgtgtctgcgtcacaagataaagttgttcaagagaatgttcagctgagagaagaagcctcagaacttcgccaaatgatatgtgacatgcagctacacagtccataccaccctcctcccttgagtcccattgatgatgatgtttctccctatgtcaaatctgattcctcaatcacagactctttggacctgcttggttgaatttgaaaacaaggccaaagtttttattatatctcttcaatttttcctctttttaagtccttctctgtgtgtgtgaattgttgtgaagtacaaaatagtagtagtctttgccacccttttgagatgtatgaggtgaaaccttaacataaacggcaatgacatgtttttgagtttcaaaaaaaaaaaaaaaa

SEQ ID NO: 5959 - DNA, 652 bp, Glycine max
ttttttttttttttttggagcaacaagaaacaccttgcatctctatataaatcgaaagaaaacaaagaacattaagaatgcaaagagaaaacaagacttagctggaatcagaacccttcattgaatgagttcatccccaatcaagtctataactacaaacatcaagcaagttttgcttgagtcaacttcttttcaagatacttgagagatgtaggattgatttgagtgaacacatagttcccagcaaagagatcaccaaaatgaccctgcccctcgttgaaccttctcttcaccttagcacaaacaagcatcactttttttatcatccacactcttctccaactaggcactttcaccctaaaccttctcctcaatggcacccctctaggcctgcaccacttccttgacctaaggatcaccctttgatctctttcgtcatcagaacatggctcatgccttagaatttggtaaggaagcttgatggcactagcagaaaccatctctatggaagacatggtggtgagagtgaaaaatcaattgaagacaaattgaagtaatttgtaattgtgaggatttcctgaattagttttgaggtggtgttggtaactacaatttttaggagctgttgatttgttattacatgaggaagcta

SEQ ID NO: 5960 - DNA, 1791 bp, Glycine max
atcaaaaccacaaaacacaactcgtcacatcacatcgagaagccgccagaagggtctcttcattcattttcattccaaaaacacacacacacacaaattctcaaacccaaatcccaagtctcctaaaaccctaattcgcagtgaaaatgagagaaatcttgcacatccagggagggcaatgcggtaaccagatcggagcgaagttctgggaggtgatatgcgacgagcacggcatcgaccacaccggaaagtacagcggcgactccgagctccaattggagcgcatcaatgtttattacaatgaagccagcggcggaaggtacgttccacgcgccgtcctcatggatctggagcccggcaccatggactccgtcagatccggcccctacggccagatcttccgccccgacaacttcgtctttggccagtccggcgccggcaacaactgggccaaaggtcactacaccgaaggcgccgagctcatcgactccgtcctcgacgtcgtacgcaaagaagccgagaattgcgactgcttgcaagggtttcaagtgtgccattcgcttggtggaggaacgggttccggcatggggacgcttctgatctcgaagattcgggaggagtatccggatcggatgatgttgactttttccgtgtttccttctcccaaggtttctgataccgttgtggagccttacaatgctactctttctgttcaccagcttgttgagaatgctgatgagtgtatggttttggacaatgaggctctctatgacatctgtttcaggactctcaagctcgctacgcccacgtttggtgaccttaaccacctgatatctgccaccatgagtggagttacttgttgtctacgtttccctgggcaactgaactctgatcttcgcaagcttgctgttaatcttatcccattcccccggctccatttcttcatggttgggtttgcacccttgacatcaagaggatcccagcagtaccgggctttgactgttcccgaattgactcagcaaatgtgggatgctaagaacatgatgtgtgctgctgatcctcgtcatggtcgttatttgactgcttcggccatgttccgtggtaagatgagcacaaaggaggtggatgaacagatgatcaatgtgcaaaacaagaactcctcatactttgtcgagtggatacctaacaatgtgaagtccagcgtgtgtgatatcccacctaagggtcttaaaatggcatccacttttattggtaactcgacctcaatccaggagatgttcaggagagtcagtgagcagttcacggccatgttcaggcgcaaggctttcttgcactggtacaccggggaaggaatggacgaaatggaattcaccgaggctgagagtaacatgaacgatcttgttgctgagtatcagcaataccaggatgctactgctgatgaggaggagtatgaggaagaggaggaagaagaggagattggtgcttaaggcatctctcttatttgtcaaaaattgtttcaaatatcaatatgggttggctttgaacgagtggtgtaagtttaaaattgtgatgcagtcaaattagattgactcgttaatgtgtatgcttattgttgattgttgacattgtataaactgggttttgttgacaatgcttatgttcttgagagatcaagtcttggattgtttgtaagagttaatgactggtcctctttttttctccccttttgataatttgattatatagtaagttgcctctgaattaaacaataataatgtttttttgggtttc

SEQ ID NO: 5961 - DNA, 1908 bp, Glycine max
accagccttatgacaattggacaccaccaaaaaaagatcattttaaaaacattccctctcttccaaaaacaccctcgaaacattccatatttacacgcgagccccatccttcaaattctcccccaccaccattggccccgcttcattcattttcattccaaactcacaaattctcaaatccaaatccaattccaattccaattcccaatcttctcaaaccctaattcctcatcttgaaaatgagagaaatcttgcacatccagggagggcaatgcgggaaccagatcggagcgaagttctgggaggtgatatgcgacgagcacggcatcgaccacaccggaaagtacagtggcgactctgaactccaattggaacgcatcaatgtttattacaacgaagcgagtggcggaaggtacgttccacgcgccgtcctcatggatctagagcccggcaccatggactccgtcagatccggcccctacggccagatcttccgccccgacaacttcgtcttcggccagtccggcgccggaaacaactgggccaaaggtcactacaccgaaggcgctgagctcattgactccgttctcgacgtcgttcgcaaagaagccgagaattgcgactgcttgcaagggtttcaagtgtgccattctcttggtggaggaacgggttctggcatggggacgcttctgatctccaagattcgggaggagtatccggatcggatgatgttgactttttccgtgtttccttcgcctaaggtttcggataccgttgtggagccttacaacgctaccctctctgttcaccagcttgttgagaatgctgatgagtgtatggttttggacaatgaggctctctatgacatctgtttcaggactttgaagctcgccacgccgacatttggtgaccttaaccacctgatatctgccaccatgagtggagttacttgttgtctacgtttccctgggcaattgaactctgatcttcgcaagcttgctgtcaatcttatcccattccctcggctccatttcttcatggttgggtttgcgcccttgacatcaagaggatcccagcaataccgtgctttgactgttcctgaattgactcagcaaatgtgggatgccaagaacatgatgtgtgctgctgaccctcgtcacggtcgttatttgactgcttcagctatgttccgtggtaagatgagcacaaaagaggtggatgaacagatgatcaatgtgcaaaacaagaactcttcatactttgtcgaatggatacctaataatgtgaagtccagcgtgtgtgatatcccacctaagggtcttaaaatggcatccactttcattggtaactcgacttcaatccaggagatgttcaggagagttagtgagcagttcacggctatgttcaggcgcaaggctttcttgcactggtacaccggggaaggaatggatgaaatggaattcaccgaggccgagagtaacatgaacgatcttgttgctgagtatcagcagtaccaggatgctactgctgacgaggacgagtatgaggaggaggaagaggaagaagagattgctgcttaaggcgcctctcttatttgtcaaaaattgtttcaaatatcaatatggttggctttgaacgagtggtgtaagtttaaattgtggtgcagtcaaattagattgactcgttaatgtgtatgcttatcgttgattgttgacattgtataaactgggttttgttgacaatgcttatgttcttgagagatcaagtcatggatgtttgtaatagttaatgactggtctcgttttcttccccccttttgatatcttgattatagtaagttacctctgaattaaaaatacaagggtataaggaattggttgggtggagtattttgcccgccgtttaaaa

SEQ ID NO: 5962 - DNA, 1399 bp, Glycine max
tcagctacgtaggcccccccccccccgacacctctttcctccttggcttaactcaattcaactcagctattctctcttctctataagttcctctcctccattgtttttccctcccattcttccatttctgttttctcccatccctctcgcgcgctctctctcccatggaatcctccgctgccattcgatcttttcactaatcacgagcataacattttcatgaaggcaattgaatgtatccttcatgtttctacaaatatataaccaaaggatgctctgcaatcacccaagagcatatcccataggcactatgtcccatgtgcgagcctcccttgagaagcaggctgtagttcccattcataatgccggatggaactctaaaagtaggcttttcatccagcatttggcatatggtcagaagcacattaattcccacacgaaggggaaaaacacactaatttcatgtggaaaaacagctgaagctatcaacgcatccaaatctgatgcttcttcagataacactccacaaggctcattggagaaaaagcctttgcaaactgctacttttcctaatggatttgaggctttggtattagaggtctgtgatgagactgaaattgctgaactgaaagtaaaggttggagattttgaaatgcatattaagcgaaacattggagcaacaaaggttcctttgtctaacatttcaccaactacaccaccacctattccaagtaaacctatggatgaatcagcacccggtagcctgccaccttcaccaccaaaatcatctccagaaaagaacaacccatttgcaaatgtttccaaagagaaatcaccaagattggcagcattggaggcttctggtaccaatacctatgtcttagtatcatctcccacggttggcttattccgaagaggtagaacagtgaaagggaagaagcaacctcctatctgtaaagagggtgatgtaatcaaagaagggcaagtcatagggtatttggatcaatttggcactggacttcctattaagtctgatgtggctggagaagtgttgaaactacttgttgaggatggagagcctgttggttatggagaccctcttattgctgtgttgccatcttttcatgacatcaagtgagatagccttttcctgttaatgattaatcatgcggcattttttttattaggggagctattcgcgtattcgcaaaagtttttaataggttacaaataaatgtgactaaatatttggtacggaggttccttattgaaaatcatactttgtataccaattgcttaaattgtaccggataagctattctgagaccgcctcattatgtatcttacttgctggagtttgattactagcttgtccttttattttatttattttctccct

SEQ ID NO: 5963 - DNA, 717 bp, Glycine max
acgaggcgaggcaatgttcctagattgaaacggagaaggtgattagaggggcggaaatctcaaagcagacacagtgcaactaatttatcgacctctttcctcattcgcttaactcaacttggctattctctcttctctataagttcctctcctcctccattgtttttccctcccattcttccatttccatttcttcccatggaatcctcgcctgccattcgttcctttcactatcccatgggcactatgtcccatgtgcgagcctgccttgagaagcaagctgtacttcccatccataatgccagatggaactctaaacgtaggcttttcatccagcatttggcatatggtcagaagcacattaattcccacatgaaggggaaaagcacactagtttcatctgcaaaaacagctgaagctatcaacacatccaattctgatgcttcttcagataacaccccccaaggctcattggagaaaaagcctttgcaaactgctacttttcctaatggatttgaggctttggtattagaggtctgtgatgagactgaaattgctgaactgaaagtaaaggttggagattttgaaatgcatattaagcgaaacattggagcaacaaaggttcctttgtctaacatttcaccgactacaccaccacctatcccaagtaaacctatggatgaatcagcacccaatagcctgccaccatcaccacca

SEQ ID NO: 5964 - DNA, 842 bp, Glycine max
ctcggctgcgagaagacgacagaaggggagggaaagaagaagaagaagaaggaatctggcgtggaagtaaccaatcgagagtggtaacagaaatagcaataacaatttggttaacaaaaaccctaaggtggagaaagaaggggtttactctaaccggcaatcagattcggaagcctttgacttgtgttcactctgttattctcgcaatggaggttcagattccaaatcacactgttttcgacatgccttcacttctccaagctgtggtcgccgacactgttctcgccgctgctcaatctattgctttgattggatatctgcttactaatggcactagttcagtgtcaccaaatttgactgaagtggatggaaggtttcctttagaagacctttttgggaggaaacatgcttatctacaaaacaagaatagtgaaacagaggacgaggaggatggagatgaggatgatgaagatggacctgacgaggatgaggatggagatgacgaagaattctcaggtgaagaaggcgatgaaggaggggaccctgaagatgaggctaatggtgaaggaagtgatgatggggatgaggatgatgatggcgatgacaacggcgacgaggaagatgatgatgacggagaagatgaagaggaggatgaggaggaagatgaagaggagaccccacaaccacctcctactaagaagagaaagtgagaattaatattaacaaccttagtgattaggacaggtaaattagcaaccttttgagtagacctatcttgctttattttcatgtcaatgatgataattattatattaacattcctcattgtttccatgactttt

SEQ ID NO: 5965 - DNA, 807 bp, Glycine max
gcaatttggttcacaaaatcccgatgcgggggggcgcctgggggggactctaatcggtaatcagatccggcccaaaccctttgacttgtcttctctctttcactctgttgttcttctcgcaatggaggttcagattccaatccacaccgtttttgacgtaccctctcttctccaagctgtggccgccgacactgttctcgccgctgcgcaatctatcgctttgattggatatctgctgactaatgacactaattcagtgtcaccaaatttgacagcagcgaatggaaggtttcctttagaagacctttttgggaggaaacatgcttatctagaaaacaagaatagtgaaacagaggacgacgacgaggatggagatgaggatgatgaagatggacatgatcaggatgatgatggagaggacgaagaattctcaggtgaagaaggcgatgaagaaggggatcctgaagatgatcctgaggctaatggtggaggaagtgatgatgacgacgacgacaacgacaatgaagaagatgatgacgacggggaagatgaggaggaggaggaggatgaggaggaggacgaggaggagacttcacagccacctactaagaagagaaagtgagaatattcgtaggagattgtttccaggcatttgagtcgagcttagttattaggacagataaaatagcaacctctttcagtagacctatcttgctttatttatatgtcaacgatgataattattatattatttctcattgtttctacgacgttaccttctttcagccagttattatcttgtcccgg

SEQ ID NO: 5966 - DNA, 1984 bp, Glycine max
  misc_feature (1696)..(1696): n is a, c, g, or t
  misc_feature (1704)..(1704): n is a, c, g, or t
  misc_feature (1706)..(1708): n is a, c, g, or t
  misc_feature (1712)..(1713): n is a, c, g, or t
  misc_feature (1716)..(1716): n is a, c, g, or t
  misc_feature (1727)..(1727): n is a, c, g, or t
  misc_feature (1733)..(1733): n is a, c, g, or t
  misc_feature (1735)..(1735): n is a, c, g, or t
  misc_feature (1739)..(1739): n is a, c, g, or t
  misc_feature (1741)..(1741): n is a, c, g, or t
  misc_feature (1743)..(1743): n is a, c, g, or t
  misc_feature (1745)..(1746): n is a, c, g, or t
  misc_feature (1749)..(1750): n is a, c, g, or t
  misc_feature (1752)..(1752): n is a, c, g, or t
  misc_feature (1754)..(1754): n is a, c, g, or t
  misc_feature (1760)..(1761): n is a, c, g, or t
  misc_feature (1763)..(1764): n is a, c, g, or t
  misc_feature (1767)..(1767): n is a, c, g, or t
  misc_feature (1770)..(1770): n is a, c, g, or t
  misc_feature (1777)..(1777): n is a, c, g, or t
  misc_feature (1791)..(1791): n is a, c, g, or t
  misc_feature (1793)..(1793): n is a, c, g, or t
  misc_feature (1795)..(1795): n is a, c, g, or t
  misc_feature (1797)..(1797): n is a, c, g, or t
  misc_feature (1800)..(1800): n is a, c, g, or t
  misc_feature (1804)..(1804): n is a, c, g, or t
  misc_feature (1806)..(1806): n is a, c, g, or t
  misc_feature (1809)..(1809): n is a, c, g, or t
  misc_feature (1831)..(1832): n is a, c, g, or t
  misc_feature (1839)..(1839): n is a, c, g, or t
  misc_feature (1844)..(1844): n is a, c, g, or t
  misc_feature (1846)..(1846): n is a, c, g, or t
  misc_feature (1850)..(1850): n is a, c, g, or t
  misc_feature (1853)..(1854): n is a, c, g, or t
  misc_feature (1856)..(1858): n is a, c, g, or t
  misc_feature (1861)..(1861): n is a, c, g, or t
  misc_feature (1866)..(1866): n is a, c, g, or t
  misc_feature (1870)..(1870): n is a, c, g, or t
  misc_feature (1874)..(1874): n is a, c, g, or t
  misc_feature (1880)..(1880): n is a, c, g, or t
  misc_feature (1887)..(1888): n is a, c, g, or t
  misc_feature (1891)..(1891): n is a, c, g, or t
  misc_feature (1893)..(1893): n is a, c, g, or t
  misc_feature (1900)..(1900): n is a, c, g, or t
  misc_feature (1908)..(1908): n is a, c, g, or t
  misc_feature (1913)..(1913): n is a, c, g, or t
  misc_feature (1915)..(1915): n is a, c, g, or t
  misc_feature (1924)..(1924): n is a, c, g, or t
  misc_feature (1927)..(1928): n is a, c, g, or t
  misc_feature (1931)..(1931): n is a, c, g, or t
  misc_feature (1941)..(1942): n is a, c, g, or t
  misc_feature (1953)..(1953): n is a, c, g, or t
  misc_feature (1957)..(1957): n is a, c, g, or t
  misc_feature (1959)..(1960): n is a, c, g, or t
  misc_feature (1966)..(1966): n is a, c, g, or t
  misc_feature (1969)..(1970): n is a, c, g, or t
  misc_feature (1972)..(1972): n is a, c, g, or t
  misc_feature (1979)..(1979): n is a, c, g, or t
  misc_feature (1982)..(1983): n is a, c, g, or t
atacatacacatccatccgccaattttttcttccaccgaccatcgttaccatgcgcaaaatccagagttcataaaccctttttagtttcctccaaatccaaacaccgcttaaccgcgccgccatgaacttcttaaagtccgtcttcgctgacgagcccaactcgccgccggccgtatcggacagccccgatccgcctccgagcgacgccgcgtggagcttcggtggcctcatccaaactctcgcctcgaaatccgaatccgtcctcgagaactaccgtcgcgatctcgaggaattcgggtccggtttgaggaaggagacggcggtgatccgcgaagccgcctcacgcgccgtccaggagctgccggcgtcgctcgacgtcggcgcgtcggtggcgcaggagtcgctcgaatccgtcggccaagccatcgacgacatcggcatcaccggtttggaactcgacagcgcagattatctctcacggtagggactctctcttagcctctgatttcgattccgattctttcgattcgaacaattacgataatagcaatgctagcaagaaactgttgagcggtagtggtagcagtgatcgtggtttggatttgaaacggtatagtaggtttgatacgctggtgggtgcgcttcagtgtgatgtgaatacctatttggcagagcctgaggatttggggaatttcaatgagtggaaattagggtttgagttggatgagaagaaggaggagattcggaatttgattgaagagaatgaagttgttgatgagatttatgagaaggttgttcctagtaggattgatgatgagggtttctggagcaggtatttttatagacttgataagctgaggcaagccgaggatgcaagggctaagctcgtgaagcgcgcactttctggggatgaagaggaggatttgagctgggatttcgatgatgatggcaatgatgggtatgagcctttaggtaataacagtagggtttcaggggtgaaggagggaaattctggttacattgtcgcggatggtggcagtgttgagaacgttcaggctggaaagaaggattcagagatagagggtgatgcgaagattgttgataatgttcaggttgtgaagaaggatttggagatagaggaagatgagacgggtgttgctgcttctgaatctaaaactgatgttgatgataagtcggagaatgtggcatctaatgttcctgagaatgtaagtatcagtggggataagttggatgccaaatatgaagaaaaagaggcatcagaagggaagatagataatgataacaatggatcgtgcaaagacagtgatatttcagttgtttcaagccagccttcaatgcctggggaagaagacattggctgggatgaaattgaagatattgaaagcaatgatgagagtaaaggggatggtgttgggtccgcaagtaggattgatttgcggaagaggttgagtgtggcagaccaagatgaggatcttagttgggatattgaagatgatgatgatgtggctgtcaaataatgagcagattgtggattcagatcatcggtgctttaattactaaacacgaattacttatttagtgtataattctttcttataaattaacaatgtaaataaattgtttttttatgtcttatacaagcttaatttgtaagttgacacaaattgataattnaattcgantnnnttcnnttntcttctatttnttgcantnttgntncntnngtnntncncttgtnncnncgnttnttgtgcnattcttgtgcccgngncntnttntttngnatntcgtccctacctcgcttctccnnttttttnttttntntttncgnngnnnatntccgntcgncttntccttnatgattnntcntntgtggtnttctttcntgctntntccctctcnttnntcncttcctatcnntactccatttnttcntnntctttnttnntnttgtttnttnnt

SEQ ID NO: 5967 - DNA, 2566 bp, Glycine max
  misc_feature (2481)..(2483): n is a, c, g, or t
  misc_feature (2485)..(2487): n is a, c, g, or t
ccacgcgtccgcaaactcctgctcatgtaaacagaattttatgaataattcagcacgtgacacgattccaatcctcatttgcaaaattaacaactcactttttatagtgttccattataaaatatcctaaaaagatactgttagatggtgtactaacatgtaagtgtaagtgtgcagttgatcgagttgattacggctgcgagaagacgacagaaggggatgtcattggcgagtgatcaataaaatactaagttatttagtattatgttctgtcgtaatcctttcaagtcacaagctttaaaagagggtgtaagtgtaacttttcaattcctcaacctcaagataataataaagctaaatcatagtagtgaggagtgactagtacaaacagaatccaaagctttttttttcttcttcttcttcttctttctaacgccatgtctgggagccaccaagagcagccactgttagagaactcgttcatagaagaagacgagccgcaagaaacagcttatgattcgtcggagaagatagtggtggtcggagtcgacgagtccgatgacgaggagaattgggggagagtgccccgattctcgtggaagaagctatggctgttcaccgggccgggctttctgatgagcatagcgtttctggaccctggaaacttagagggggaccttcaggcgggtgccattgcagggtactcattgttgtggcttctgatgtgggccacagcaatgggcctcctgatccagctcctctcggcacggctcggcgtggccacagggaagcacctcgccgagctctgccgagaggagtatcctccgtgggcccggatagtgctctggatcatggcggaactcgctctcattggctccgatattcaggaggttattgggagcgctattgcaatcaggattcttagtcatggggttgtgcccctttgggctggggttgtcattactgctcttgattgttttatttttctctttcttgagaactatggtgtgaggactttggaagctttttttgctattctcattggtgtgatggcaatctcgttcgcatggatgtttggtgaagccaagcccagtggcaaggaacttcttcttggagttttgattccaaaactcagctccaaaactatacagcaggctgttggagttgtggggtgccttattatgcctcacaatgtgttcttgcactctgctcttgttcagtcaaggcaggttgaccgcagcaagaaaggccgagttcaagaagctcttaattattactcgatagagtccacccttgcccttgtagtttcctttattataaatatttttgtaacaacagtgtttgctaagggattttatggctctgaacttgcaaacagcataggccttgtaaatgctggacagtatcttgaggagacatatgggggtggactatttccaattttatacatatggggtattggattattagcagcaggccaaagtagcactattactgggacttatgcaggacaattcatcatgggaggttttctaaatttaaggttaaagaagtggatgagggcgttgattacccgaagttgtgcaataattccaactatgatagttgctcttttattcgatacctcggaggaatcgttagatgttttgaatgagtggcttaatgttcttcagtcagtccagatcccctttgcacttattcccttgctttgtctggtgtcaaaggagcagataatgggcactttcagaattggtgctgtcctcaagactacttcatggctcgtggctgctctggtgatagtgattaatggctatcttttgacggaattcttttcctctgaagtgaatggaccaatgattggcactgtagtgggtgtaataactgctgcatatgttgccttcgtagtataccttatttggcaagccatcacctatttaccttggcaaagtgtaacacaaccaaagacaattgctcattcagagggttgaggttgagtgatcaatctttaaaatcgcggaataggaagtgccatccatttttaagtatgctcatgcttgtttgttactcgtgtgacaagttgatgcaataggtggtggcaccttattctttgcctgtaattataaactatgtcagagtagattttagctctgtattagtactttcaaattttgttgtcaaaatgccttggcaacactctaattagttgagacaccttcgaagctgtagtgtgcaaaccagcaatgtagttctttttccttgctccctcgattttactcatattctatagggtaataatcttttaaggttgtagcatgaaacaatctttcaaggttgaagcatgaaacaaatcttttaaggatgaaacactctgattagttgagacacctttgaagctgtagtgtcccaacaagctatgtagttcttctgtttaacaacttattgagagaattgaatgatttttattacacttacagggtcatnnnannnaaaaaaaaaaaaaaaaaaaaaaaaaaaaaaaaaaaaaaaaaaaaaaaaaaaaaaaaaaaaaaaaaaaaaaaaaaaaaaa

SEQ ID NO: 5968 - DNA, 1167 bp, Glycine max
  misc_feature (4)..(4): n is a, c, g, or t
gaancccgctgcagaggacatactaatgcgtgttgtggctcaaaatctttctcctgagttgactctcgtggaaaaggtaatgactccaaacccagattgtgcatcaatagatacaacgatactggatgcactgcatatgatgcatgatgggaaattcttacatcttcctgtggtagacaaagatgggtatgtagtggcttgcatggatgttttgcagataactcatgctgcaatctccatggttgagagtagctctggagctgttaatgatgtggcaaatacaattatgcaaaaattttgggactcagcttttaatctagaaccaccggaagattctgatactcatagtgaactttctgggctagtgacgtcagatggggctgatacatcaaagtctggatatcaatctgtaggttttggaaattcatttgccttcaaatttaaagatctcagtggtcgtgtgcatcgattcaactgtggtactgaacatcttgatgaactagtttctacaatcatgcagagacttgatgttaatgatggagaacgccctataattttgtacgaggatgatgaaggtgacaaaattgttcttgcaaccaatagtgatcttgtttctgctgtcagctatgctaggtctgcaggagtgaaggctttaaagttgcatttggattttggcagttcaaccaaagcaacaactccaaaatcttgtacagacactagacagaaaactagtgctttgtctatgcgctctagtatttttgcaagtgcaattgttataacaagtattggcgtgttggtctacttaaaacgctccaaacagtgatgtgttgccagtttggtgagaaaaaaaaaaaaagaagcaataatcgctctgtatgagttcaagagcactattgccttttaaaggctcattacaattaagaaaatcttggataatgaaataggcgaattatatgaggttcttcttaaaattgagtctttttgttttgaggttaattttttcctccacggtcaagccaaggcgattagttacgatagccacttatatttttgtctccgatgtaattgcaatctttaatcctcgtccttcgtagtgggaatatatgtacagataatgtcttggcataatatattcagaaatgttaagacgttcttcatttttgcttc

SEQ ID NO: 5969 - DNA, 2026 bp, Glycine max
ggtccggattcccgggccggcccccgcgtccgccctcgcggccgggaacgtgaagcaactcaaatttttggtccaaaaaacggtaaattaaattagggtttgagaagaagagagtcttagcactctccaatggcgacgagggtccaccaattcttcgacgaactcgaagcgaagaaaaccattctggcgaaatgcaccgacctcttcaccaccctctccacccacttctcctccctccaacactccatctccgagaaatcccaatccctcgattcaaacctacaatctctcgattccctctccaaagaaaccctcgaatccctccaccgccgtgagacctccatccccgagcgcgagtccgccgccgccgcccgcatcgaggagcagagggaggccgcgctcgccgacctccgcgccacgcatccacctgaccccgacctctccgccacgctcaaatccctctggcggaagatggacgcccccgcgctactgcgcttcgtggtgtccaagcggaaggagtcggcgtcgctgcgggcggagatagcggcggcgatggcggaggcggtggacccggcgcggctggtggttgaggcggtggaggagtttctgaagagcaaggtggccaagtccggggtgacggataagaggtgggcgtgcgggcttgtgattcaggcgctgatggtttcggagtcggagtcgagggaatattcaagaaggatctcggagagagccgtttcggttgtggaaatgtggaaggagcatttggatggagaatccgagagtggtgctgccgaagtggtcatgtttctgcagatggtcgtttgtttcggcttgaggtctaggtttgatgatgagtatttgaggaagctcgttatgcagtttgcttctagaagggacatggcaaagcttgctgcttccttacagttcggggacaagatcatagatattatagatgaactaattaaaaatggcaaagagatagaagctgtttattttgcttcagaatctggtttgactgaaagatttcctccgattgacctactcaagtcctaccatcggaactacaaaaagaatgtcagtaccgcattgaaaaagggaaacaacaatcgtgctactacggatgattcaagcacttcggagttgaattccattaaggctataatcaaatgtgtagaagatcacaagcttgaatcagaatttaaccttgataatttgaggaagtgggctacccttctggagaaagccaaggctgaaaagaaaaagagttcgacatccggaagtaaacctcagaacaagcgaggcagtggatccagctcttcacgtccagccaaatcagccaaatttagcagtgcgcactcatcatctttcagtcgcaggaacctggcaccttctctacaacccagtcccggtgcaagattttctgttccattcaactaccccagccagaccatatacgatggagcaactgctaatctttacacagcaacctatggaacttcccacactcaaagcccggctggaataacacaacagcactactctattcctgttgacaatttgggtccgtctggttaccggtctagtggttcttattcagcacagactagctatggcctgtatgattacagaaatggtgctcctccaacttatccacctccgtacacagtagatcaaaccacttacaggggttaattattcgactccctctccccctggttatagtcctttttctgcctgtttgatgttactttcatctattttgtttctcgttttgtgcatgttaaaattggaaataaaatagtttttattctttttcttctgggagtactccgtataaccgcctgagctgattagtcccaggtttgtttcgccttttcctttttcttttatttgttctgggctattttctacatctcaatggcgtttcggtgtattgtcatattagcttccaaaagaactggtaaaattgttaacctagttatatctatatgcttttaatttttaatcgcaataaaatgcgatcaac

SEQ ID NO: 5970 - DNA, 2695 bp, Glycine max
tcagctacgtaggccccccccccgacatagcctttaaaggtttaaagaacctcccttgccgccgccgcggaaccctagcctcagctccctcgccaccaccgcggaactctagcctcagctccctagccaccgttcgccggagtatcaccccgacgccgtcgtcgctgagaaatcatccaccaaaaggcctaacgctatgaagacgccgcaatctgcctctaaattgaaaaggaaaagggaagaaggtaaaggtaagaaaaaaaagaaagcaggtaacaaggaggaaaaaaggaaaattgcagacatccctgaatctcgtagcatgctggagtatgaccatgatgaaggggaagggtttgaccatgagtctcctagaagcaaagttgtggaaagtttgtggcaagatcctgatgtcaatgattctggattaacagaaggttctgaaactaaagaagatgttgggtttcattcagatgaagaggatattggaattactggccaaccaacttctgatgattcattgcatttgagctcttttgatttacatttgcaacataatttatccaaagaagaaattgacggccaaaggaataggaaatttagctgggagactccagccattggcatgtcaaattgcaagtggataggaactggagagaacattttggaggatttggatatcaattcttgtcatggtctcaaatcaaaattgtccgagcattggatggatgtctacaggacagctggaggcaaagatattagttcacctaaacagaagatatttttctccctttgcagcagttaccgggatatactttactgtaacaagaggcctttctatctcaaaggtcttgaagacacaagcatcatggatgcatacataatgcattctctcaatcatgtcttcagaactagagactgcgtgaaaaaaaatgattccaaactgaccaagcttaaagagaatgctgatagtgataaatttcgagatcagggttttactcgtcctaaggttttaattttattgccattggcaagtattgtgtaccgtgttgtgaagaggcttatacagcttacaccttcagctttcaaggtcaatgttgaacatatggatcgtttctccactaaatttggaagtgaagaacataaaggtaatacagaaaatgacgatgaatctgaaaatgcaaaacctcaaaagtcttccaaagcgacagattttcaaatactttttggtggtaataatgaggatgactttatgattggcatcaaatttactaggaagacaatcaagttgtttagtgatttccatacctctgacattattattgcttcagcactttgcttggttaataaaattgaagaggctgggagtaataaggaaaaagatgtagattttctttcttccatagaggttctgatcattgatcatgcagatgtaatatcaatgcagaattggtctcatgtgcatacagttattgaacacttaaaccgcttaccatctaagcagcttggaacagatgtaatgcgcattagaccatggtatcttgatgatcatgccagattttacaggcaaacaataatactgggtctttattcaaatccagatgtaaatgcttcattcaatcatcagtgccttaattatgaagggaaggtgaaattgatcagtgaatataaaggtgtcttacacaaagtgatttatgaacgatttaacgtagactctatagtagaagctgatgatgctcgatttgattattttgttaaaaaggtttttcccagaataaaagatttagatcagggagggaccatgttgtttaccaattcttactttgaatttattcgaatccgaaattttttgaagtcacaaaatgcctccttttgtctgcttggggagtatacaacccaaagtgatatttctcgtgcgcgtctttggttctataaaggaaaaagaaaaattatggtttacacagagagatctcacttttaccacagatataagatccgtggggttcagaatttaatcatttattcactcccagagaggaaagaattttaccctgagattgtgaatatgcttgatgggtcggacaatatgacatgcactgtccttttttcctaccttgacaagcttcggctggaaagaattgttggaactactccagccaaaaggatggtggctgcggagaaaggtgtttttgttttctgccattagaattctgccaaggcaaccatgtgaattaccatgggtccatggtagtggcatcattgattattatatgtgaccatggattccaagaggctcccgaaaacgatcttgatgatacaatgagtggaaaatagtgccgaggatgcttgaagggacactgactgtctagaaaaaaaatcatggaggaaaactctttgggttggttttgttttctattaggcccccccccccccccccatcacaagtgaattcagtttagttcaatgatagaactgtaaatgtaataggggttattttttatgatagcaaacattctagaagtagtacgaggggttataattctgataatagtattatttttttggtcagctatattgaatgatgtcaaattatagtcatgtttgaagcagtttgtaccctagaacgggggcattaaaatgctttatccttttcaatgaaaagtctagaagttcttctaaaaaaaaaaaaaaaaaa

SEQ ID NO: 5971 - DNA, 1389 bp, Glycine max
tgtagatctaaaagataatcagcttcctaggccccccccccccggctagtgctagcctcatagcaggagaaagaaaaatctccattactaacggaggaggagcacttctactaacaccacccacttcatcttctccttctctatcaccttcttgcacaacaagcataaccacttccaccgccaccgccacctcgtcgaattcagagaaccaaaacttgaggtgccctcgttgtgattcatcaaacacaaagttctgttactacaacaactacaacctcactcagcctcgtcacttctgcaaaacatgtcgccggtactggaccaaaggcggcgctctcaggaatgttcccatcggtggtggctgccggaaaagcaaaagctccggcatgtccaactcggttgccaagcaaaccgccacaaagatgaaagcagtggcatcagagcttggaaggtcgtcgtcacaaggactcttggaccaagagcttccacaaaccccagcaatcctgtggggttctccacaaaattctcaactgatggctttactaagagctaaccaaaaccataaccctaaccctaaccctagtccaatgtcaattgttgtcaagggagaagggaacttaatgggatctcaccacatggtggctgagccattgctcgcaaatgggttgttgaatcctagaactagtctaggctttgatggtgtgggagaagtacttccttcactgggtctatgcggctctttttggaggaacaatcaagatcagactcagcaacaaaacaacggttttgcacttggagaacatcaaagtagtggagttcaagaactttaccacaagctcaggtcatcgtcatcatcaattaattattgtggcagtgataactcaccagtgtttctaagcaacatggcttcttcttcctcttctttgtccaacattttggagtcatcttcagtttctgggagtgaattcgggtgctggaatccaaccctttcctggtctgatcttcccactaccaatggagcatatccttaattaaccaccgcatgcagtaactactttcctcttttttgttcactgttcaaattatcttttcgagttagatatatagaactccttaatctatagtttatagatgttaatctgtatcctagctagagtcttttctcgtgtttgtttgcttcggggtggtggataaggaatatggatgtgtaggtaccattagatttttttttcccaactcagcagcgtctttctatcatttgcttcttttatttctggttgatggtgtgtttatcttagctttctcaaatgatatttcaagaactaccagagagtttagaatgaatggaaaacacagtgtttaattgtcaaaacggacgcgtgggtcgac

SEQ ID NO: 5972 - DNA, 979 bp, Glycine max
ctttgcgtgacattcattccaccccactgagccccgttctccgtcagttttactcatctccgttctttaccttcctgaacgacaccgagaccagacacggtttggggcacagttaaggtggtagcagtagcattgttaggccatatctcctttttttctctgccttgtattgaggtaaaactcacaaatattataactttgatctggggaagcaatggcatggagaggacatctttcgaaaaacataaaagaacttcggtttttgatgtgccagtcatctcctgcaagctcacctgcaagggcttttgtggagaggaattataaggaactaaagacattgaacccaaaattgccaatattaattcgtgagtgcagtggagttgaacctcaattatgggcaagatatgatttgggtgttgagaaaggcatcaaattggaaggcttgtccgaagcacagatctttaaggcacttgaagatttgtcaaaagcaggacagtctttgaaagcttgatattgctgcttatgcactgtcttaagtggaataaatgctctcttgctgcccttgttattgcaaattgctttttgatttaaaataagccaggcctttttttttctatgttctatggcctctggtttcagcctgtctctgcatcttacatcatttcaagtatgacactgttcattgtaagttcaaaaccctggtttttcatgttgagcacacttgtcgagggagatttattcagaccaaagattatatgactactggtctatgtcaaaggttgacttgccagagaacatgattctgtattggctgtgtaactaaaaccaaagcataaacccatctatgatgttttctcctaaagtagtagaccattttatgttgctggaatggtttctttccctgttcctgtattatgtgtccatgatctaatatatatatatataaaggcttagttgcatttttggcaaaaaaaaaaaa

SEQ ID NO: 5973 - DNA, 890 bp, Glycine max
acggctgcgagaagacgacagaagccgataatatattggcatggtaagtcctcaatttggtcccgaatcgcacctcaccacaacctctctttctcgtctccgtccgtgcaacctgggaagcaatggcatggagaggaaatcttttgaaaaacataaaagaacttcggtttttgatgtgccagtcatcacctgcaagctcacccacaagggcttttgtggaaaggaattataaggaactaaagacattgaacccaaaattgcccatattaatccgtgagtgcagtggagttgaaccccaattatgggcaagatatgatttgggtgttgagaaaggcatcaaattggaaggcttgtcagaggcgcagatctttaaggcacttgaagatttggtaaaagcaggacagtctatgaaagcttgatattgctgcttatgcactgtctgaagtggaataaatgctctcttgctgctcttgttattgcaaattgctttttggtttaaaataagccaggtctttttctatgtcccatggcctctggtttcagcctgtctctgcatcttacatcgtttcaagtatgacactgttgagtttaagttcaaaatcctggttttgcatgttgaacacacttatcgagggagatttattcagaccaaagattataatattaattttggttcatatgactactgatttttgtcaaaggttgacttgccagagaacatgattctgtattggctgcgtaactattaccgaagcacaaacccatccttaagtagaccttttaatgtagctggaatggtttctttccctgttcctgtattatgtgtccatatatatatatatatatatataagaaaaaggcttagttgcacaaaaaaaaaaaattaaaaa

SEQ ID NO: 5974 - DNA, 2396 bp, Glycine max
acggcccccgcccccccgacaacagtctacttcggatagttataataactctgccccatggtctcgggtaggaagctccaacagtaacagttctgccagagttcagcagaagtttactaaagaaaaccgaggttctacaagagaagagcatgttgacaattttcattatcaagatggccgaagaaatgaggtttattttgatgatagaacagcaaattctgagttgtccagtgcacctcctttgagctcctttaagagtaggacctcttctgaaagctcatgggatggatcatcagccaaatcctcaaaatcaactagggagagaagggggaggaaaaatacttcctcaatagcatctcctgtttatgcgaagggtaagaatgtttcagaaacttcatctaatcgagtagatgatgaaaatagagagtggactcctttgtcgaccatggcatctaacataccagaaagaagcaattggcccacatctggtacttccatgcatgttccaaggaatcaaatatctggttttgaaactgcccagacaagtggatcagattctccattacccatagctccggtgcttttaggtcctggttctcgccaaagagagaattctggggttgttccatttacattttatcctactgggccacctgttccctttgttacaatgcttcctttatataattttccaactgagtcttctgacacttcaacaagcaacttcaatttggaagaaggggcagataacagtgattcaagtcagaattttgattcatctgagggatatgaacaccctgaggtgtcaagcccttccaattctatgacaagggtggctattgagtcatcagagcacagggcctgacattcttaatagtgactttgttagccactggcaaaatttgcaatatggccgattttgtcaaaactcacgtcatccgccttcaatgacatatccctcacctgttatggtgcctcctgtttatttgcagggtcgatatccttgggatggccctggaagacctatttctggtaacatgaatattttcagtcagcttatgagctacgggccacgcctggtttcctgttgctcctctccaccccccccccaatagacctgccagtatttaccaacgttatgtagatgatatgcctcgatatcgaagtgggactggaacttacctgccaaatccggtttctgctcgggatcggcactccactaataccagaaggggaaattacaattatgatagaagtgaccatcatggtgatagagaaggaaattggaatacaaactcaaaattgcgaggaactggacgcggccataatcgcaaccaaacagagaagcccaactcaaagatggagcggtcggctaccagtgagagccgtgccgagagaccatggggttcacataggcatgacaccttcattcctcaccagaatggtccagtccgctcaaattcctcacagagtaatccttccaatgtagcttatggaatgtaccctatgccggccatgaacccaagtggggtctcgtcaaatggaccaacaatgccatctgttgtaatgttttatccttatgatcataatactggttatggttcaccagcagagcagcttgagtttgggactttgggatcaatggggttctcaggtgtcaatgaactgtctcaggcaaatgagggaagccaatctagtggagcacatgaagatcaaaggtttcgcggtggtcacggccaacgatcttcccctgatcaaccctcctcacctcatgtctcaaggggtccctgattctattgtcaggtcagtggccaggagcaatttttgaaaaaggaggatgttcctccttattcgttctagaaccgggcatggcagggcatgtcactggggtacactatctgtccattttcatggcattattgcactttaaaaagaaagaatgtaggtccctagtttgtttgtgcccaggctcttgcatgtacacttacaggtgattaaccaactttggttaagtttgtccatccaagacacccatgtttgaggatgaaaacaatggggacaaagaggatgcaggactctcctcccagtctctaccgaaagaaaagaagggatggatggcttttggtgattagatttttattaaaagtttagacacatttgtaacccaaccaaagtagaaaactggcttagattcagaatttagaaaatttaccatgttatacatttttgtcagcttctcttttaaacaatgttgtagttgggtacttgttttagaacatgcagcagatcgttgttgaagttttggacgttgttatagcttattagcaataaaattgtcacgagattattagatgtcaaaaaaaaaaaaaaaaaaaaaaaaaaaaaaaaaaaaaaaa

SEQ ID NO: 5975 - DNA, 2115 bp, Glycine max
cgagtcatgtgagaagtgagggagagatgcagtagtagtagtgggtggtaacagagaagaaaatagggggtttggtttggtgagttacccaagagaaaggatgaagagggaacgcgagcagcttggttccatcgcagggacctcaagctgcggttattcaagcggaaaatcgaatctttgggaggaagaaggaggcatggacgagcttcttgcggtggtgggttacaaggttaggtcatcggacatggcggaagtggcgcagaagcttgagcgtctcgaagaagccatgggaaatgtccaagatgacctcccggagatttcaaacgacgtcgttcattacaacccttccgacatctccaactggctcgaaaccatgctttctaattttgaccctctcccctccgaagagccggaaaaggactccgcctcgtcggactacgatcttaaggctattccggggaaagcaatttatggagctagcgacgcgctaccaaaccctaagcgcgtgaaagccgacgagtcaaggcgcgcggtggtggtcgttgactcgcaggagaacgggatccgcctcgtgcacagcctcatggcgtgcgcggaggccgtggagaacaacaacctcgccgtggcggaggcgctggtgaagcagatcggcttcctcgctgtgtcgcaggttggagctatgaggaaagtcgcaatctacttcgccgaagcgctcgcgaggcgaatctacagagtcttccctctgcaacactctctctccgattctcttcagattcacttctacgaaacctgtccatacctcaagttcgcacacttcaccgcgaaccaggttatcctcgaagcgttccaaggaaagaaccgcgttcacgtgattgatttcggtatcaaccaggggatgcagtggccggcgctgatgcaagccctagcggttcgcaccggcggtcctccggttttccgactcaccggaatcgggccgccggcggcggacaactccgaccacctccaggaggtagggtggaagctcgcgcagctggcggaggagatcaacgtgcagttcgagtaccgtggcttcgtcgcgaacagcctcgccgatctcgacgcctccatgctcgatctccgggaaggcgaagccgtcgctgtgaactctgtcttcgagtttcacaagctcctcgcccgccccggcgcggtggagaaagtactctccgtcgtacggcagattcggccggagattgtcaccgtcgtcgagcaagaagcgaaccacaacagactgagttttgtcgaccggttcacggagtcactgcactattattcaaccctattcgactcgctggagggttcgcctgtgaaccctaacgataaggccatgtcggaggtttacttagggaagcaaatctgcaacgtggtggcgtgcgagggaatggaccgcgtggaaaggcacgagacgctgaaccagtggcggaaccggttcggttcgaccgggttttctccggttcacttgggttcgaacgcgtacaagcaggccagcatgttgctcgcgctttttgcgggtggggatgggtatagggtggaagagaacaatggttgtctcatgttgggatggcacactaggcccttgattgccacctccgcgtggcaactcgctgcaactcgctgagtcgactcgccgattcctcaaccagctttttttttttgttttaattttattataatttctattcatgcccaccgaaaaaaaaaagggaacttgtggggatgagagggcagtgtgtaaatgtgctatgctgagctgtgagcactgattgcattagactgagacccaccattgtctattttcctgtcccaacttatgtctctctctctccaacccttaatttacctattttgcgtttgcctgaggattttcagattttgattttctcctctttttttgtaaaccttgaattttactttgctttcttttgggttgggatgggtggaatctcttgtaatttttcagggttggaaaatcaaaaggcttaatgtgtatttattttattatggtttaattaatatattagtagtattatgtagcttactggtgagtggtgatatactaataaattagaatctattttt

SEQ ID NO: 5976 - DNA, 1007 bp, Glycine max
aaattggcgtgagtcgggccaagcaagctaaggcaaaccctcgttggcaagtttgtgatggcggcctcttcttcctctctctctgcctccgacgactcttcttctcgccgtcgcaggcgccaccaccgccatcgccgaggccgcgataaggactctctcaagattcgaaagaagagcaagtcccaatcccaatcccgcggaaaacgacgccgtaggcattaccaccactcttccgattcctattcttcatcctccctctctgattactccagaagtgaaagttcttctgatagtgaacatgaaacatctcaccgttcaaagaggcacaaaaagagtgacaggccaaagaagaataaggaaaaagatcaaagtaaaagccaccgtcataagtggcagaagcataaagtaaaagagaaacagcatgatgagaggagcagcagccctgtgcagctttccaagtttttagggcgtgacaaagatgatggtgtccgtcgcagtgctgtatctggcaagaagattcttctgaaacttgagaaaacaaaggaagataaggtagctgaaagcaagagaaatgaactgctgaactttttaaatgctagttttgattagatttgatagggtacaacaaaatctgcaaagaaccaaatttacttacgtgggtgcataaattatttttccattataagaaccgggcagcctgccatttccttgcggaagaggagggggataccataatattatgcgtaccattgaaagacatgtgtggttctcaatcagtggatttctcttttacggaatatgttatgagcttttgtagaatgaggagtttttgacccaacagattccatacatggtattttgagattgggcaatcattgtgttatgtgccaagacttttttttttttcttgtgtttatttgggcacatgtgactgaattattaaaaatttgttcccttcttggtttcccctccaaaaaaaaaaaaaaaaaaaaaaaactcgagactag

SEQ ID NO: 5977 - DNA, 1152 bp, Glycine max
cggactcgtccgcccacgcgtccgtacggctgcgtgacgtcacgctcgaagtaagagagaaagaaataaagaattggcgtgagtcgctcgcaagtttgtgatggcggcctcttcttcctctctctctgcctccgacgactcttcttctcaccgtcgcaggcgtcaccaccgccatcgccgataccgtgataaggactccctcaagattcgaaagaagagcaagtcccaatcccaatcccgcggagaacgacgccgtaggcatcaccgccactcttccgattccgattcctattcttcatcttccctctctgattactccagaagtgaaagttcttctgatagtgagcatgaaacatctcaccgttcaaagaggcataaaaagagtgacaggccaaagaagaataaggaaaaggatcgaagcaaaagccaccgccataagaggcagaagcataaagtaaaagagaagcagcatgatgagaggagcagcagccctgtgcagctttccaagtttttagggcgtgacaaagatgacggtgtccgtcgcagtgctgtatctggcaagaagattcttctgaaacttgagaaaacaaaggaagataaagtggctgaaagcaagagaaacgaactgctgaactttttaaatgctagttttgattagcattgagaaggtatggatttgatagaagggtacaacaaaatctgggaaggaccacatttacttacacaggtgcagaaattatttttccgttataagaaccgggcagcctaccatttccttggggaaggggagtgggatatcataatattgtgcttaccattgaaagacatgtatggttctcgatcagtggatttctcttttatgaaatttgttatgagcttttgtaggatgaggagttcttgacccaactgattccatacatggtattttgagattgggcaatcattgtgttatgtgccaagatatttttttcttgtgttgatttgggcacatgtgactgaattattaaaaaatttgttcccttcttggtttccccccgataattgttcttaaaaataggtttggattgaattgattcaacctaaagatcttaggttcaattcttgtccattgtccttcattgatatatcatttgtaagtacaaatataattcc

SEQ ID NO: 5978 - DNA, 1567 bp, Glycine max
aaaaaattggcgtgagtcgggccaagcaagctaaggcaaaccctcgttggcaagtttgtgatggcggcctcttcttcctctctctctgcctccgacgactcttcttctcgccgtcgcaggcgccaccaccgccatcgccgaggccgcgataaggactctctcaagattcgaaagaagagcaagtcccaatcccaatcccgcggaaaacgacgccgtaggcattaccaccactcttccgattcctattcttcatcctccctctctgattactccagaagtgaaagttcttctgatagtgagcctgctacgtcgcccccccccccgaggcataaaaagagtgacaggccaaagaagaataaggaaaaggatcgaagcaaaagccaccgccataagaggcagaagcataaagtaaaagaggtaggtcacttcttgatgccatgtttattgtcttccgtaggcttgttcagaatagtttgttattcttcatattgaaagtttttaactctagtaagtgaccttgaaatgttgactatgtgtgcggcatcatttcatttaaatcttcagattactcataaacttgattcaacatgcttaatacttattaccggaagttttgctgcatggattcttgcttaaatccaatattcatctacataagacacactcatataattttgtatgattccctatcatcttctgttgcttgaaaacactggtttgacatcattggtcctgaactaataatgcatagcataaaacaacaaattattaatttagctgcaaaattgcggacttttttccatacacaaagttttgtacattccacttttccagtctgagatggcttatgatactttctgcctattttgtgtattggctctttgaaattggagctgggatctgtgacatgtttgggcgcttgattgacttgcttggatgttgtttcttggtggggtttgtcctggcaatgggagctttatatagaagcagcatgatgagaggagcagcagccctgtgcagctttccaagtttttagggcgtgacaaagatgacggtgtccgtcgcagtgctgtatctggcaagaagattcttctgaaacttgagaaaacaaaggaagataaagtggctgaaagcaagagaaacgaactgctgaactttttaaatgctagttttgattagcattgagaaggtatggatttgatagaagggtacaacaaaatctgggaaggaccacatttacttacacaggtgcagaaattatttttccgttataagaaccgggcagcctaccatttccttggggaaggggagtgggatatcataatattgtgcttaccattgaaagacatgtatggttctcgatcagtggatttctcttttatgaaatttgttatgagcttttgtaggatgaggagttcttgacccaactgattccatacatggtattttgagattgggcaatcattgtgttatgtgccaagatatttttttcttgtgttgatttgggcacatgtgactgaattattaaaaaatttgttcccttcttggtttccccccaaaaaaaaaa

SEQ ID NO: 5979 - DNA, 1710 bp, Glycine max
  misc_feature (692)..(692): n is a, c, g, or t
  misc_feature (716)..(716): n is a, c, g, or t
  misc_feature (769)..(769): n is a, c, g, or t
aggccccccccccgagtgtatgaaatgacccagtactcagaaggtgaagggagtaagtgagaactgagaacttctaagaaacgccgccaatggcgcatcgctcactcttcctctctctcagacgaaatagcggtttagcttgtgtcctgaacagaacaagattcgtgtcttcgggtgctgtgagcagtgatttggtggaagagagtgtggaaggtgatgatgacctaaggagcagaatcttcaggcttaggctccccaagcgaagcgccaccaacgttcttcagaaatgggtcctccaagggaatcctattacgctctctcagcttcgggatatatccaaagagcttcgaagatctcaacgttacaaacacgctttggagatatcagagtggatggttagcaatgaggaatatgagttatcagactctgattatgcagtccgcatagatttgatgacccaagtttttggcattgatgctgcagagcgctactttgagggtctacctcttgctacaaagactgctgaaacatacacagcactcctccattcttacgcaggagcaaaattgactaaaaaggctgaggaactttatcaaaggataaaggattcaaacctttcctttgatgcccttacttcccacgaaatgatgactctttacatgtcagtggggcagtttgaaaaggtcccatcngttgttgaagaactgaaacaacanaaggtttcccctgatatctttacttacaatctatggataagttactgtgccgncattcttatattgatgaagttaggaggattcttgatgaaatgagtcatggtgctggttctaatgaaagttggataagatagttgaacctggccaatatatatattagtgtaggtcatcttgataacgcaagttccaacacacttgttgagactgagaaaaggatcacccaaaggcaatggataacttatgacttcttaatcattctatacggtgggttgggaagtaaggataaacttgatcagatatggaattccttaagaatgaccaaacagaaaatgattagcaggaattacatctgcatcatttcttcctatctgatgcttggtcataccaaagaagtgggtgaagttattgatcaatggaagcaatcaacgaccacggattttgatatgcttgcctgtaaaaagattatggttgcttttagggacatgggcttggctgaaatagccaacaacttgaatatgattctcattgagaagaacctcagtcttggaagtgattaactaggagttctccgagcatgaatgtaatatagaatatatatagatttgagatcaattttgcaaccttcggaagggaaaatatattttactcgcaatttgctaattcacctggaatgaataaatatgctgagcgaatggatgtcatgcaatgcttttgtggatgtacaagatttcatcattgcttctagctttttcatttttatggtgcccttggctagcagcatctttgatgttgtgagaacctttaatttcgcctttttctgattttgtagttatattgctgctggtatttttatatttcttcctaaaaatttggatgtgttttgcattttcattcttctagaactagttgttaaattgaatattttccaacttttactgttatctttttgccggaacttttattcctcaattattatttttatttagatttaatg

SEQ ID NO: 5980 - DNA, 1974 bp, Glycine max
gttatccacctcatcgaccataacactagtgaatgaaataatctctataattgaccgaggaaaacaccgcaaccaaacacaaaattaataataaaaaatcgttcttgacttcttcttaacttccatcgtccatggcggtttcggggttgagaagcggtggtttgcctctcttccaccatcaccaccaccaccaccaccttcgcttccttcaatcccctccttcctttgccaagctcagttttcttggctccaagtcgtcgaagaaggggttcacagtcttctcccgctatgcgcaagcgcgtgaccttttctcctcgcgtagattccaagatagcatggagaagctgccgaacctggtggaggacattgtgcagacatccttaaacactggtccaaggggtgtcctgaggttggctcaaggtgttcaggccttccttggggttggtcaggagtggttaactgatgtctctaagtcagcaaattcatttgctgggttaccgactgaactgcagcttggtttactctcccccttttatttgaggaggttgtttgagcgcatgggtgcaacctatatcaaattgggtcagttcatagcatcagcgccaacgctgtttccacctgagtatgtacaagaattccaaaattgttttgatagagctcctcctgttccttttgaggaaattgaatctatattgcgcaaggaattaggaaagccattagaaagtgtttatgaatacattgacccaacacccattgcttctgcgtctatagcacaggttcatggagcaaggctaaaaggctctagggaggatgtggttataaaggtcttaaaacccggaatagaggacatattagtggcagatcttaattttgtttatgttgttgctaggatattggagttcttgagtcctgaaataagccgaacatcactggttggtattgtcaaagatatacgtgagtctatgcttgaagaagttgacttttacaaggaggctgcaaatattgaggcttttaggagatatttagaaacaatgggacttactgggaatgcaacagctccaaaagtgtatcgatactgcagtacaatgaaagttttaactatgcaaagactatatggagttcctcttactgacctagactccataagttcattagtttctaatccagaaaccagccttataactgctctcaatgtgtggtttggaagtttgcttgcatgtgaatcttttcatgcagatgtacatgcaggaaatctgtggcttctacgtgatggccgtattgggtttcttgacttcggaattgttggtcgtatatcccctaaaacatgggctgctatggaagtcttcttaggatcaattgccattgaagattatgactcaatggcatcttccttaattgaaatgggtgctacaaaccaggatgttgatgctaaggcctttgcaagagatttggaaaaagtattctcatcaattaaggaattggacactgaaatagttgtagcaactacaactggaacagccacaaatgcaactgctgttgctgctaatatagttgttgatgagaggcagatgaatgcactctttcttgatgtggttcgggttagtgaatcatatggattgaagtttcctagagaatttgctcttctcctgaaacagctcttgtactttgaccggtacacacggttgctggctcccaacttgaacatgcttcaggatcagaggatttccattgcttccaatagcagaagcagggtatagagacaatttttaaggagttggtacacaaaatctagatgtaccccatcttagttcaaaatattttatttgtatgattactttggtatataaataaaataatccatagttgtcatgtgagagccaagctcatttggttgggacatttctttgcaagttctcgggatggaattcaacatccttaatagaatattccttcactattaaaaaaaaaaaaaaa

SEQ ID NO: 5981 - DNA, 715 bp, Glycine max
ttttttttttttttttttttcgaaaaataaaactaatccagcagaacattaattaatgttgttgtaacatctaacattatcatacaagttattcaagaacgcacctagccatgctttattgagcaagtaccatcaaagaccagaacaaagaggcataggacgtctgttttatgtagcaaagtaaacaacaaaaacaatttagttacatatttttcccaaaaaaaatcaacacggagggaaatttagaaaccactaaaggactatgcagtgccaaagttgcaaaaggcatttgtacgtaaaagtgacactactcaggtttcacaggtttcgtttctctctttggaggctccaaatccagataagtaaatggctctgttggttcctcaccgggttttgaacgcatgcactgccagaagagcttgaagggtcctggaacagtcttgaatgggtttccctcaaagcaagcctgaataacatcctcgacacggtcattgcagcggtgagctttgggctcaggatgattctctccggtgactccccatggactctctctcctcggcaccggccttgatgagctactcatctttgcttcccaactttaaacaacttttatcctggtgcgatgcggtggatttgcaatgtgtgtcactgacacagagagaaggaaagcaatgtgggtgtgatgtgtgaatggggggggggcctacgtagctga

SEQ ID NO: 5982 - DNA, 2301 bp, Glycine max
cccgcgtccgcttttacataaaggaaaaaagaaaaagagataaagaattcgttccattattatggcctcccttgttccttatctcgtcagctacgtaggcccccccccccccctctctccgtttcccctttagacctctctctcacttgaaactccacaaccccattttcctttcctatgaccctattccaaatcaccaattctaattccattcttcaggtgttcaattgaattcgtgatgaagagggatcaccgagatagctgcggcggcggcggcggagggagtgtgaagggtgagtgttcctcaatgccgtcgaacgggaaggcaaatatgtgggaggaacaacaacaacaacaacaggggatggacgagttgctggcggcgttggggtacaaggttcgtgcttccgacatggccgacgtggcacagaagctggagcagttggagatggtcatgggttgtgcccaggaagagggaatttcccacctcgcctccgacaccgtccactacgatcccacggatctttattcctgggtccaaaccatgttaaccgaactcaaccctgaacccaacaacaacaacaatagcctcctcggtccatcttctctcttaatcgacaacaacaccgcccctgttttcaacgacgattccgaatatgacctcagagccattcctggtattgcagcctaccctcctcctcctccacaagacaacaacaacaacaacaacaacctcgacgaaatcgaaacagctaacaacatcaacaagcgtctcaagccatctccagttgaatcagcagactccgcgtctgagcccacgcgcacggtgctgctcgttgaccatcaggaagccggcgtgcgtctggtccacactctcctggcgtgcgcggaggccgtccagcaggagaatctgaagctggccgacgcgctcgtcaagcacgtgggcatactcgcggcttctcaagccggcgccatgaggaaggtggcttcctacttcgcccaagccctcgcgcgtcgtatctacggaatcttcccggaagaaaccctcgactcctccttctccgacgttctccacatgcacttctacgagtcctgcccttacctcaaattcgcgcacttcaccgcgaatcaggctatcctcgaagcatttgccactgctgggagagtccacgtcatcgatttcggcctcagacaagggatgcagtggcctgcactcatgcaagcccttgcattgcggcccggcgggcccccgactttccgtctaaccggaatcggcccgccgcagcccgacaacaccgacgcgctgcagcaagtgggctggaaattagcccaattggcccagaacatcggcgtccagttcgaattccgcggcttcgtttgcaacagcctcgcggatctcgacccgaaaatgctcgagatccgacccggagaagccgtcgctgtcaactcggttttcgagctccatcgtatgctggcccgccccggatccgtcgacaaggtcttggacactgttaagaaaatcaagccgaagattgtcaccatcgtggaacaagaagcgaaccacaacggaccgggttttcttgaccggttcactgaggccttgcattactactccagcctattcgactcgctggagggttcgtcctcttcgaccgggttgggctcaccaaatcaggatctgttaatgtccgagttgtacctggggagacaaatatgcaacgtggtggctaacgagggcgcggaccgggtagagcgtcacgagactttgagtcagtggagggggagattggactcggccgggttcgacccggttcatctcgggtccaacgcgttcaagcaagcgagtatgctacttgctctattcgcaggcggtgacggctatagggttgaggagaataacggctgcctcatgcttggctggcacactcggccactcatcgctacctccgcctggaagcttccctccccgaacgacttgcactgtaaactgtagattaattggctcctggatgggtggtaaataataaaaaatggtttggttgaacttgttcgagtggagtgaatcaatgacccagtgagtcagtgagtcagtgagcgagccagcgaggcagcaagaggataaataaatgagagggtaaaaaaacaaaaaagtaaaaaagaaaaacaaaagactgtaatttgtaattgtgctctcgtaattaccgtttctcctctttagtgtttttttttcctttctctaaattattatataatttgtttaattcttaaaaaaaaaaaaaaaaaacttttctcgagacctgg

SEQ ID NO: 5983 - DNA, 1451 bp, Glycine max
  misc_feature (1250)..(1250): n is a, c, g, or t
  misc_feature (1273)..(1273): n is a, c, g, or t
  misc_feature (1290)..(1290): n is a, c, g, or t
  misc_feature (1312)..(1312): n is a, c, g, or t
  misc_feature (1387)..(1387): n is a, c, g, or t
ttttttttttttttttttttttttttttttcgaaaactaaaaactaatccagcagaacattaattaatgttttgttataacatcaaacattataatataagttattcaagaacgcacctagccatgttttattgagcaagtaccaccaaagaacagaacaaagcggcataggacgtctgttttatgtagcaaagcaacaaaaacaatttagttacatatttttctcaaaaaaaaaaaatccacacggagggaaatttagaaaccactaaaggaccatgcagtgccaaagctgttaaggcatttgtaagtaaaagtgacactactcaggtttcacaggttccgtttctctctttagaggctccaaatccagataagtaaatggggctgttggttcctcaccgggtttggaacgcatgcactgccagaagagcttgaaaggtcccggaacagtcttgaatgggtttccctcaaagcaagcctgaataacgtcctcgacacggtcattgcagcggtgagctttgggttcaggatgattctctccggtgactccccatggactctctctcctcggcaccggccttgatgaactactcatctttcctcctttctcctctctctctctctctctctctgttttctctctctcgtctcacttgaaactccacaacccaattttcttttcctatgacccaattccaaatccaaatcaccaattctaattccattcttcaggagttgaattgaattcgtgatgaagagggaccacaaagatagctgcggcggcggcggcgccgccggagggactgtgaagggtgagtgttcctcaatgcagtcaaacgggaaggcgaagatgtgggaggaagagcaacagcagcagcagcagcaacaacagcaacaacaacaacaggggatggacgagttgctggcggcgttggggtacaaggttcgtgcttccgacatggctgacgtggcacagaagctggagcagttggagatggtcatgggttgtgcccaggaagacggaatttcccacctggcctccgacaccgttcattacgaccctacagatctctattcctgggtccaaagcatgttaaccgaactcaaccccgaacccaacaacaacctcgatccatcttctttcttgatcgacaacaacaacaacatcatcaacagcacagcccctgttttcaacgacgattccgaatatgacctcagagccattcctggcatagcagcctacccttctnctcttcctcaagacaaccacctngacgaaatcgaaacggntaacaacatcaacaagcgcctnaagccatcttcagcggaatcagcagacttccgccgcgtctgagcccacgcgccatgtcgtcctcggttgaccatnaaggaacccggccgttccgtcttgtccaacacttttcctggcggtgccccggaaggccgtttca

SEQ ID NO: 5984 - DNA, 1738 bp, Glycine max
tcggctcgagcaaaactccccttcttggtcttcttctcttaatcctctccaccacattcgaagggaacgttacaaaaaaatcaccattttttctcattgttaatcaagttaagataagatcattcctctctatcaacaaacctttattgtgtatatatatatatattcccacaattcacatcactcttgtccttcactcattcactctatatatccacttcatataatttcctccacattgtgcaccgttcatggtgatggcaaaactaaagcacccttcattggtggcacttcttctagtactagcgtgtctttttattgctccaacatcctcaacatccagaaaaacaagtttcaagcagcagcacccttgcccaacaacaaatgggttccgagtcatgcttcgccacgtcgattcgggaaaaaacttaaccaaactagagcgtgtccaacacgggatcaagcgtggaaagagcaggcttcagaagcttaatgcaatggtgttggcagcatcatcaacacctgattctgaagatcagttagaagcccctattcacgcaggaaatggagagtacttaatagagttagccattggaacaccaccagtgtcttaccctgcggttttggacactggcagtgaccttatatggacacagtgcaagccttgcacacggtgttacaaacaaccaacacccatttttgatcccaagaagtcctcttctttttccaaggtttcatgcggtagtagcttgtgcagtgctttgccttcttcaacatgcagtgatgggtgtgagtatgtttattcatacggtgactattcaatgacacaaggcgttttggccaccgagactttcacttttgggaagtctaagaacaaggtttcggttcacaacattggttttggttgtggggaggacaatgaaggtgatggatttgaacaagcttcagggctggttggtcttggacgtggtcctttgtctttggtttctcaactcaaggaacaaagattttcttattgtttgaccccaattgatgacacaaaagaaagtgttttgttgttggggtctttgggtaaagtgaaagatgcaaaagaagtggtgacaacacctcttctcaaaaaccctttgcaaccttctttttactatctttctcttgaagctatctctgttggggacactcgattgtccattgagaagtccacttttgaagtgggggatgatgggaatggtggtgtgatcatagactctggcaccacaatcacctacgttcaacaaaaggcctttgaggcactcaaaaaagagttcatttctcaaaccaaacttcctttggacaaaactagctcaacagggttggatctttgcttctctctgccatcagggtcaacacaagtggagattccaaagattgttttccatttcaagggtggggatttggagcttcctgctgagaactacatgattggtgactccaatttgggtgtggcttgtttagccatgggtgcttctagtggaatgtctatattcggaaatgttcaacagcagaacattttggtgaatcatgatcttgaaaaggagaccatttcttttgttcctacgtcgtgtgatcagctgtgagtgtgtgatattcactatatgtttttattgctttgtttgtttgatgatgttctgttgccgaactcgtattgctatgattgaatctcttagttgttgcaataatatgaacattttattctctgtcc

SEQ ID NO: 5985 - DNA, 2656 bp, Glycine max
  misc_feature (2612)..(2612): n is a, c, g, or t
  misc_feature (2615)..(2616): n is a, c, g, or t
gaataatgttgattcttatctgccagtctgctactacttaggacaattttgaagtgtaaaactgggtttgcttctattacctcgcgtccgtattattattaatttcatttttccatagccgccttatgtgattctcgcgttctttcttttattcagctccccatagcttcttcttcttttgcacaccccagattccgcgaaacccacctttccttggttctcagtggaaggttttgttcttttgtcttttcttctgtttgggtgaattgggtaatctgaattttcaacaacaaacaattattaagttccatggttcagtcttggattccttgcctgctggctccttgaggtgttttgtccgattgggtggtgttcgaggttttggagaaattaaggaaacactgcacacaacacaactgtaacttcatccaaggcaataacttctctttcacgtcgatcttttgctctcactgtcagaatttgaacttgccttttttattcagaatctcaattcaattcatggtggctcaattttgctgaattgggctaacacctttgattcatcgctgtgggatcttttggtcaatattttggaactgtgaagatttgtgttttaggctaaatatgatgcttgagcaggactgtgctggttttatttagtagttttatgcactagggtgcttctgtgttcctacaaggaaatgcttttcctattggattgcactgtttagttaggcatggctttcactgcattatcctttggtgctgttgctgcaactgtcaacaatttttggctccgtgcctcgcgtccggtcaaaggattgtggctctgattgggtggcgcattcatattctagtcatggtcaggatctgttctacataaacggcaatgtagtaaacaaagttgctttctgtgaggctctcaaattgtatattgcaaaggggtgtgatgtgaaggactactttggaagtgtcaaatgtgtgatggatgactcttttgtgactttacctttaaaggcagggaggaaacttttgaaggatttgagcagtgaatccacaccacagagagattctaagcctatgtcatccaacgtagttgttattggtgcagggggagctttgttggtgtgttgtgctgttctttgtccttgtttctatgccaagagacgtaaagcaacttctcatgctgttctgtccaaggacccaaattcaatggattcggtttcctccgaagcctccgttaatgataagattcctgccagtccacttcgggtgccgcctagtccgtcaagattctcaatgtctccaaaactcactagacttcaatcattgcatctcaatctgaaccaagttacaagagctacccaaaacttctcagaaacattacaaataggagaaggaggttttggaactgtctacaaggccaagttggaagatggcctggttgtggctgtaaaacgtgcaaagaaggaacattttgatagtttgagaacagaattcagcagtgaaattgaacttttggccaaaattgatcatcgaaacctggtgaagctactaggttatattgacaaaggaaatgaacgccttcttattacagagtttgtgccaaatggtacccttagagaacatttggatggtatgcgtggaaaaatcctagacttcaatcaacgcctcgaaattgcaattgatgttgctcatggcttgacctatctgcatctgtatgcagaaaagcaaattatccatcgagatgtgaaatcatccaacattcttctgacagaaagcatgcgagctaaagttgctgattttggatttgcaaggctaggaccagtgaacactgatcagacacacatttcaaccaaagtgaagggaacagttggttatttggaccccgagtatatgaaaacataccaactcactcccaagagtgacgtttattcatttggaattttgcttttagaaattgtgacagcccgccgtcctgttgagttgaagaaaactgttgcagagcgggttacactcagatgggccttcaggaagtataatgaaggaagtgtggtggaacttgtggatcctttaatggaagaagctgtaaacggagatgttctgatgaaaatgcttgatttggcgtttcaatgtgcagcccccattcgaacagatagacctgacatgaaatcagtgggcgagcaattgtgggcaataagggcagattacctcaagagtgcaaggagataataagtggtggtatttggtgatgatattgtgaggtggcaaccaattgaagctgtctcagaatacaagacctgaataaaagtaacaaacttagacaaaaaaaaaaatgtacaccgaggaacttccttatcttgccactggagtacttttttctgtgtagagttggcactggattttgtaatatatgaatttgttctttaggatgaagagcaatagctaatttgggtgaattcattatctatggttgtgccagttttcatgttataggaattcactagtgaaaaatggctactacaaaaatgcgtgaattccagaacttaattgctaaatggatcggttgcaatttgtcacaatggtaaatgatccttctccatcccccttcnaannaagggcggccgccgacttgaggctcgtcgtcccgaaaata

SEQ ID NO: 5986 - DNA, 1948 bp, Glycine max
cgataaactaacaacgtccctatttccggtttcaaattccctccggcgacacattcggattccaatatgaggacccgtttatcctcgactcgggtcatcttcgtggcctcgctctgtttcctcgcaagcttcgaattattgcaagccaaaaccatcgacccctacaaggttcttggggttgataaaaatgcaagtcagcgggaaattcagaaggcttttcacaagctatctcttcagtatcaccctgacaagaacaaagccaagggtgcacaagagaagttttctcagatcaataatgcatatgaacttttatccgatgaagagaagagaaagaattatgacttgtatggagatgagaaaggaaaccctggatttcatggtggccatcctggaggtcaggatggatatacttattttacagggggtggtcctggacaaagccattttaacttcaaaccagggggggactggcagggtatgggtggtcagggaggatctaagtcattctccttttcttttggcagctcgggcaattccaatccctttggatttggcttggatgatctttttggcagttttttcggtggtggaggtggtgggagtcagtttggtggttttggcagttcagccaagtctgggtccaagagttctgccaaaagtcttagagctgtaaattcacagatttacaagaaagaaatacaaaatgcaggaatgacttggcttttgttatcttatataccctcatcgaaggggatccaatactttgaatccactacagaggaggttgccagttcattgcagggagctttgaaggttggaagcataaactgtgaaaaggaagtctcattctgtaaggagcttggcatatatccacggagagctcctaggctttttgttttttcttataaggagaatgaaaaaggttctttggtggagtacagtggagacttggatgctaagaatttgaaggctttctgtcaagaacacttgccaaggttttcaaaacgaaccgacttgaatcatcttgatcaattcagcactactggaaagttgcctagggtgctgcttctttccaccaagaaggacactcctgtaatttggcgtgtccttagtggcttgtatcacaaacgcattactttcagtgatgcagagcttcatgatgttgctgatcctagagtgaaaacactagaagttgatgcacttccagctatagtaggttggctaccaaatggagaaaagcgtatcctgaaaactgggatatctgtgaaagatttaaaatctgcagttcttgatcttagtaacatacttgatagttttgaaaaagtaagtaaaaaggaatcatcaggtcaggccaagaaggcacaaactgactcagacgagggacgcataccattactttctaaatcaaactttgaggctctatgtggtgagaaaactccagtctgcataattggtgccttcagatcttctaaagctagagaaaagctagaatcaatcctctctttggtctctcaaaaatctttgtcaagacgaccaagtcagggatccagcagctctagggactccattttctatgttctcttagatgctgcgaagcaaaaatcatttctaaaggcatttgacaaaacagattataaatcatcaaataatttgttgattgcctacaaacctcggagagggaagtatagtgtatttatgggcgaaatgacaatagaggaggcagagaagttcattagctccgttctcagtggagatgtacccttcagagaaacaagtaggaagcctgtactagagtattagatcataaaattgggttttgcactgttttggatgcatgctcatgtacatagtcaaagagatcataaaattgggttttgcactgttttggatgcatgctcatgtacatagtcaaagagatatataaaatattttgttttgtatcccaaaa

SEQ ID NO: 5987 - DNA, 1489 bp, Glycine max
tcagctacgtaggcccccccccccgagtgtggtcctcttgaaattgattgtttgataccactttacttcttatcctacacacattatgattcttctccttatcctgcgcatcccttcagctactttgttcaatagagacaaaagtccacacaccaaaaaatgacttacgctcccatctgctaccaatttcaccattctcatcctccaaagttgaaccataatttcaaatccaaccaagagacaccatgtcatcaagtggaaccatttggagctatgaggaagaaaaagcatttgagaatgccatagctatgcattggattgaggaatcctcaaaagagcaatgggagaaaattgcttcagcagttcccagcaaaagcatggaagatgtgaagcaacattaccaggttctagtagaggatgtaagtgcaatagaggcaggtcacatatcattcccaaactatgctgcttctgaggaaatcacatcttcaaataaggactttcatggctcttccaaggccacaagctcagataaaagatcaaattgtaattatggacgtggtttttctgggttaggacatgactccaccactcatagtagtggtaaaggaggcttgtcaaggtcatcagaacaagaaagaagaaaaggaatcccatggactgaagaggaacacaggttatttttacttggtctagagaagtttggaaaaggagattggagaagcatttcaaggaactttgtgatatctaggactcccactcaagtggcaagccatgcacaaaagtacttcataaggttgaattcaatgaatagagacaggaggaggtctagtatccatgatatcactagtgtgaacaatggagatgtggctaataaccaagcacctattacagggcagcatagtagcacaattccttcaaacacaatgggtgtaggacaatcccttaagcatagagttcagggtcacataccacctggtttaggcatgtatggaacaccagttggacatcctgtggctgctcctccagggcacatggcatctgcagttggcactcctgtcatgcttcctcctggaccccacccccatgctcatcctcatccaccttatgttcttcctcttgcttacccaatggcacctccaacaatgcatcaataacaactctttttttctctttcttatttgtagttaggtttttttcttctttcttattagtatggaattaaaatcctttctgtggaaattcataaatatgttgttttaaattaaattctactcttagtttaagcaaggaaattgttgaatggatccaatggtacttagtttatgtcagtatagagttagtttaaatgccaaccccttttttccaatgtagatgtaatcctaagaattgccttgtggtgtatatggagatagatatggatttaaataccaaggaaatgaatttctctttatcatcaaaaataaaaaataaaaaaaaaaaattacctttc

SEQ ID NO: 5988 - DNA, 1493 bp, Glycine max
ggatcgaacaagaatctctggttccgtagaccagcgccttttccattggtcatgaagtccttttatctactgtttgtgattaacagtaataaaattaattcagttcttttcattcaagttaagttgttccattctttgccaccttttgccgccgagtgatcgaaccgaaccaacgaaccaggctcgcgagctgcactgctccgcgcgtgctcgagccgacaagtttggtgacgactcacttctgcaccgagccacctccaactacactttttttattattattctctgccggcgtggctttctttcttcttttataaaagtcatatcataatcataataatattaatcgagttttccgcagagaaaaaaaggggtcgaacgagtgaatcagaacataagtgaagactgcgaatataggaacccaatcctaattctattgaatttttatttttagcggtggaaattcatcatcgatcgcatctattccataaatagcaaatagaaaacaatgggtaaaaagcaatcttttcggagcaaagcagcctacttcgtttctgatctcaccactggtcttctcaaccctatttctgacaacaacaacaacaacaacaaacccccttctctccctccttccggagaagaagaaaaagaagatgtgggtgagtcaaagggtggtagtgatgatgtgataattgatgggcctgatacttcgtccttcactgcgtttctctattctctgttgtctacttcggattccggggataaagttggtgaagctgataagaagaatgatgatgaggtggcaggtgatgactctttactatcagactcagccacgaaggaaagttttgttgtgaagaaaagtttgttttccaggagcaaacattcacttggtagggccattcaccaaatgggtggatttagcaacagggatagcaattacaccgacgaaggtggcgttgagatgaagcgcattgtgaaagagccattggctgtggctgtgtctggggttggtgatcatctgcctcaaatttctgagccttcaatgcttgtttccgagggtgtgcgaaatgcggtgtatgcttcactgccggcacttattcgtggccggaaatggtttatgctgtacagcacttggaaacatggtatatcactttcaactctttaccggcgaagcatgctttgtcctggaatgagcttgctggttgtaggagatcgtaaaggggcagtgtatggtggcttggttgaagctcctctaagaccatccaacaagagaaaataccagggaacaaacaattcatttgttttcacaaacacctctggttgtcctgttatatatcacccaacaggtatctatttttcattgagtttgaatattccattctttatcaaaatcaatgattagtttgatctatttgtcaataacttgtattgaatgaatagctaaatcaagaaatgaacattttaaaaaaaaaaaaaaaaaactcgctcgt

SEQ ID NO: 5989 - DNA, 1042 bp, Glycine max
gtggctaaagaggtcaagcatccattcaggaatcttctcaagcgcaggaaccgaccccaacgtgtcatgtccgttgccccccagcgtgtccagcagctcccaggcatcaacgcaatcatgttttatgccccggtgctgttcaacacgttaggattcaagaacgatgcatccctgtattctgctgtgataactggggctgtgaacgtgctctccactgttgtatcgatctactcagtggacaaagtgggacgtcgcattctgttgctggaagctggtgtgcagatgttcttgtctcaagtggtgattgcaatcatactgggaataaaggtgacggaccattctgatgacctttcaaaaggcattgcaattctggtggttgtgatggtctgcactttcgtgtcttcctttgcatggtcttggggtcctcttgggtggcttatccccagtgagactttcccattggagactcgttccgctggtcagagtgtcaccgtttgtgttaacctgctcttcaccttcgtcattgcacaagccttcctctctatgctctgccacttcaagtttggtatcttcttgttcttctctggctgggtcctcgtcatgtctgtcttcgtgcttttcctgttgcccgagactaagaatgtccccatcgaagagatgaccgagagagtgtggaagcagcattggttctggaagaggtttatcgatgatgccgcggatgagaaagtagcccatgtctctaatggtaatggatttgatccaacctccaggttgtaaatcatttgcattgagtattttagactctagagtaagtacagtacatgcttatgtgggttagtaacaaattaagcaagttatttttttatttcccccaccccatccatgttggtggcctaggcctgcaacaacattctaatcagttaatccaacattgattatcctgttttgcaagccatataagatacagttttttccacccacccttttctttttgtaaattgtttctttgaaaggaataatatatattgatttccaattttaa

SEQ ID NO: 5990 - DNA, 1089 bp, Glycine max
tctcaagtgtttcctgagtctgaacggaatcccacttaaaagtcgttctccttcctcttcgcagctgttatatagtactattttcatttcatatgtttatgcacctctatatatacatagacacatgtaaatggttgcaaaggaagataagataggtaccagctatcacatagtttatttaatccgttatatgccacctgatatataggcatattagctagttaggtaggtatagtagtttaagttaattcaaccatggaagacagggatcactgttgttccaacaattcaacgatgatcacaacaacaaagaaaagaacgggtagaagaagtccaacatcggataagctcaagaatcaacaccgcgagaagcagtcgatgaaaccttaccgtggaataaggatgcggaagtgggggaagtgggtggcggagatcagagaacccaacaaaaggtcgaggatatggttgggttcttacacgacacccgtggccgccgcacgtgcctacgacaccgctgtcttttacctccggggtcccaccgcgcgccttaacttccccgaactcttgttccaggacgacgaccaggagggcagtgattcggtgcagcacggcgcagcagggaacatgtccgctgattccattcgccgaaaagccacgcaagtcggcgccagagtcgacgctctccaaaccgcgcttcaccaccacgcgccaagtaccaactctctcaatctcaagcccgacttgaacgagtttccaaaactcgaagagcttcaagattgatataaatcaaatatcaatatcaatcaatatatttaatttcctaagttctttattaatatatagttttatgtgtgtatatatagatgatgatgcctcggagttggggcttgaaactaattaaccccttcccttccccttaatttagatatatcccttttcttgtttttccgtatcttcaatcataatatcaaatcaaagaagtattattattttctaaaaaaaaaaaaaaaagatatattattatcatatggttttgatacggtgtaacgtaacaattactaacatattaagtggccagtattcgtggtg

SEQ ID NO: 5991 - DNA, 1153 bp, Glycine max
  misc_feature (1073)..(1073): n is a, c, g, or t
  misc_feature (1126)..(1126): n is a, c, g, or t
  misc_feature (1137)..(1137): n is a, c, g, or t
aagaaaaattatcacatgagaggagagagggaagaagagaagattttcatcagttgagttgagagaaggaaagggaaaatgggtaaggatctgagcgaggaacaagtgtcttccatgaaggaagccttctctctattcgacactgacggagacggtcggatcgctccgtcggagctggggatcctgatgaggtctctgggaggtaacccgacgcaggcccaactcaaagccatcgtggctgaagagaacctcacggcccccttcgacttcccccgattcctcgatctaatggccaaacacattaaacccgaacccttcgatcgccaactccgcgacgccttcaaggtcctcgacaaggactccaccggcttcgtcgccgtctccgagctccgccacatcctcaccaacatcggcgagaagctcgagccctccgagttcgacgagtggatccgtgaagtcgacgtcggatccgacggcaagatccgctacgaggatttcatcgccagaatggtcgccaagtaacgccgattccattctctctttccagtgttattttctctctttctttcgcttttggttgtttgcttttcagtggaccaattaatagattaatcaattgtcttgtgtttactttttattttatggtgtgtggctaaccgagggtggttttaggaaacggtggctagctactcaatttgccctatttgctttgggttttatttgtattattatgagatctgattctgagctagtctatatatgcatgctgtaattcagaccaagtatttgcgtatctaatcctttatttcttgtttgatcaaccccgtgtttctgatttcgagcgaagtggaatgaggaagtagagactagagagagggcgctgctaggtacaaaattatcaaataataatcaaaccctactccgtgtaaaattcgtacactatataaatgtccgcatgcctgttggatttcttgttcgtttgaattatgtttgaaagtccggaaatgaattatttgaaaggcatttcctcccgtttgctgcatatttttctagttgcatctgacttttcttgnttaaggaagagtgaaatgcataccactttccttagaaaaataaattattatantaaatactttntttgaggaaatttatc

SEQ ID NO: 5992 - DNA, 481 bp, Glycine max
attcggctcgagcatcagttgagttgagagaaggaaagggaaaatgggtaaggatctgagcgaggaacaagtgtcttccatgaaggaagccttctctctattcgacactgacggcaagatccgctacgaggatttcatcgccagaatggtcgccaagtaacgccgattccattctctctttccagtgttattttctctctttctttcgcttttggttgtttgcttttcagtggaccaattaatagattaatcaattgtcttgtgtttactttttattttatggtgtgtggctaaccgagggtggttttaggaaacggtggctagctactcaatttgccctatttgctttgggttttatttgtattattatgagatctgattctgagctagtctatatatgcatgctgtaattcagaccaaaaaaaaaaaaaagaaagggcggcccgcgacatggggagctcaaaaaaaaaaaaaggggggc

SEQ ID NO: 5993 - DNA, 2277 bp, Glycine max
ccacgcgtccggtggccaactaagaagccttactctctttttctcatcagcatcatcatggaaccaaaagaaagaaagtaaaataagtattagtactaatataaatcccacaaaacaaagaaaattataaatccttcaaaaggggaaaggtagctagaggaaaagtaactccacacaacacatcacagcctaagagaattggattctaagctctagagagagagagagagagagagagagagagagaagaaagaatcatgtggtgctggaaaggagacggaggctagaagaagaagaaaaaaagaagagctagagagagggtaccctcttgttaatttgcactgtttttgtgtctgttgctgcacttttaggagttcttctattctaacaacctctgccaaccaacacaagcctgaaaataaaataaagatgctgcctccttgctggagatcgttcgggaagaaacagtaatgctactgacatgggaaagaaggggagttggttttctgcaatcaagagagttttcacacaccactccaaggggaagcaggattcagataataacaaaggcacaaaagagaagaagaaaagtctaggaaaactaaagcatggagagaccaattcattcatccccctcttcagagagccaagcagcattgagaaaatcttcggggacttcgaaagggagcaacaattactggggttaaggcctgccactcctccggagagacctaaaacaccaccttatgtccctccaagagctccttctcctagacctccctctccgagggctccttctccaaggcctccgtctccaagggctgcttctccgagggtggcttctccacgagttacctctcccaaagccgcgtcttcccggattgctcatcaccacaaggaggttggctacagaccagagccaactttgaggcaacagcatgccacagctactaagatccagtctgtttacagaggctatatggccaggaggagttttagagctctaaagggtctggtgaggcttcaaggagtggtaagaggacagaatgtgaagaggcagacagtaaatgccatgaaacacatgcagctgttagtgcgagttcaatctcagattcagtctcgaaggatccagatgttggaaaaccaggcacgatatcaagccgatttcaagaatgataaggatgcagccagtatcttgggcaaactcacttctgaagcaggcaatgaagagtgggatgatagcttactgaccaaagaggaagtagaggcaagattgcagaggaaggtggaagcaatcatcaaaagagaaagagcaatggcatttgcatattcacatcagctatggaaagccactccgaaatcaactcacaccccgatgacagatacacgatccagtggattcccttggtggtggaactggttggaaagacaaacacctgcagcaactccacaagaaagacaaagcttgaagaattttcaaatcacacctccaagaccatactcagagcaaaagactagtccaagacctggctccagcactcaaaggcagccgcagtcgcagcagcagcagcctcatgtttcctttgataatatggacactcccacaccaaagtccacaaaatcaaccatagtggcatcttcaaaaccggtgcgaatgcctccatttagaactcctcaggctaacagctcaggctcaggctctaaatatccgagaccaagggatgtagggtccaattcaccctttgatttgccattgaaggatgatgacagcctcacaagctgcccaccattttcagtgccaaactacatggctccaaccctttcagcccgggccaaagcacgtgctagtagtaatcctagagaaaggcttggtggaactccaactagtactgattcaaagaggaggctctcattccctttatcacaaggaattggatcattcaagtggtctaaagggttctcaagcaaggatcaaagggtgccagacaaatttcagtcacttgaatctataggaaatgtgagtgtggattcaacggtgtctttgcctgcaagggtggtgggaagaaagccttttacaagatttgtgtgatttattctgttctattcttttcttcctttttttttaaccattttattttgtccatgttggtggtgctatcagttacattatgattatgatttgagtgtattggtgatagtttgataacaggtatacccgttgtaaactaataaaaacataatagaaaatgatggtttggtaaaaataatagaaaaaaa

SEQ ID NO: 5994 - DNA, 2156 bp, Glycine max
cccacgcgtccgcccccgcctccacgcgctaggtggctagaggaaaagtaactccacacaacacaacacagcctaagagaattagattctaagctctatagagagagattatctgagaaatcttagccagccaaggaggaagaaagaatcatgtggtgctggcaaggagagggaggctagaaagaaagaaaaaaagaaagagctagagagagagggtaccctcttcttaatttgcactgtttttgtgtctgttacagcacttttaggagttcttctattctagtaacctctgccaaccaacaaaacaagcctgaaaataaaatagagatgctgcctccttgctggcgatcgttcgggaagaaacagtaatgctactgacatgggaaagaaggggagttggttttctgcaatcaaaagagttttcacacaccactccaaagggaaggattcagataataacaaaggcacaaaagagaagaagaaaagtctaggaaaactaaagcatggagaggccaattcattcatccccctcttcagagagccaagtagcattgagaaaatctttggggactttgaaagggagcaacaactactggggttaaggcctgccactcctccggagaggcctaaaacgccaccttatgcccctccaagagctccttctcctaggcctccctctccaagggttccttctccaaggcctccatccccaagggctgcttctccgagggcggcttctccgcgagttacctctcccaaagccacgtcttcccggattgctcatcaccacaaggaggttggccacagaccagaaccaactttgaggcaacagcaagcctcagctactaagatccagtctgtttacagaggttatatggccaggaggagttttagagctctaaagggtctggtgaggcttcaaggagtggtaaaaggacagaatgtgaagaggcagacagtgaatgccatgaaacacatgcagctgttagtgcgagttcaatgtcagattcagtctcgaaggatccagatgttggaaaaccaggcacgatatcaagctgatttcaagaatgataaggatgcagccagtatcttgggcaaactcacttctgaagcaggaaatgaagagtgggatgatagcttactgaccaaagaggaagtagaggcaagattgcagaggaaggtggaagcaatcatcaaaagagaaagagcaatggcatttgcatattcacatcagctatggaaagccactccaaaatcaactcacaccccagtgacggatacacgatcaggtggattcccttggtggtggaactggttggaaagacaaacaccagcagcaactccacaagaaagacaaagcttgaagaattttcaaatcacacctccaagaccatactcagagcaaaagactagtccaagacctggctccagcactcaaaggcagccgcagcagcagcagcctcattttgcctttgataacatggacactcccacaccaaagtccacaaaatcaaccatagtgacatcttcaaaaccggcgcgaacgcctccatttagaactcctcaggcaaacggctcaggctcaggctctagatatccgagaccaaggggtgtggggtccaattcaccctttgatgtgccattgaaggatgatgacagcctcacaagctgcccaccattttcagtgcctaactacatggctccaaccctttccgccagggccaaagtacgtgctagtagtaatccaagagaaaggcttggtggaactccaactagtactgattcaaagaggagactctcattccctttgtcacaaggaattgggtctttcaagtggtctaaagggttctcaaacaaggatcaaagagtcccagataaatttcagtcacttgaatctataggaaacgtgagtgtggattcaacggtgtctttgcccgcaagggtggtgggaagaaagccttttacaagatttgtgtgatttattttgttttattcttttttttaaccattttattttgtcaatgctggtggtgttatcagttacattatgattatgatttcagtgtattggtgatagtttgatgacaggtatacccgttgtaaactaataaaaacaaaataggaaatgatggtttggtaacttcaaaaagacaaaa

SEQ ID NO: 5995 - DNA, 1338 bp, Glycine max
  misc_feature (57)..(57): n is a, c, g, or t
tcgagtcagctacgtagggccccccccccccggagcctgcgactcttgttcctttanccaatcaatgcaaaaaagtttttctggttggcgatccagctcaactgccagctactgtaatttcagacgttgctaagaatcatggatatggcacaagcttatttgaaagattgaagcaggctggttatccagttaaaatgttgaattcggctcgactcaatacctaatgcatcctgagataagaagctttccctctagagagttttatgaagactccttggaagatggggatgaagtcaaatcacggacaatacacgcatggcatgattaccgctgctttggccccttctgcttctttgacattcatgagggaaaagaggctcggccacctgggagtggctcatggataaatgttgaggaagttgactttgttctattcttgtatcaaaaacttatttcactttatccgacactgaagtctggtaaccaagttgcaattatatcaccctatagtcaacaggtcaagctcttccaaaaacgttttgaagatacctttggaatgtcagctgagaaaatagtggatatatgtactgttgatggttgccagggacgggaaaaggacattgcaatattttcatgtgtcagggcgagcaaagataaaggtatagggtttgtggaggatatccggcgaatgaaagttgggatcactagagcaaagtctgcagtgttggtggttggatctgcctcaacattaaggaggagtgaacaatggaacaagctagtggaaaatgcagagaaaaggaactgtttcttcaaagtttcacagccatattcctcattcttcagtgatgaaagtctgacatccatgcaaacaaaggtggctgaaccatcacaagtgactggacctgatgatatggtagataatgatgtgcagcctgacaatgctgcagcatttgatgctcaagcacaaactgaggacaatgacgatggagaaggcgacatcgacatgaatgatgcaggttttgacgacgattaggatttagatatatgtttcacattatttgatctgcatccattccaatgcctagtgctgtagcttccacgtttttatctttgattggacgtggaaatcttgttttacgtgcatctttgacacctgcccaaacacacttgttaaatagatgtgtagttgagcaaactggtataatttatgtttttttttcctgtaatgaggacaaggaaaattgtaacctgcaccagcttgaacagtggatactgagaaatgatagcatgtcatatttaatgcagaaaagggtccctgaaatattggtcaccaaaagt

SEQ ID NO: 5996 - DNA, 1905 bp, Glycine max
gcgggggcgcccgtgcgggccccgccggggtcgccccgccagccgcccctgcaggaaaattaatgcccctttcattttctctgcatctgtagtatctatcaccaatcaattccactcttcttcccatcaaacaacaaaaaatcaatctgggaaacaaaaacaaaatgccgtcattagaggaggaactcttcccatcaaccccaggaaagttcaagatcgagcggtcccaccacatgaaccgccaactctatcgctgtttcgcctccaccagcaccatgttcctgtgggccctcttcttaatcgccctcaccgcttcctatctcagcttccaaggcttcgtcgattccggcagccgctacctcaccgcctcctggggcgggatccagtgggagaagcaggtccgcacctccgcccagatccaccgtcaaggcggcatgtccgtcctcgtcaccggcgcagccggcttcgtcggctcccacgtctccctcgccttaaaacgacgcggagacggcgtcgtcggactcgacaacttcaacgactactacgatccgtccctcaaaaaagcccgcaagtccctcctcgccacgcacgacgtcttcatcgtcgaaggcgatgtcaacgacgcgaaactcttggcgaagctcttcgatgtggttgctttcactcacgtgatgcacctcgcggcgcaggctggggttcgctacgccatggagaatccccactcgtacgtccacagcaacatcgcgggcctcgtcacgcttctcgaggcctgcaaaaccgcgaaccctcagcccgctatcgtctgggcctcgtccagctccgtctacgggctcaacgagaaggttcccttttccgaatcggaccagaccgaccagcccgctagtctctacgccgcaacgaaaaaggccggtgaggaaatcactcacacctacaatcacatctacggtttatccatcaccggtttgagattcttcaccgtgtacggaccctgggggagacccgacatggcttatttctctttcaccaggaacatcttacaagggaaacctattaccgtttaccgcggtaaaaaccatgtcgacctggctagggatttcacctacattgatgatattgtgaagggttgcgtcgggtcgttggatacttcggctaagagtaccgggtcgggtgggaagaagcgtggacccgctccgtatagaatatttaacctggggaatacttcgccggttactgttcctactcttgtgagtatattggagcggcatttgaaggtgaaggcgaagaggaatattgtggacatgcctggaaacggtgacgttccgtttactcacgcgaatattagttcggcccggagagagctcgggtacaagcccacgaccgatttgcaaaccgggttgaagaagttcgtcaagtggtatctttcctattacggctacaatcacggcaaacctgtaaattaataaattttgttttgtttcctttttattcgggaagggttttttttttctttttcttttttagtgtggtaggttttaagtcacagatagaaaaaaagaagaagaaagaacctggtcaagaagaagaagggaaactggattaaaaggaagaaagaaaagagggggaaaaaaagagaaaagaaaagaaaagaagagaaggagaagatttacattctttacttgggaggccagctaaaacagctgttgttccttcgttgatttcttttcttttttggtattaattggtgttttttgtattttattttttacattttcttattctgtaaagaaagaaagttcgagttcaacctcgatttatttagttgttgtttatatttaaatttaaatgtttactttgtcctaaagttgattagagcgagaaatgcgttgcaccgtaattttcgtttgg

SEQ ID NO: 5997 - DNA, 1795 bp, Glycine max
cccacgcgtccgacggctgcgagaagacgacagagggggaggtgcaggaaaattaatctccctttcattttctctgcatctgtactctccaaaatgccgtccttagaggaggagctcttcccttcaaccccaggcaagttcaagatcgagcgggcccaccacatgaaccgccagctctaccgctgcttcgcctccaccagcaccatgttcctgtgggccctctttttaatcgccctcaccgcttcatatctcagcttccaaggcttcgttgattccggcagccgctacctctccgcctcctggggcgggatccagtgggagaagcaggtccgcacctccgcccagatccaccgtcaaggcggcatgtccgtcctcgtcaccggcgctgccggcttcgtcggctcccacgtctccctctcgttaaaacgacgcggagacggcgtcgtcggactcgacaacttcaacgactactacgatccgtctctgaaaaaagcccgcaagtccctcctcgccaagcatgacgtcttcatcgtcgatggcgacctcaacgacgccaagctcttggcaaagctcttcgatgtggtcgctttcacccacgtgatgcacctcgcggcgcaggccggggttcgctacgccatggagaatccccactcctacgtccacagcaacatcgcgggcctcgtcacgcttctcgaggcctgcaaatcggcgaaccctcagcccgcggtcgtttgggcctcgtccagctccgtctacgggctcaacgagaaggttccattttccgaatcggaccagaccgaccggcccgctagcctctacgccgcaaccaaaaaagccggtgaggaaatcacacacacctacaatcacatctacggcttatccatcaccggtttgaggtttttcaccgtgtacggaccctgggggaggcccgacatggcttatttctctttcaccagaaacatcttacaagggaaacctatcaccgtttaccgcggtaaaaaccatgtcgacctggccagggatttcacctacattgatgatattgtcaagggttgcgtcgggtcgttggatacttcggccaagagtaccgggtcgggtgggaagaaacggggacccgctccgtatagaatatttaacctggggaacacgtcgccggttactgttcccactcttgtcagtatattggagcgccatttgaaggtgaaggccaagaggaatattgtggacatgcctggaaacggcgacgttccgtttactcacgcgaatattagttcggcccggagagaactcgggtacaagcccaccaccgatttgcaaaccgggttgaagaagttcgtcaagtggtacctttcctattacggctacaatcacggcaaacctgtaaattaattttattttattttgtttccccccccttttttttttctttttcggaaagggttttttctttttttagtgtggtaggttttaagtcacagattaaaacagacagggaaaaaaaagaagaaagaacctggtcaagaagattagaagaagaagggaaattggggctaaaaggaaggaagaaaagaaaaagaaaaaaagaaaagagaaaagaaaagaagagaaggagaagaatacaattctttacttaggaggccagctaaaacagctgttgttccttcgttgatttcttttcttttttggtattaattggtgtttttttgtattttttttaacattttctttttctgtaaagaaagaaagttccgagttcaatctcgatttatttctcgtccattggccgccttgtccc

SEQ ID NO: 5998 - DNA, 2307 bp, Glycine max
aatcagctacgtaggccccccccccccgagaagaatttcacactccattttagggttcactttgtatttgtaataccatttcctcgcgcggcactgcttcccgccgccgccgccgccgtcagcgtcagcaccaatggcagacgcatcttctctgccgacggatcaactcgccgccatcaccctcgacgaggttcccaaagctaatttctccgaccgcgtccccatccgatccatcatctcccgcaccgacggcggctcgggcctcgccggcaggaaggcgcgcgttggcggctgggtgaagacgggacgcaaagccgacaaggacgctttcgcgttcctggaaatcaacgacggaagctgcgccggcaacctccaggtcatcgtcgaagccgcgctgggcgaactcggccaactcgttcccaccggaacatgcgtcgtcgtcgacggccacctcaaacttcctcccgctggcaccagacagaagatcgaactccgcgccgataaggtcctccacgtcggtcccgtcgatcccgccaagtatcctctgcccaaaatgagactcactctcgagttcctcagagatttcgttcaccttcgttccagaaccaacacgatatctgcggtggctagaattagaaatgctcttgcgtatgctacacatacatttttcaacaaggaagggtttctatacgtgcacacccccattgttaccacaagtgattgcgagggtgcgggtgagatgtttcaggtgaccactttgctgagtgaggcggagagattggagaaggagttgttgcagaatccacctccgtcggaagcggatgtggaggcggctagggttgttgttcaggagaaaggggaggttgtgtctcagttgaaagctgccaaggcgagtaagcaggagattggtgctgctgtggatcagcttaagaaggcgaaggagagtttggctaaggtggaggagtggtctaagcttaagcctgggattcctaaaaaggatgatggaaaggtggattatgggaaagatttctttgcacgtcaagcgtttttgacagtttcaggtcagcttcaagtcgagtcttatgcttgtgctctgagtagtgtgtatacctttggccccacatttcgcgcagagaattctcacacttccaggcatttggccgagttttggatggttgaacctgagattgcttttgcagagttgaaggatgatatgaactgtgccgaggcatatgtgaaatttatgtgtcagtggctacttgacaactgccttgaggatatggagtttatggctgataagtttgataaaggttgcattgaccgtttgaaattggttgcttccactccctttattcgagttacatatacagaagcagtggaaatactagaagatgctgtgaagaatggtaagaaatttgaaaatgaagtgaaatggggaattgacttagcatctgagcatgaaagatacctaacagaggtaaagtttcagaagcccgtcattgtatataactatccaaaagatatcaaagcattctacatgcggcttaatgatgacttaaagacagtggctgctatggatgtgcttgtacccaaggttggagagctaattggtggaagccaaagggaagaacgttatgatgtcatccagacaagaataaaggagatgggtttgcctgttgagccatatgagtggtaccttgatctgaggcggtatggaacagtgaaacatgccggatttggccttggctttgaaaggatgattctctttgccactggcctggaaaatattagagatgtgattcccttcccacgatatcctggcagagcagatctatgattacaagtggtttttacgaatctattgcaccaagtagttaagttgacaatggaaatgtagtatttaaatatagcattttttttttgtgtgtgatggcaacaccaatagtagccttattggggattcctctttgccaaactaatttattttggaaggatgctgggttttgatagttatttcatttctttatcctccactttgatgctggttgttttcattcgtttacaaactctgctctgcaaaggtccggcaatcaatatttctgtttactcgtcacatattgtattcagtatggattatggatgttctacgtttgacaaaattgaatcgaggtccaggcagaagcaacatatagtttcttctgcattttcccttattgaatggtcgaattgatccggcatacaagcacaggcatctggattatgcatttgacagaactttagtatacaaatatccttattcgttatctt

SEQ ID NO: 5999 - DNA, 874 bp, Glycine max
tacaactctttcaattgtctcgtgttgccctccgagaagacgacagaagggtaggatctgttgttgtgttgggtaaggtaagcatgttccgttcattgctccgccgcccgttttcgacgacgtcggcgagggcgttgaagcactgcgagaaccacgagtttctctctaagaactcgttcctgggaagctgggatgcgccacgggaccccaaggaggcggaggcgaagctaacgcgtcttcgaagagaatacgcattgcaagtgaaggaggttcggaaggaatacataagagagatggaggtcatgaagattgagaaggagcgcaaggacgaggctcgcagggaagcactcagagtcgccaacgaagagcgcaagaagctcaaggctcaagccgcgcagctcagagcgcaggaacgcgacatcgaacgacaacagtttcgagaaaccctattaaaagaaagagcagagaaacttgaaaactggaagatgaaagtcaaaatgcatgaagagaagaaggctgagaagaaagagtttctgcaccgacaaagttcggcgtggattgaagaaggcaatcttgagaaaaaagttgtggaagctatggttgaaataatgcatctttgagctccttgcagttctacatttgtattggttgagggctgtgttatctagttagtagaatttggtcctatgtttgaagctgcctcgtaaaaatagttcttgcatttacagaatcacattcctgctttatttcatagaatactttgggtgtattcactgttttgcttttgggatcaagttttttttacttggcatgagaatattaaaaaagaagatatttgaatcaagtaaaaaaaaaaaaaaaaaaaaaaaaaaaa

SEQ ID NO: 6000 - DNA, 903 bp, Glycine max
atttttgtatgccgtttgatttgcagtgcctcttataaaaggaagaggctctgttccgtcgcgtccgccctcgcggagagaaagaagtgaatcgtaggatctgttattctgttagcatgttccgttcatcgttccgccgcgcgttttcggcgagggcgtcgaagcactgcgagaaccacgagttcctctctcggaactcgttcctggggagctgggaggcgccacgggacccgaaggaggcggaggcgaagctggcgcggctgcgaagggaatacgcgaagcaagtgaaggaggttcggaaggaatacataagagagatggaagcgatgaagattgagaaggagcgcaaagacgaggctcacagggaagccctcagagtcgccaacgaagagcgcaagaagctcaaggctcaagccgcgcagcttagagcacaggaacgcgacatcgaacgacaacagtttcgagaaaccctattaaaagaaagagcagagaaacttgaaaactggaggatgaaagtcaaaatgcttgaagggaagaaggctgagaagaaagagtttctgcgccgacaaagttcggcgtggattgaagaaggcaatcttgagaaaaaagttgtggaagctatggctgaaataatgcatctttgagctccttgcagttctacatttgtattggttgagaagaacagggtgctttcagaggcaaagggtgggagtggaggtttgtatgttgctttctcgagagaccagcaccagaaggtttatgttcagcatagactatagggggctgctgtttatatagcaccaaaatgtctgccgatgtaagaaaatgatgcgtatgcacttaagccaacggagacgggatttataaaaattgtacaataataatgtcatatcattctcatag

SEQ ID NO: 6001 - DNA, 872 bp, Glycine max
ctcccctctctctctcaattgagacttattcatttcgtgttctctgcgaattagcggccgccgttccccgttccgccgccccgtcccggcgagggcgtcgaagcactgcgagaaccccgagttcctctctcggaactcgttcctggggagctgggatgcgccacgggaccccaaggaggcggaggcgaagctaacgcgtcttcgaagagaatacgcattgcaagtgaaggaggttcggaaggaatacataagagagatggaggtcatgaagattgagaaggagcgcaaggacgaggctcgcagggaagcactcagagtcgccaacgaagagcgcaagaagctcaaggctcaagccgcgcagctcagagcgcaggaacgcgacatcgaacgacaacagtttcgagaaaccctattaaaagaaagagcagagaaacttgaaaactggaagatgaaagtcaaaatgcatgaagagaagaaggctgagaagaaagagtttctgcaccgacaaagttcggcgtggattgaagaaggcaatcttgagaaaaaagttgtggaagctatggttgaaataatgcatctttgagctccttgcagttctacatttgtattggttgagggctgtgttatctagttagtagaatttggtcctatgtttgaaactgcctcataaaaatagttcttgcatttagagaatcacattcctgctttagcccatagaatacgttgggtgtattcactgttttgcttttgggatcaagttttttacttggcatgagaatattaaaaaagattgatatttgaatccaatagctaataagtgtcaattggctttatctacaaaaaaaaaaaaaaaaaaaaaaaaaaaaaaaaaa

SEQ ID NO: 6002 - DNA, 3288 bp, Glycine max
tcagctacgtaggccccccccccccccgaagtaggaggaggtcttattgaaagctggataagttagccctaccattttagtatatgtattcttttagtgttgttatattggtgttctttattatggtctttactaatggagctagttctagtttgtaggtgtgttagtttggatggagatgctgatcggcttgtttattttattgtgccacctgaaagcagtggtaggattgaccttgttgatggggacaagatactatccctgtttgccttatttattagggagcaactaagctttcttaatgagaaagaagacatgaaaaattgccaccaagcccatcttggtgtcgtacagactgcttatgcaaatggggcatctactaattaccttaaactgttgggacttgaagtcaattttactccaactggagtgaaatatctgcatgaaaaagccaccgaatttgatattggtatctactttgaggcaaatggccatggaactgtcttattttcagaatctttcatagagtcgttggaggctagaactaatgagatttctttaggatccaaaggtttgttctgaggtttctgactattttcacttcacttacaagattcaactaaatagaaatgtgtgattgttagtttcaggttcagaaggggaaaaagctgctctgagattattggctctcagtaagttgatcaatcaagctgttggagatgctttgagtggattgctcttggtggaagtcatattacagcatatgggatggtcaataaataaatggaatgaactttatcatgatttacccagcaagcagctcaaggtcaaagttgctgacagaacggctgttgttacaacaaatgcagaaactgtggttgtgagccctccgggtctacaagaagccataaatgaagaaactgctaagtacccccaaggtcgatgctttgtgcgaccatctggcactgaagatgttgttcgtgtgtatgctgaggcatccacaccggaagcagctgatacacttgccaactgtgtggctaagcttgtggatcaattcttagggttcaatagctcctgacatcacaacagctcctccttccgtgtctttttaatttccatttgacattacaacagaatgtacttggctttgaaacttagctagccatcgtgattttctaataaattttctcgtgcattttactaagcttatgcgagagtatttgaaaaaaaaaatcagctacgtaggccccccccccagaaaaattacaaaaatagcagaaataaaaaaggcttaattttcttaaaattttgctccaaaattcccttccactgtaccagaatgctaatctgaacctgtagggtgccaagttggaaactttttccctgaaaaatgatggggttatcagaattagagcagctactgcttcttcagtggcacccagaatccgaaaaacagcaacatgttctgtatcgaaagatggtaatgcctctgttgagactgatgtacctttccctgctgattactctgagcttctggaacaagtaagtgtttcattgtcctccctttgcaccaatcttttgttcattgcaacattcaactttgatattgatggaccgatgtagtggtggttttgttaatttgctatatgtcaatcctgtgttgatcgacagagcaggtaaattttactcaataaaaaaggtttcaacaccttttcgaacctacaaatatgcaatttttgtagtcataatccaggaaatattcaaatatttcatcagtctcctttagataaacatttatttggttccatctaatgttgctatgtaagcaatttgtaacgtggcattcctatgtggcaacacttcgaaggagtcgcataagcatttttttgtaatagaagaataaaaacagaaagtttcaacattattgggattataaacaaaagaaagaaaattacaaagattaaaagtgaaaacaagtagtatatttacaagaatggaaaaggtatttaaaccaccctaaacaatataagaaaaaatggttggacttatagttgtgtatcatgtacactcagacacatgctaattgaacactaagattggggtctttgttattgaatcaaccaacaggccagagtagctgcagatttggctataaaggataacagacagctaatggtgagtaacatatgatagtagttttattaggaattaggaatccataactaaagttgcacacactaaagtgaggagctaatctattatagagcctgtaatgaaaccatcttaacctggaccatttggcagcacagtaacagaatcatcttttcaaatgattctttcaatggaagcaagttgttggaagatgcagtgttcctagtatggtcatggcttagagcaagggagacagattttgtaatgcaccacaaccaatggtctagtaatctaaatgtaggttttggtaaataggacagctcattagttgatggattgtatattggtacatatggtaactagcttggatcctataaggtcgaaatccctactggatccagtaggtttcctataaacctattctgtaacattagtacctctggtactcccatttatatatatataatacttttgctgaaaaaaaaaaaaaaaaaatgagtttcccacagctggactcgggtctgcgcctgcgtcggcccccccccctttcattttttttggtttgacccctgttttatcattgtttcaatctaaatggaaattgattcatctcactcattacatcacaggtgatggggaaggtggaattgaaatgactgagagcatgcaattgattcgtgaattttgtgaccgcttcattagttcagagaaagccacacgaacaagaatagtaatcttcttgatttaaagacttgttcttctttgtgcccctggaatgtgtttctggatgaaaagctttctctacatgtaaaaaagggttttgtgctccttgcatttttcaaataactaggaagtttttgttgtttaagttttatttttcttagcatacaatctaactatgtttacagttagttacaagtctcttgctgtataattccaactcagcatatatacatcaattatgatcgatacacctagatgccaagatttaattccatagtttgattgttccaaatagctctaactttcttgtttatgtatgcggtctcccccttcttcatatgtttgttgtctagaaaagttaggtcctgttctctaaagatggccatgcaaaatgtttttattgacataattcaa

SEQ ID NO: 6003 - DNA, 2158 bp, Glycine max
  misc_feature (291)..(291): n is a, c, g, or t
  misc_feature (293)..(293): n is a, c, g, or t
  misc_feature (324)..(324): n is a, c, g, or t
  misc_feature (752)..(752): n is a, c, g, or t
cccacgcgtccgacggctgcgagaagacgacagaaggggattcccctttttgctaaaactgtatctattcctaaactccagtagtggatccgaagccagcttctgctctgagcgtagaatccaaatcctgaacctcaacaacctgcggcatcaccatctgctggattatcaacagtatcacccctgtaatccgcgtcgatcacgcccgctcccacatcagtgtcattccaacaaactaacatttgcacaaaacacgccaacccgagtgaagatctaaacaagcgaggctgngngtgtaccgctaggatacgaggaacaacagtngtctgcttctcagctcagcttctcgcttctcgccccccaaaggagtgaagctatcgtacggcactgcgggcttcagggccgatgcatcacttctccaatcgacggtgtacagagtgggaatccttgcagcccttagatcgctcaagacccgctccgtcatcggcctcatgatcaccgcctcacacaacaaagtctccgataacggagtcaaaatcgctgacccaagcggcggcatgctctctcggcattgggaacccttcgccgacgccctcgccaacgccccttctccccaacacctcctcctgttgataaatgaattcgtggagaaagaagggatctcggtggatggggactggcaagtcgaagtgcttttggggagagacacgagaccaagtggagatgctttgcttcaagcagctaaacagtgncgtcacttcaattgttggagctgttgcgacggatatgggaatcttgacaactccacaattgcattggatggttcgtgctagaaataagggtatgaaagcttcggagcaggattactttgaacagctttcaagctcattcaggtgcttagtggatttgatcccagctgaaaaatgtaagtttgatggggtgaacgacaaagtggtagtggatgcagctaatggggttggtggagtgaaacttaaatatttagggaaattgttgaatggtttgattattgaggttcggaacagcagtgaagatggaggtgtactgaatgatggagttggtgctgattatgtgcaaaaagagaaggttcttccaaacagctttggttctaaagacaccgggataaggtgtgttagtttggatggagatgctgatcggcttgtttattttattgtgccacctgaaagcagtggtaggattgaccttgttgatggggacaagatactatccctgtttgccttatttattagggagcaactaagctttcttaatgagaaagaagacatgaaaaattgccaccaagcccatgttggtgtcatacagactgcttatgcaaatggggcatctactaattaccttaaactgttgggacttgaagtcaattttactccaactggagtgaaatatctgcatgaaaaagccaccgaatttgatattggtatctactttgaggcaaatggccatggaactgtcttattttcagaatctttcatagagtcgttggaggctagaactaatgagatttctttaggatccaaagtttcaggttcagaaggggaaaaagctgctctgagattattggctgtcagtaagttgatcaatcaagctgttggagatgctttgagtggattgctcttggtggaagtcatattacagcatatgggatggtcaataaataaatggaatgagctttatcatgatttacccagcaagcagctcaaggtcaaagttgctgacagaacggctattgttacaacaaatgcagaaactgtggttgtgagccccccgggtctaaaagaagccataaatgaagaaactgctaagtacccccaaggtcggtgctttgtgcgaccatctggcactagaagatgttgttcgtgtgtatgctgaggcatctacaccggaagcagctgatacacttgccaactgtgtggctaagcttgtggatcaattcttagggttcaatagctcctgacatcacaacagctcctccttccgtgtctttttaatttccatttgacattacaacagaatgtacttggctttgaaacttagctagccatcgtgattttctaataaattttctcgtgcattttactaaaaaaaaaaaaaaaaaaaaaagaaaaaaaaaaaaaaaaaa

SEQ ID NO: 6004 - DNA, 726 bp, Glycine max
cgaaagctgatcacagaagcaattaacatattctcctctcattctcactcaaaacacaaaatcctaactaaggtgaaaatgaaggcatcacgcattgctttgttcactttggtggtgcttctttttgtggctgaagttcaagtgtcaaaggcagtgacctgcagcccagtgcagctgagtgcatgtgtgagtgcaataacctcttcaacccctccatcaaacctatgctgctccaagatcaaggaacagaaaccatgcctttgccaatatctcaagaaccccaatctcaagaagtttgttgactctcctaatgcaaggagagttgctaacacttgtggaactcccttcccaaggtgctaaggtgttactaaatttgaagtggttttaatttctctgcctgattatgcatcttgatatctatccatgtgttctggccagagaccagagagtgaaagaaattatatatatatgtgttatcatatatatatatatatatatatatatatacatatatggtgtggtttaacgtctctatatatgttttaatgttagtgagaatactagtcctaatggatatgtgatgctttggtttcatgtcattccatttcagttccatggtgtgctctatctcatcttacgtaacgttaattaattagttgttgcaaaaggctgtatttataattcagagaagtatctgtatctaatcatatgtttcctcttcttatt

SEQ ID NO: 6005 - DNA, 736 bp, Glycine max
  misc_feature (733)..(733): n is a, c, g, or t
cggccgccctcagctaccgcgggccccaccttcacagaagcaattaatcatattcctctctcattctcactataaacacaaaacccttcccatcctaattaaggtgaaaatgaaggcatcacccattgcttggttcactttggtggttgtgtttcttgtggctgaagttcaagtttcaatggcagtgacatgcagcccagtgcagctgagtgcatgtgtaagtgcaataacctcttcaacccctccatcaaacctatgctgctccaagatcaaagaacagaaaccatgcctctgccaatacctcaagaaccccaatctcaagaagtttgttgactctcctaatgcaaggagagttgctagcacttgtggaactcccttcccaaggtgctaagtgttaataaattggaagaggttttaatttctctgcctgattatgcatcttgatatctatccaagtgtttggccagagactagagagtgaaagaaaattatgtgttaattgttatcatatatatatatatatggtgtggtttaaggtctctatatatgttttaatgttagtgagattaagtattagtcctaatggatatgtgatgctttggtttcatgtcattccatttcagttccttggtgtggtctcatctcacgtaacgttaattagttgttgcaaaaggctgtatttataattcaaagaagtatctgtttctgatcaagtttccacaaaaaaaaaaanaaa

SEQ ID NO: 6006 - DNA, 862 bp, Glycine max
tattttaatgtcaatggtaaatctaaataccccttgttcttgttgatttaaacaatgaaagtatcatgattactgctcccttgtatttcagaaatacttgttgtggaagaactttataaagaggcggtcttgaacactgaacggaaactgattattttcaatggagaactcgatcgcataagatctggatattatccatcattcttctacccaaagcttgctgcacttacgaagaccttcctacctatgatggaaactgtgtattacattcataatttcaagggccgcaatggaggaacactttttaggtgctatccaggaccctggaaggtccttagaagagtggggaataggaaatatgtttgtctacatcagcagaatagtatgccatccctcaaggaagttgcccttgagattcttccatctgcttgataaatacttatggggttggtctccagctcttttgcagagattttgaaaggactctacacacttgccatttgattaacgaagtattgaagttggggcccaaagaaatggcgttttctagcataaaagtggtgtcaatgagtagcaagttgttacttgtacagtttataaattcatctttcgtcatttgtgtgtggactattgtgtagaactttatcagaccatcacaatcactgattaaaagaatcactttgtgtttttcgctgttttttttttgttataatacaaatgaagataaggtcctgtattttggtaaacaaaaggtggtggcttgttattaatctttgctattgacgataattggttcaatgttgtacttgtatctttttaattatgaatatatatattttgtttgttggctttgtaaaaaaaa

SEQ ID NO: 6007 - DNA, 2299 bp, Glycine max
aattcggctcgagcgaaaagaaaaggggaaaagaaaaatgaaaaatagcacaaggccaaaaatatcacctgatctgaaacttggacacgaaagaaaggctcgtatgcgcgacttctctctcttgcattgattcaacgttgtccattctccgaaacatcacaaagaaacccaactgagagagtgaagaataagaagaataaaaagaagaagaagggacgacaacaatggggggtttcgcaatgggttctgccttcgattccaaatctgggcagattattatggctgctttgcttttgatgattatgtccttctatgctggcaacctttttggcaacaatgctcccctttacgtctctcagcttgtttctcattcttctcccaacaatgtctcctccaacggtgctaccaaatttactaacaaagttgctctgacttactggaaaaccccgcttgtaattccagaaactggggtggatgtgtgccctttgacattcaatgagtatattccttgccatgatgcttcctatgtggcaacattggccccgactcttgatttttctagaaaagaagaactggagagacactgtcctcctcttgaaaagcgcttattttgcttggttcctccaccgaaggattataaaatacctatcaaatggcctcttagcagggattatgtttggcgaagtaatgttaatcatacgcatcttgcagaagtcaaaggaggccaaaattgggtacatgagaaggatcagctctggtggtttcctggtggtggtacccatttcaaacatggggcttctgagtacatagagaggttaggacatatgattaccaatgaggctgctggtgatctgcgatctgctggggtagttcaagttctggatgttggctgtggtgtggccagtttttcagcatatcttcttcccttgggtatacgaacaatgtcctttgcccccaaggatgttcatgaaaatcagattcaatttgcattagaacgagggattagtgcaatgatctctgccttgtccacaaaacaactaccgtatcctagtgagtcatttgaaatgattcactgttcacgatgccgaatagactttcatgaaaacgatgggattttactgaaggagttgaatcgccttcttcgctttaatgggtactttgtttattcagccccccctgcttatagaaaagataaagattatcctgtcatttgggataagttgatgaatttgactacagcaatgtgctggagacttattgctcgacaagttcagacggcaatatggattaaagaaaataaccagtcatgccttttgcacaatgtagaacaaaaacacataaacctctgtgatgctgctgatgattttaaaccttcatggaatatccaactaaagaattgtgttctagttagaaattctaaaacagattcttacaagcttcctcctagtcacgaacgccattcagtgttttctgagaaccttaacacgataggtataaatcggaatgaatttacttcagatactgtcttctggcaagaacaaattggtcattactggagactgatgaatattggggagacagaaatacgcaatgtgatggatatgaatgcctattgtggtggatttgctgttgcgctcaataagtttcctgtttggatattgaatgtagttcctgcaagcatgaagaacaccttatctggaatttatgcccggggattgattggaatttatcatgattggtgtgaaccattttcaagttaccctcggacatatgatcttttgcatgccaactacctcttttcccactacaaaacaaaaggggaaggttgtttattggaggacatcatgctggagatggatcgacttatacggccattgggatttattatcattagggacgagaatgatatcacctcaagaatcctagaggtagccccaaaattcctatgggatgtggaatcacaaatgttagagaacaaagagaagaaaatggagactgttttaatttgtagaaaaaagttttgggctatcgtctaaagtgacttgacctaaaagttttctcctagaaattgtttttaagcgtacgggtaatttgtaatgttaggtttttatgtatccgatttgttcactgctccaacgctccacgatcattttgtgtagatgtccagtgagctcattttgtatatgacttcactcagttcagcaattatgatttatgaatagaaagtaggttcttcgttgtctaaaaaaaaaaaaaaatgaatattagaaataaatataacatacatcttaggttgatt

SEQ ID NO: 6008 - DNA, 1429 bp, Glycine max
tcagctacgtaggccccccccccccgcctcatcaatcatcgtcaccaaacaaacattcattcattccacgcttccattctctctctaaatcgcattaccttcttctatctccttagttcccggcgagttcgtgcatcggagcctctaaatcgcattaacatcatcgaatcaaaccttccttctctttctcaactccagaatctcgtcctcgtgagagaaaaaaaaaaagttagttagggttacgcacagttaattaattatttaataatagaaaaatgagctttcaggacatcgaggccggccggtccttcgctgcccgacgcaacctcatcaacggcaaacaagaccccacgcaggcggtggcttccggcatctttcagatcaacaccgctgtctccacgttccagagactcgtcaacaccctaggaacccccaaggacacccccgagctccgtgataagctgcacaagacgagactgcacattggacaattggtgaaggatacttcggctaagcttaagcaagctagtgagattgatcacaatgttgaagttaatacaagtaagaagatagcagatgcgaagcttgcaaaagattttcaggcggtgttgaaagaatttcagaaggctcagcgtctttcagctgagagggaaacagcttacactccttttgttccacaaggagctcttccatccagctatacagccagtgaagtagacattagttctgataagactccagaacagcgtgcccttcttgttgaatccagaagacaggaagtattattcttagataatgagattgccttcaatgaggctatcattgacgaaagagatcaaggtattcaagaaattcagtcgcaaattggtgaagtaaatgagattttcaaagatcttgctgtgcttgtccatgagcaaggagcaatgattgatgatattgggtccaatattgagcattcccatgcagcaactgtgcaagcaaaatctcaacttgccaaagcttcaaagacacaaagatcaaattcatctttgacatgcttgcttttggtgatatttgggatcgtgcttctaatcgtcatcattgttcttgctgcttagtccaaaactctcgattctattatgaatcaaatgctctatatactaagctgcagataagatctccctcgctgatgactacagagtggtgatttaccagatctcacatatgaccggaatttgtctcatcaggtttcagtacatgacgtgggaatattaacattagtgtctcgttatttcgttgtgggtatatgttctacttggggctttaaggatgtatcacaacctgcctgttgtgtaagttatctttttggttccttaataaaagatatatattaaattgttctttacctgtatatgcaacttcaaaattagcatgaccgacccttctttat

SEQ ID NO: 6009 - DNA, 972 bp, Glycine max
aatcttcaaaagttgagtagtgagtagtcacaagaatccatccatccacccacccacccaccgttttttctccctcgtgcctttattctttctgagttttcattttgctgttgttgcgtgcggtcccattctttgttttgcatttgtcttctttaacttgtcactctctctctctctctctctaatggcttcattttctatcacctcctcgcctcccacccttcacaaagccactatcaccgacccttcttcttcttcttcccacgccttccctcaccgttctcccttcgttttacgcatgccccaccaaccccatcgccctcaaactcctcttgttttgcccaagattcaatctttgcgcaacgaaactagagctattccagttaccaaagacctgtgggataattcaattctgaaaagtgaaatcccagtccttgttatattctatgcaaattggtgcggcccgtgcaggatggttcaccggataatagatgagatcgcaacagagtatgctgggaaactcaaatgttttatagtcaacacagacactgacatgcaaattgctgaggactatgaaattaaggctgtaccagtggttttgatgtttaaaaatggcaagaaatgtgattctgtaattggtaccatgccaaaggagttttatgtggctgctatagagggggtgctcaagccctagtcatggatcagtgcaggcattgatgagttcttgtacatattttgtttccttttttcccataataggcatggtcaagtgagactgcttctttcgtaatgaatgttccactttcaatagctatatttcctagggaaaatcttcttcagctatagagaatatcatagttgaaatttaagtgttcctttggtacttgattcgaacagttgttattcggaagctaagatttgatttaccttgtgcttgtttcccttgttaaaaaaaaaaaaaaaaaaaaaaaa

SEQ ID NO: 6010 - DNA, 3720 bp, Glycine max
ccggattcccgcgtcgacccacgcgtccgggcataatctggaaattacctttttgaggcaaacagttttgtcaattagaaaatagtgaattatcaaggcgctgatttatgatggtttgactatgtttatctgttaactgaggccacaaaactcataagatgtatgctagcatatattctttcatcacgagtcatatattaatgattctacctgaaaagtgcatggaagtttatttacttcttcttttttttctcccatcaggacacagtcatcctagaagattcaacaagattacatcactgagagactctgcctggtttactatttcttaagccaaaaattcacgtgaagcaaataacaggcgaatcatgtcattagttatgactgctgatctagctcctacataatatgaaaatgctaagctcttctcactgaagggaactgatgttaaaccaggcctgtcctcccaaatttttgatcctgataagcataggagcatgtacatgaccgatgcttactccggctagggttatgagaagtacttccatgactcacaatccgaagaactgatagaaccatctagttccagcatctctggaagttcaattcaccctgatgtagcctcttcttaccagctcagagccagttcaggagcttctatggttgccaataacccatctgattcttctttcatgtctacaaggcatcatgatgcttaccagtcaaactcaggatcagatttgatggagaacggaagcctggattcacgcgacgatgaaggtctaatgagattaagactaaaagcactggagagggcattgcttgatgatagtgatgctggggaggatgaagaggaggaggaggaggaagaggaagacatatttgaggctgcacaaagcatggaaattgatcctgacattgctgagtgggctgattcaattcataatatgctgctccatggttcaccaaaggagtcctcttcttcagattccaataccagcagcatcagcagcaccaaagaaatatcacaaacttctcagacccccaagaagttgctttatgaatgtgctattgcactttctgaaggaaatgaagtggaaggatcatctatgataaacaatctccggcagatggtctcaattcagggagagccttctcaaagaattgcagcctatatggttgagggacttgcagctcgcctggccgaatccggaaaaagtatttacaaagctctgagatgcaaggagcctccaacttcagatcgtctagcagctatgcagatactgtttgaggtttgcccatgtttcaaatttggattcattgctgctaacaatgcaattacagaagcagtgaaagatgacatgaagattcatataatagattttgacatcaatcaaggaagtcagtacataaatctaatccaaacacttgcttcaaggtcaagcaagccaccacatgttaggttgactggagttgatgatccagaatctgtgcagcgatctgttggaggcctacggaacataggacaaagactagaaaaactggcagaggcacttggtttgccatttgagtttcgagcagtggcatcaaggacttccattgtcaccccatcaatgctcaactgcagtcctgatgaagcactagtggtaaactttgcattccagcttcatcacatgcccgatgagagtgtttcgacagtaaacgaacgggaccaacttcttcgcttggtgaagagcctgaatccaaagcttgtgacagttgtggagcaagatgtgaacacaaacaccacccccttcttacctagatttgttgaggcctacaattactactctgctgtgtttgagtcacttgatgctactcttcctagagaaagccaggacaggatgaatgttgaaaggcaatgcttagcaagggacattgtcaatgttgttgcgtgtgagggcgaggataggatagagcggtatgaagttgctggaaaatggagagcaaggatgacaatggctggcttcacttcatccccaatgagcacaaatgtcaccgatgaaatccgaaaactcattaagacggtgtattgcgacaggtacaagattaaggaggaaatgggagcgcttcactttggttgggaagacaaaaacttgattgttgcttcagcatggaagttaccaagataatcaattgtgttaggcgatagactcattctagtatcagtaatctagtgtttgcttgcatgcttgtttagtctgtagattacttctgatattcctattgtggtgttttcttgcttttccacatgtatactaacgtacaatcttaagctaataacgaactttgattttatgtaagtgcttttcttaacgtggctggaggacaagggagcaagaagcaatgaagcttatgcttaagctaatgactcggttccggtatgacgaccccacgaagagagcgagttgattaaggcaaagggtgtgatgagattagttttgagaagaaaccagcaatcggcgattaggagtgagagagatatggagggaattgaaggaaatagcagcagatacagtctgaaaccctcgcgaatttgcaacgaagatgttctgatctgcgtcgacgtcgatcctcagtgcctcgtcgaaatgaaaggtgccaccggtcccaatggcagacccctcacccgtttggactccatcaaacaagccatcgttctcttcgtcaatgccaaactcaccatcaaccccgaacaccgttttgccttcgccactctctccaacaccctcgtctcttgggtcaggaaagagtttagcagtgaaattgagtcaacacttgcagcaatgcgtgttctttcagcttcttcttcttcttccaccaccgccggccaacccgatctcactcatttgttccgtcttgccgctcatgaagccaagaaatcccgtcttcagggtcgcatcctaagagtcattttgttctactgtagatcatcagagcgaccaaagcatcagtggcctgtgaaccagaagctcttcactttggatgttatgtaccttcatgataaacctggaccagataactgcccccaggaggtttacgatacactggtggaggcacttgaacatgttagtgaatatgagggttatatcttggagagtggacaggggttggcacgtgttctattccgtcatgtgctgatactattgtcacatcctcagcagcgttgcatccaagagtatgttgacataccaaagtcaattgcaaagaagcctccccaggtggagcctatggctactgaagatagtgctcccatatcaagccaataatactatgagttgggaagtggatggcagttgcatgtggtcaacctcttaaggggaatggaatatgatcataattcagcaatgttcaagttggaggttagtgtcactaggttgacaagggaatgattgttactagcgtaacagtttctgaaattggattcgattcctacaaccctctttcgttctcaagttgataccatttactattttgaatcaaatgtatgaaaagtgtactttcaaacatatccatattcattagtaatcaagcgtttaggtctggtaatgaaagtgagcaagggatgtgattatacacaagctgttagattttattttatttttcttgtcggtaactttcaaagacaaagacaatattaataaatttataacacaaagacaatattaataaatttatacc

SEQ ID NO: 6011 - DNA, 1647 bp, Glycine max
aaatcgccactctcaccataaattgtgaccctcgtcacgccaacgctttcgttgttcccctttctctcgttttttctcagaaccttctgaggttaaagcaaaaaacaaagagagagagagagagaaaatgatgaagccatcgatgctcagatctctccactccgccgccacccgcggcgcctctcatctcttccgccgtgggtacgcctccgagccggtgccggagcgcaaggtagccgttctcggcgccgccggcgggatcgggcagcctctctcccttctcatgaagctcaatcccctcgtttcgagcctctccctttacgatatcgccggaactcccggcgtcgccgccgatatcagccacataaacaccagatctgaggtagtggggtaccaaggtgatgaagagcttggaaaagctttggagggtgccgatgttgttataattcctgctggtgtgcccagaaagcctggaatgactcgtgatgatctttttaacatcaatgctggcattgttaagacgctgtgtactgctattgctaagtattgcccccatgcccttgttaacatgataagcaatcctgtgaactccactgttcctattgctgctgaagttttcaagaaggcaggaacttatgatgagaagagattgtttggtgttaccacccttgatgttgttagggcaaaaactttctatgctgggaaagccaatgttccagttgctggtgttaatgtacctgttgtgggcggccatgcaggcattactattctgccactattttctcaagccacaccaaaagccaatcttgatgatgatgtcattaaggctcttacaaagaggacacaagatggaggaacagaagttgtagaagctaaggctggaaagggttctgcaactttgtcaatggcctatgctggtgccctttttgctgatgcttgcctcaagggcctcaatggagtcccagatgttgtcgagtgctctttcgtgcaatccactgttactgaacttcccttctttgcttccaaggtgaggcttgggacggttggtgtggaggaagttctgggcttggggcacctctcagattttgagcaacaaggcctcgaaagccttaagcctgaactcaaatcatcaattgagaagggaatcaaatttgccaaccagtaattgaacatgttatcacatacatgtctggtaggttactggatattcctttaagaaccaaatcaaattttgcattctcagaaccattgatgtattgttgtcggcagtggtgtggcggttttgttgttttatttagtgtaggtatacgccatggtttaataattaaagtctgagagctgtttgttgccaaagggattgaacgatcttaaaaccaggtttaggatttggcattccattaataatggtcccttttaactgtatggtttcacttaatgtaattgcagggtgttgtaccctttattcacattttttctcacttaaatatgtttttgatttctgtgacaaaaaaagataaaaaaaaaaaaatataaataaaaaaagataaaacaatgaataatcaaaataaagcaaataaaaaaaaaagggggggcccccctttagggggccccatgccccggaatttaattcgggcccgtgtcctgggg

SEQ ID NO: 6012 - DNA, 1512 bp, Glycine max
gtgaccctcctcacgccaacgcaatcgttgttcccttttctctctcgttttttctcaaaaagttgcaagagttaaagcaaaaaccaaagtgagagagaaaatgatgaagccatcgatgctcagatctcttcactctgccgccacccgcggcgcctcccacctctcccgccgtggctacgcctccgagccggtgccggagcgcaaggtggccgttctaggtgccgccggcgggatcgggcaacccctctcccttctcatgaagctcaaccccctcgtttccagcctctccctctacgatatcgccggaactcccggtgtcgccgccgatgtcagccacatcaacaccggatctgaggtagtggggtaccaaggtgacgaagagctcggaaaagctttggagggtgcagatgttgttataattcctgctggtgtgcccagaaagcctggaatgactcgtgatgatctttttaacatcaatgctggcattgttaagacactgtgtactgctattgctaagtactgccctcatgcccttgttaacatgataagcaatcctgtgaactccactgttcctattgctgctgaagttttcaagaaggcaggaacgtatgatgagaagagattgtttggtgttaccacccttgatgttgttagggcaaaaactttctatgctgggaaagccaatgttccagttgctggtgttaatgtacctgttgtgggtggccatgcaggcattactattctgccattattttctcaagccacaccaaaagccaatcttgatgatgatgtcattaaggctcttacaaagaggacacaagatggaggaacagaagttgtagaagctaaggctggaaagggttctgcaactttgtcaatggcctatgctggtgccctatttgctgatgcttgccttaagggcctcaatggagtcccagatgttgtggagtgctcattcgtgcaatccactgttactgaacttccctactttgcttccaaggtgaggcttgggaagaatggagtggaggaagttctgggcttaggacctctctcagattttgagcaacaaggcctcgaaagccttaagcctgaactcaaatcatcaattgagaagggaatcaaatttgccaaccagtaattgaacatgttatcacatacgtgtctggtaggctaatgttaatgttattccttcaagaaccaaatcaaattttgcaatctcagaaccattgttgtattgttgccggcagtggtgtggcgactttgttgttttatttagagtaggtatacgccatgatttaataatttaagtctgagagctttttgttgctaaagagattcaacgatcttataaccgggtttaggttttggccattccattaataatggtcccttttaactgtgtatggtttcacgtaatgtaattgcagggtgttgtacccttcatccgtgtttgtttctctttctttcttatgaaaggttttaacttttaactagcttattttcttacagtgc

SEQ ID NO: 6013 - DNA, 1845 bp, Glycine max
ggctcgtgcttggtaaacgcaacagcgatagaactctagacatagaatagtaaacggtgttagcttcgatagattaaacgaacacagagcgagcgaaagtagaatctgaaaaacaatggcggcgaagctagacacccacgccgtggcttccgatctgatcgacttcctcaacgcttctccaacggctttccacgccgtcgacgaggcaaagaggcgtttgcgtagcgcggggtaccaccaactctctgagagggaagtgtgggaactgcaaccgggcaacaagtacttcttcaccagaaatcactccaccatcgtcgccttcgccatcggcaaaaagtacgttgctggaaatggattctacataattggggctcacacggatagtccttgtctcaaactcaagcctgtcaccaaggttgttaaggctgggattttggaggttggtgtccaaacctatggaggtggtctgtggcacacgtggtttgatcgagacttgactgtggcggggagggtcattgtgcgggaagagaatgctggttctgtttcgtactcacatcgccttgttagaattgaggaacctataatgcgaataccgactttggcaattcacttggacaagactgttaatgatggattcaaatttaacaacgagaatcaccttattcccatcttggcaacatcgctgaagggtgagctcaataaagtgtcctctgaaaatggtcctgttgaaagtggaaatcagaccgatggaaagaaagcaaatgataaaacaggcaccagcaatacgaagcatcaccttcttcttctacagttgcttgcaagcaagcttgggtgtgaaccagatgacatatgtgattttgaattgcaagcttgcgatacacaaccaagtactattgctggagctgcaaaggaattcattttttcaggacggcttgataacctctgcatgtcattttgctcgctgaaggcattaatagatgctacatcctctgacagcagtcttgaggaagagtcaggggttagaatggtggctttatttgaccatgaggaagttggatctaactctgcccaaggagctggctctcctgttatgctaaatgctgtgactagggttaccaattccttcagctcaaatcccaaccttctggagaaagcagtacaattaagctaccttgtatctgccgatatggcacatgcactacacccaaattacatggaaaagcatgaagcaaaccatcagcccaaactacatggaggacttgtcattaaaaccaacgctaaccaacgctatgcaaccaatgttgtcacatccttcatattcagggagatagcatcaaaacataaacttcccgttcaggactttgtggtgcgcaatgacatgggttgtggttcaaccattggtcctattcttgctagtggcataggtattcgcactgttgatgtaggtgcaccgcagttgtcaatgcatagcatacgagaaatttgtgctgttgatgatgtgaagcattcatatgagcatttcaaggcattttacgaagaattttctcatgtcgatggtaagatggtcgtggatatataggatatctctaatcacgaaatcctcattttgatcctttgctctagaagctgttgctgaaatggtcgtgttttgtaatttagtatctatataatgctgacttattataagttttcaataaaattagactccctgaatgcaatattagcaacgactttaagtgtgtttacttgaatagtccaagttcatgcttctaaaatgggaccgtattcaggcgagtaacgaatttactaaagtagaagttgaaataaatatactatttttcgagc

SEQ ID NO: 6014 - DNA, 2512 bp, Glycine max
gcggggggcttcaaattccatttcttttgatttaattaagggtaccatagttgaagcaagcaacaagataagaaagcaaagcaggagagagaggggggatgacaccacatcctctgttttcattctcattcttagttttccctgccattcaaattttcacatgacctctcattattatttttattattattagtttcttttgtttctatcaccaaccattcatctttggatggtgaattccccatctgggttcctctctttttcctttgatctcttcgccttctctcaatttcttcttctctgatcccagaaaagaaaaaaaaactaaaaaacattaaaaacaaaaataaaaaaaaaaacatagctgctttgttttctctctttgctggattagatattttggttcagtttttattattgatgctcctaagatccgattctcttagatcgaatttggcataacccacttcgtatctgattgaagcacccactgggttctgtctgagattcaacataagaacagatggagtcggatcttggcaagctcttcattgggggaatttcctgggacaccgatgacgaacgtctcaaagaatattttgggaaatatggagaggtgatagaggctgtgatcatgagagatcggacaacaggccgcgctcgtggtttcggttttgttgtctttgctgatccttctgctgcggagagagtcattatggataagcacataattgatgccgtcaatttgcaggttgaagccaagaaagctgttcctagggatgatcagcaaactataaacagacagactggtagcatccatggatctcctagtcctggacgcaccaaaaagatttttgttggaggtttaccatcaacaatcacagagagtgattttaagaagtactttgatcagtttggtacaattactgatgttgttgtaatgtatgaccacaatacccagaggccaagaggttttggcttcatcacttatgattcagaagaagctgtggacagagttctttataagacatttcatgaactcaatgggaagatggttgaggtcaagagggcagttcctaaagagctttcccctggacctacccgaagcccattgataggatataactatggtttgaataggaccagtagcttcctaaatagttatgctcagggtttcaatatgaatccaattggaggttatggagtcaggatggatggaaggtttagtccacttactagtgctagaagtgggtttaccccatttggctccagtggttatggaatgggagtgaatttggatttaggattgaacccaagctatggagggacttccagttatggtggcagtctgggatacgctcggatgagtcctttcaacaatggcaactctaacagatacaccactcctattggcaatagcgggggcaatgggagaagcgattctcttatgaactcagcttcccggagtgtttggggaaatgggggcctgaacaatgctgccaatagtccagtcagccctggcgcttacttgggatctggaagtggggcttttggtgtttcaattggaaatgctggcaccaattggggtccatcagttccaacccagggtggaggggctgcctctgggtatagtacttggggtaactcttatgaaggtggagataacaacatcagtttaggaggtggagggtatggaaggaacagcagcccaagtgtgcctcaatcctcaacatttactgcaccaactggtgattatgaaggatcctatggggacttgtaccgcaatggttcagtttacagtgactcaactttgcggtctgctgcttctgagatagatgcttctggttcgtttggttatggtggacttggtggtatagcttcagatgatctagtaaagagttctgagggttttattggaaactacaatgtaataagtagacaaactaatagaggaattgctgcttaggagatatgttaattggatatgttatggtaacagtagatcaagggaaactggttaaaaaagacgaggtactgtgaaatcatacagaagctaaatcagtcacaagtgtttttgtgtaaggtttgggatttttgtttgtctttatttttcaaggctaggttcctttcttggaatttgattgaggtgtaacatcagattgcgggatatactcaggaagattggttccagtagtttaatagtgcattgctggagagatgcaccatatttagtatgcttaatgatagtttattaatttttgaatttttttttgccactgtaatgcttggcaaagctgtttgttcttgtcaccatctttttcatgggacatgtttctgatcaaattgtaagtgaagttcagtttgatttatcaggtttgagacattagaggggtatccatcttggatcccccatcaaataattagttactggacagatattattttttgttagacttttgttatacaactttatactttggttttcttgtttcattccaaggttagttgtggg

SEQ ID NO: 6015 - DNA, 2451 bp, Glycine max
ttgcgcgtgaggaagtggaataaccaagaacaagagattttaaaaaaagaaaaacaaattaaaaaagcaagagagagaatagatagaggatgatggtgagcacatcctctgtttccattcccagtttgttcttttcctcttcctcccattgaagcattttttcacaagcccgtgattttttcgccatctccatcatcaaatgattttctggttcgggttttgattgatgctcggaagatccgatgctgctagatcgaatttgacaaaacccacttcgtgtctgatcgaagcaacaactgggttctgtctgaattttgagataagatggaatcggatcttggcaagctcttcattgggggaatatcttgggacactgatgaggaacgtctaaaggaatattttgggaaatatggggaggtgatagagactgtgatcatgagggatcgagtaaccggtcgcgctcgcggctttggttttgttgtctttggtgatccttctgttgctgagagagtcattatggataagcacataattgatggccgcacagttgaagcaaagaaagctgttcctagggatgatcagcaaaacattaataggcaatctggtagtgcacatgtgtctcccggtcctggacgcacaaaaaagatttttgttggtggtttaccatcaactatcactgaaagtgattttaagacgtattttgatcagtttggtacaattactgatgttgtagttatgtatgatcataatacacagaggccaagaggttttggcttcatcacttatgattctgaagaagctgtggatagagttctttacaaaacttttcatgaactcaatggaaagatggttgaggtgaagagggcagttcccaaagaactttcccctggtcccagccgaagcccgttgataggatataactatggtttgactagggccagtaactacctaaacagttttgcccagggttataatatgagtccaataggaggatatggaatcaggatggacggtaggtttagtcctcttactagtggtagaagtgggtttactcctcttggcaacactggttatggaatgggagtgaatatggattcaggattgagcccaaactttggagggacttcaaactatgggagcaatgtaggatatggtcgaatatttagtcctttctacagtggcaactccggccgatataccactcctataggctatagtgggggtaatgggagaagcgattctcttatgaattcaccttctcggaatgtatggggaaatgggggcctcaataatgccaataaccccatcagccccagtcctttcttaggatctggaagtggggcttttggtgtttcaattggaaatagtggcacaggttggggtccatcacttccagcccagggtagaggggatgcttctggctatggtactgggaataatgtttatgaaggtggagatagcacctttggattaggtgggggagggtacggaagaaacaacagtactagtgtgacaccatcctcttcatttaatgtgtcaactggtggttatgaaggatcctatggggacttataccgcaggcgcagtggctcggtttacaatgactctgcttggcgttctgctgcgtctgagattgatggttctggctcatttggttatggtcttggtggtatagcttcagatgacccagtaaagagttctgagggttatattggaaactacaatgttactagtagacaacctaatagaggaattgctgcctaggagatatgatagttggaaagctcatggtagcagtagatcaaggaaaactggttaaaggttaatgaggtattgtgaattcatacatctccatcacctaagagatacagctcataaggaaattcgacatatatagctaacggtgttctttcttctttcatttgaattatacatattcaaagacaaagcagttacaagtgattttgtgtaaggcttgttttttttttccccctccttgttttggtcctcttcatttttcaagacttaggttcctttcttggaattggattgaggtgtaaaatcagatttgcgggatatactcaggaagatttgttccatgatagtgtaatagtacatctccggagaggcgctctgtgttagttgttttaatgtcagattattaatttttgaatttcttctttcttttgccactgtaatgcttggcatgcaaaagtgttggttcttgtcaccatctttttcttttttttttctatggtatatgtaactctgatcaaattgtaagcgaggttcagtttgatttatcaagtgtgaaacatgagtgggatgcccatgtaggatccccatcaaataattaagttgttgaacagttttattagtttttgtcacaaataagtcttgcatctttgcatttggtctgttattgaagtcaattgcatgctcttgattttc

SEQ ID NO: 6016 - DNA, 1372 bp, Glycine max
tcgagtcagctacgtaggcccccccccctctttctgcttagtctctaccctcttgattgcttttgttagagagaaaaagagcaatggcaatggtgaagtctcccaataagcaagtgaacctcttctactcccttgactgcgaggaccttgcccacaacgttgctcttcaatcacccaacatcattctccagaatatcaaatggaggtcatttgctgatggatttccaaatatatatataaataatgcagaagaactccgaggtcaacatgttgctttcttggcatctttcagctcccctgcacatgtctttgaacaactttctgtcatatatgcactccctcgtttatttgttgcttccttcacattggtattgcctttctttcccactggatcctttgagcgaatggaggaagaaggagatgtagcaactgccttcacccttgctaggatgttgtcaaatattccaatttctagaggtggcccaactagtttagtcatatatgacattcatgccttgcaggagaggttttattttggagatgaagtcttgcccttgtttgagaccggtattcctctcttaaagcaacgtctgagtcagcttcccgacgctgataatgtagttattgcatttccagatgacggtgcatggaagcgattccacaagcagtttgatcatttttcactggttgtatgtactaaggttcgtgaaggtgacaagaggatagttcggctcaaggaaggcaacgtctctggtcatcatgtagtcattgttgatgatttggtccaatctggaggcaccctgattgagtgtcagaaagttttggcagccaatggtgcagcaaaggtgagtgcctatgtcacccatggcgtgttccctaaccaatcatgggagcgattcactcataaaaaagacaccttggagaatgcatttgcctacttctggatcacagattcttgccctcttactgtcaaagctatagcaaataaagctccttttgaagtgctgagtctagccgggtctattgctaatgctctacaaatttgaaagcaaaaattattcaaggggaaagcattgaactttgtgttaaaagggatactcaactacaatttttagcacatgaaacctgctaatttaatttgtcttgttctggactggactgtgacctgattgagtctcaactctggtacaagacctttgaatgcaaatcatctaatcttaccttaacattactcatcatcaagcatcggaatttgtagtcattgtcgcatgcttgaaaatatgtccgataaagaatctttgtagaaatggcagttcttcaaagatcctctagtgttttaatttagattgacaaaccttagatcaaaaaaaaa

SEQ ID NO: 6017 - DNA, 1964 bp, Glycine max
gcaaagggcggtggtgtggtgcttgttgtggttggtggtggaggccgcaggataagcggcaaagtaaggtgaaggttaggggagagaaagaaagaatcaaatcaaccaaacaaaagaaccccatttaagaaaatatatagaaagaaaaaaaaattgattaaaagattgttctttttattaacaacaacccgtcatagttttaaggccatttaattggttcttattgtgcttgtgtgtgtgctataaatccttcgtggtttttggtgaccctttgggttctatagttagtctaaggtaacccactttgagaattctcataaagttgcatgcttttggattggaaggttgttgcaatggggaaggttgtgttgttgtttctttgcatggtattggtggtggtgcctttggcttgtactgattcaattcagaagcttgaggttcagaagcacttgaagaacttgaataggcctcctgttaggtccatcaagagtcctgatggagatgttattgattgcatccatgttacacaccagccagcttttgatcaccctgacctcaaaaatcacaagattcagatgaaaccaaatttccatccagaaggtcacccttttggagaaagcaaagtctcttcaaattccaagcctattactcagccgtggcaccaaaatgggaggtgccctgaaggaacaattccggtccgaaggacgaaaaaggatgacatgttaagggcaagctctgttcagcattttggaaagaagaagcaaagtagcttccctcagccaaaacctgcaaaacctctacctgacatcatccgtcagcgggcccaccagcatccagcatgccatagcgtatgtggagggagataagtattatggagccaaggcaaccataaacgtctgggacccaaaaattcaacagcccaatgaatttagcctttctcaaatgtggattttgggtggctcttttggtcaagatctcaacagcattgaagcaggttggcaggtcagccctgatttgtatggagacaacaatactagactcttcacttattggacaagtgatgcatatcaagctactggttgttataatctcctttgctctggctttattcaaattaacagtgatatagccctgggagcaagcatctccccactttctaagtatagctcttcccaatatgatatcagcatcctggtctggaaggaccccaaagagggtaactggtggatgcagtttgggaatgaccatgttatgggatactggccggctcctctattctcgtacctctctgacagcgcgtcaatgattgagtgggggggagaggttgtgaactctgagtccgacggccaacacacctcgactcaaatggggagtggccatttccctgaggagggttttggcaaggctagttacttcaagaacattcagattgttgatggtgacaacaagcttagagctccaaaagaccttggcacttacactgagcaagatagctgctacaatgtccaaactggtagtgctggagattggggtagctacttctactatggtggtcctggtagaaacccaaattgcccttgatcattcatgttaatcaaacaaagctgaaaaaaaaaaaaaacaaaaaaaggtgttatttttatctagtgtagttattttagtaactttgtggtaccacttagctttgtggtgtataatgaagctcctagtctctttgaagtctccaaaaaattgttggagaaaaggggtggtgggtttctttcttagatttacaagaaacaagtttcttaattggttttccctgtttatattatatatatttgttgtttttgtttgctcctctctctggagctgtgaaggttgaggtgtgactgtgaacagaatattctattatggaacaaggagactgtattttttatattttgctaccatgttttgattagtgaaaagctgtcttaataagg

SEQ ID NO: 6018 - DNA, 2063 bp, Glycine max
gtaggattgtgaggaacaagaccacaaataaggaactcacaatagagtggaatttgaagggcccctctctcactcaaccctgtcaaaggtgtcaagcacattcgtttgcccgggtcgtccgcgcgtccggtggtgtggtggtgcttcttgtggttggtgttggggtgcgcaggataatcggcaaagtaaggtgaaggttagggagagaaagaatcaaatcaaacaaacaaccccatttaaaaaaaatatatatagaaagagaaaaaatatataaagaagattgttctttttattaacaacaacccaccatagttttaaggccatttaattggttcttattgtgtttgtgagtgtgctataaatccttcgtggtttttggtgaccctttgggttctatagtgagtccaaggtaacccactttggattggaaggttgtcgcaatggggaaggttgtgttgttgtttctttgcatggtgttggtggtggtgtctttggcttgtgctgattcaattgagaagcttgaggttcagaagcacttgaagaacttgaatagacctcctgttaggtccatcaagagtcctgatggagatgttattgactgtatccatgtctctcaccagccagcttttgatcaccctgacctcaaaaatcacaagattcagatgaaaccaaatttccatccagaaggtcacccttttggagaaagcaaagtctcttcaaattccaagccaattactcagccgtggcaccaaaatgggaggtgccctgatggaacaattccggtccgaaggacgaaaaaggatgacatgttaagggcaagctctgttcagcattttggaaagaagaaggataggagcttccctcagccaaaacctgcaaaacctctacctgacatcatcagtcagagtggccaccagcatgccatagcgtatgtggagggagataagtattatggagccaaggcaaccataaacgtctgggacccaaaaattcaacagcccaatgaatttagcctttctcaaatgtggattttgggtggctcttttggtcaagatctcaacagcattgaagcaggttggcagccctgatttgtatggagacaacaatactagactcttcacttattggacaagtgatgcatatcaagctactggttgttataatctcctttgctctggctttattcaaattaacagtgatatagccctgggagcaagcatctccccactttctaagtatagctcttcccaatatgatatcagcatcctggtctggaaggaccccaaagagggtaactggtggatgcagtttgggaatgaccatgttatgggatactggccggctcctctattctcgtacctctctgacagcgcgtcaatgattgagtgggggggagaggttgtgaactctgagtccgacggccaacacacctcgactcaaatggggagtggccatttccctgaggagggttttggcaaggctagttacttcaagaacattcagattgttgatggtgacaacaagcttagagctccaaaagaccttggcacttacactgagcaagatagctgctacaatgtccaaactggtagtgctggagattggggtagctacttctactatggtggtcctggtagaaacccaaattgcccttgatcattcatgttaatcaaacaaagctggaaaaaaaaacccccgaaaaaaactaggtgttattttcatctactgtagttattttagtaactttgtggtaccccttagctttgtggtgtataatgaagctcctagtctctttgaagtctccaaaaaattgttggagaaaaggggtggtgggtttctttcttagagttacaagaaacaagtttcttcattggttttccctgtttatattatatattatatatatttgttgtttttgtttgctcctctctctagagctgtgaaggttgaggtgtgaatgtgaacagaatattctattatgggacaaggaaactgtatttttttatattttgctaccatgttttgattagtgaaaaaaaaaaaaaaaaaaaaaaaaaaaaaaa

SEQ ID NO: 6019 - DNA, 1494 bp, Glycine max
cggccgctcgagccggcttttcatcctcaatcttctccatagcgtgtgcttccattccatggccaaaccgaaggctccaagacgaaccctagagtcatactcagtcaaacacataagcaaaaccattagagctggcgattgcgtgctcatgcggccctccgatctgtcgaaaccgtcgtacgtggcgaggatcgagcggatcgaagccgacgcgcgcggctccaacgtgaagattcacgtccggtggtactaccggccggaggagtcaatcggcggccgccgccagtttcatggctccaaggaggttttcctctccgatcacttcgatgttcagagcgccgacacaatcgaagccaagtgtacggtccacagcttcaagagctacacgaagctcgatgctgtcggaaacgacgatttcttctgtcgttttgagtacaattcctccaccggcgccttcaatcctgatagagttgccgtgtattgtaaatgtgagatgccttacaaccctgatgacctaatggtgcaatgcgagggctgcactgactggttccatcctgcttgtatagacatgactgtggaagaagccaaaagacttgaccacttcttttgtgaaagttgctctgctgaaggtcaaaaaaagttgcaaaactctcattctgcttctagacactcagatacaaaggtggatactaaacgccgtcgtaggtaaaatagtgtgatagtatataaagcataaaatgagttagatctataatggatgtactgaagatcttgcttttctaatcctgggtaggggccagacaaacacagagacaaagttatctagtagtaagctgtagtctttctactttcatggaaagagactagtttggaaatgtttgtcatgtctatttggtttgagtactcatcctgtttcctttggaagtggaggacgtgtttatgtaattatttagtgtagattctgtgtcacttctctctggtccttgttctcgggcgttttgtaaagtattttgacttatttataagcagtagacactttattctttctttttactgatagaggtaggcaatgatctagagtttctatacaccgataatggcgccgtgttgttggcgtgaaaagaattgaggataaaaaaatatacgatattgggttgtaatttaattcagcctttcgttggcaaagacctctgaaagaacttgctagagacattgcatgccgatagtttctcacctctgtatcatctggcgtgatgacgatggagattggaaaatacgttatttttttggaccatagaaaaacaaatctatattggagtactgcctatggtttgaaccaatcaaagacgcaatacactccactaacggtgcttgtgaatggactagagtggaatgtcgcggagtgaaatagaacagaacgacattgaatgtagtaaaaatattgttcgaatattttatgatggggtagaataaaaacatcatgttattgcgaat

SEQ ID NO: 6020 - DNA, 1067 bp, Glycine max
atttcatcctcattcatcctcacacgaccccgcctcccctcactccacgccaccgtcgtggctccacccccgccaaaatcaccctcccaattccatttccacttttgcccctccccggcgctcccaattcccaattcgccccaatctcagttcgatttcgcagaacactggattccagaagctcggttcttgatcgccaagaaacggagccctaaaaataattcttttagggtttctctgtctctgtgtggttttggcactaaaacttttgatccgtttgagaatgggggatcgaggagaagacgaggatttgcaaatggcgattcggatgagcatgcagcgtgggacgccggagccgaagcgcagcaagccgcttgacgccgtcgccggggcggtttcggggtcgccagaggagtctccggagtacaagacccggcgacgggagctcatggcggcggcggccgagaagcgtatggcggcagcggcgagggtttcgccttctccgtcaccgtcgccatcaccggtgaaaaagggcggtgaattggggaggagtgaggaagattcgcgtttgaagagtgtgaatttgagtaaggagctttctgcggaagaagctaatcaattgtttggtatggtgtttgggaatgaagtttctaagggcattcttgcacagtggagcaacctgggaattcggtttagctctgatcctgtaacatcaatgggcctagtgcagcatgaaggcggtccctgtggcgttttggcagctatacaagcatttgtgcttaaatacattcttttcttcagtgatgagttgaaagatgtgtcatgcatgtcaccggagggtctgggtgcgtcatttaaaagtcagtctattccatcatataatttttcttcactcactgaaggtgaaaaagtaagattctcctatgctcagcgttttgaagggatttcagaggatgagagcccttgtaagaagtatgggtgaaattttattttcatgcggaagtaatagaagggctgtgattgcaactttgagcatttccgagaatgacattcagcgttttgaaggg

SEQ ID NO: 6021 - DNA, 1428 bp, Glycine max
  misc_feature (6)..(6): n is a, c, g, or t
tcaagntacgtaggccccccccccccctactgtgtgtgtaagagagaaacggtgaataactaaagcgtgatcctaaagcagaagagcagcgaaatcagtgaaccacgaagatgaagatgaagacgaagacgccattgaagcagctgaagctcgcggttcctgctcaggaaacccccatcacgtctttcctgactgcaagtggaacattccatgatggagatctactcttgaatcagaaagggttgcgtcttatctctgaagaaaaagaatcacggccttcagatggtaaggaactggaatttgacttcttgctggacgatcttgagaccatcaaagtaattggaaaaggcagtggtggtgtggtacaacttgttcgccataagtgggttggaagattgtttgctttaaaggttattcagatgaatatacaagaggatattcgaaaacagattgttcaggaactgaaaataaatcaagcgtcacagtgtccacatgttgtagtttgctatcactcattctatcataatggagtaatatctcttgtgttagaatacatggatcgtggttctctagcagatgtaatcaaacaagttaaaacaattctggaaccatatcttgctgtggtttgtaagcaggtattgcaaggccttgtttacctgcacaatgaaaggcatgtaatacacagggacattaaaccatccaatctgttagttaatcacaaaggggaggtgaagattactgattttggtgttagtgctatgctggcaagctcaatgggccaaagagatacatttgttggaacttacaattacatgtcgccagaaagaatcagtgggagtacttatgattatagcagtgacatctggagtttgggtatggtagtgcttgagtgtgccataggacggtttccttatatacagtctgaagatcagcaaagctggcctagtttttatgagcttctggcagcaattgtggaaagccccccaccttctgctccacccgatcagttctcccctgagttctgtacattcgtgtcatcctgcatccaaaaggatcctcgggatagattaacatcattggagctactggatcatcctttcataaaaaagtttgaagataaagatctagatcttgggattttggtaggtggcttggaacctcctgtaaactttccgagataatttttacaatagagtgtaaaatttgtactagacagccacaactcttggtgatggaacaaggaaatttcttgtcagttatgctatattagatatgattataccggtatcagtcctaagtttggtgactttattacagttttatgaaaactgatttgtataaaagttgtttcttgtttgtattaagaaaaacttaatcattttatttgatattattctctttagcaataaaatttctctagtctgacac

SEQ ID NO: 6022 - DNA, 1254 bp, Glycine max
tacggctgcgagaagacgacagaaagtcaatcctaaaatcacaatacccgaccacaaggtcttttttttctctgtggcggcatcattggcaatggttaaaagttaaaacttcaacacacagaatccagattcgtcgagaaagagaaaagagaaaagaagaatgggcgattaccatttcgtgtacaaggatttagaaggggcttctactcaatgggacgatattcaaagaaagctcggaaatttgcctccaaaggcacccgctttcaagcccccacctttcacccctgcctctgatgatcaacccaaagacaaaacatggatcgattccaaaacctccgaggaactcgaagacctcgaagacaacctcgatgatgatcgcttcctccaagaatacaggaagaagaggctggctgagatgcaagaggcagcaaaagtattgaggtttggatctgtgattcccatttcgggatctgatttcgttcgagaggtgtcacaagctccatctgatgtttgggtggttgtcatcctatacaaagaagggattcctgaatgtgggttgttgatgcaaagcattgaagaattggcactaagatatccttcaacaaaatttgtgaagataatatctactgattgcataccgaactacccggatcggaatcttcccactttgttggtgtacaacaatggagcagtcaaaggaaattatgtgggtttgcatagtttcgggcgaagatgcactcctgaaggtgttgcattagtgttgtgccaatcagatcctgtacttaatgatggccataatggaaatgaggctatcattgaaggagtccgcaaacggtttatagagaaagttgttgctgatcatgaagagggtggtgatgatgattactctagcgattaacattttttcttgtatttgttgtgttgctttctttggagggggtatgcttttctaactttcttttggtctcacttttataattttgcctaaaaaaaagagtaacggatctgttattaaatacttaaattatgcgtgttgtaggcttttcttgttcctagtaattagatggttttatcaggtattatgtgtatcaaagtgattttatgttttttttttttgtattttttattatatgatttgtattgtaataacaaacatatgaatatgtaacctttgtgtgatgattagaacgctctaaaaaaaaaaaaaaaaaaatttagtcgaaaccgccgtcctccgaggggggggcccgtacc

SEQ ID NO: 6023 - DNA, 2673 bp, Glycine max
ttgaggcaattttgtgcgtactaggaaaatatgataatgctgagaggactgaggagcgtgcagctgggtggtatcgtttgaccagggaaattctcaagttaccagatgcgtcatcaaaggaaagttctaaagataaacagaagaccaagcgtcctcaactgcttattaaacttgtaatgagaaggttagagagttctttccgtagcttttctagacctgtgcttcatgcagcagctagagttgtacaggagatggggaaaagtcgggctgctgcctttgctttgggcatacaagatgttgaagaaggagcacatgtcaatacatttgctgaggctactgattataatgattcagatgaaagcacacatcccgaaagcattcgaagaacttcttcagtatctaatttaaccgctggcagagataccgtcgcgggtatgttggcttcattaatggaagtggtacggacaacagttgcctgtgaatgtgtttatgtacgagccatggtgatcaaggcattaatctggatgcaaggtccatttgactcatttgatgaactagaatttattattgcatcggaactttctgatccagcttggccagcagcactattgaatgatgtactactcactttgcatgctcgttttaaggcttctccagatatggctgttactcttcttcaaattgcaagaatatttgctaccaaagttcccggaaaggttgatgctgatgtgttgcaactgctctggaagacttgtcttgttggagctggtcctgatggaaaacataaagctttagaagcagtcacaattgtacttgatctaccacctccgcagcctgggtcaatgcttggtcttacttcagtggactgcgtggcccccccccccccaaagtctgctcttgcattacaaagactagttcaagctgctgtatggtttcttggggaaaatgcaaattatgctgcttctgaatatgcttgggaatctgctaccccgcctggtactgcattgatgatgttagatgctgataaaatggttgctgctgctagttctcgtaatcctactctagctggtgccttgacaaggctccagaggtgcgcattcaatggcagctgggagattcgaattattgctgctcaagctcttacaacaatggcaattagatctggtgaacctttcaggttacagatttatgagtttctgcacactttggggcaaggtggtcttcagtcacagttctctgatatgcatcttagtaatggagaagatcaaggagcaagtggtacaggccttggagttttattaagtcctatgataaaggttctggatgagatgtatagagcacaagatgatttgatcaaggaaatacgcaatcatgacaatgctaagaaagaatggactgacgatgaactgaagaaactatatgaaacccatgaaaggctgctagaccttgtttcattgttttgttatgttccaagaacaaagtatctacctttgggcccaataagtgccaaactcattgacatctatcgtacacgccacaatattagtgcatctactggtttgagtgatccagctgttgccactggtatatctgaccttgtctatgaatcccaaccaccacctgctgagcctgatacacttgatgatgacctagtaaatgcttgggcagcaaaccttggtgatgatggcttatgggggaacaacgcaccagcaatgaatagggtaaatgaatttctggcaggtgctggaacagacgccccagaagttgatgaagagaatatgatctctaggccttcagttagctatgatgatatgtgggcaaaaacacttctagaatcttctgagctagaggaagatgatgcaaagtcattgggatcatcatctccagattcaacaggatcagttgaaacttcgatatcatcccactttggaggaatgagctacccttcgctgtttagttcccggccacaaactacggataaggcaccagcaagccgaggctttacgtatgaaggttatggttctccaataagagaagagcctccgtcatactcatcctctgtcatacaaagacacgagtcatttgagaaccccctagcagggaatggatcacatagttttgggtctcaagatgatgagcaagtttcatctgcaaatcctcaacatggaagtgcactttatgacttcacagcaggaggagacgatgaattgagtttaaccgcaggagaagaagttgagattgagtacgaagtagatggctggttttatgttaagaagaaacgccctggtagggatggcaagatggctggactggttcctgtattatatgttactcaatcttgaatcatgtacgtaatctgttgtaacttccgattcatgcaaatggcctttttgctttattttatccagtgttgctttcattcaaagtttccatgtccccttgtagcatgccattccggttgttctccttctatcctgcttccctaattcgtctagttgtatgctatcaaagtatcattttccatgctaattgcttgtgagtgtctagtcattcatcataatagggctttcaatctattatatttttattttacatacagctactggtgtacgagtgtttgttcttagacagggaattcaatatatcaagtgaaagtttcacgtttttgaagcc

SEQ ID NO: 6024 - DNA, 1577 bp, Glycine max
gactaatacattgaagacacgcagacgggatttggcggatgttttgataaataggggagtaaatttggatcctttaagcaagtggtcaaaggttggacttgttgtgtatgattctcaagtgcctattggtgccactccggagtatatggctggtttctacatgctgcaaagtgcaagctcttttctgcctgttatggctttggctcctcaagagaaggaacgtgtcattgatatggcagctgcacctggtggtaaaacaacttacattgctgctctaatgaagaatactggaataatttttgcaaatgaaatgaaggtaccacgacttaagtcactgactgcaaatttgcatcgcatgggtgtatctaacactgtagtgtgtaactatgatggaaaggagcttccaaaggttttaggtgtaaatgctgttgatagagtattattggatgccccttgcagtggaactggggttatttccaaagatgagtctgttaaaacctctaaaagtctggaagatatacagaaatgtgcgcatctacagaaggagctcattcttgcagcaattgacatggtggatgctaattcaaagtctgggggatatgttgtttattctacatgctcaattatggttgccgagaatgagtcagttattgactatgcactcaaaaagcgggatgttaaattggttccttgtggacttgattttgggcgtccaggatttacaaagtttagggaacaacgttttcacccttctttagaaaagacaaggcgtttctatcctcacgtacagaatatggatggtttttttggtgcgaagttgaaaaaaatgagcagctcaaagcctggtgcaatatcatcagaaacagccgagaaagaagacactacctcgttcgtggaggaaaaggagaaatcaagtgatggcataaaagaaaatggcaatgtatcttctgaatcagaaaaggggaagaaaagaaagttcccctcaaaaccaagtaacggtctaaaatcaaatggcaaagaatcttcagaatctgaacccaaaaagaggaataaaaggcaatttccatctaaggaagagatttcaaaagccagggaggataagagaaatgctttaagagaaaaaaggagaaaaggtggcaaacaacagaagaacaaaaaatgatcaaagccagtggcaatacatgaggcagttatagcaccgactcgactcgactcgactcgaagatggaagtactggggtggttgcttgtcataggagtgcaccccggaatcagtggcatgccctaatctagggcacatttttgttttgtttttaaggttattatttagccgaggtatattttataacttccatctgcaaaggtgtaaatcagaaagaaaaaatatttctttttcgtggcatcaattatttggggtttattttcttatcattatcttcaatcttcatgtctattgtcttggatgttaattatccttctttccattacacgtgcttcaaatattgatgattcaccatgtttcagatgttactgttatgttttcatgatcaagtctatctattattaaacacttaatag

SEQ ID NO: 6025 - DNA, 2393 bp, Glycine max
tgtttctcaatttttcctttccttttcgtttcccttcctactttttcttttatcacatccaattaatgttccatatcctgtgtgcataaattatgttcaagtaacatttctgttattgttttcataaagtttgattaaaatttgtgttgtaggtgtatggccagaatctccgagctttagagatgaggggatgggacctataccatcaaggtggaaaggaacttgtcaacatgatcacaccggcttccgttgtaacaggaagctgataggagcaaggtacttcaacaaaggttatatggcccatgctggagctgatgcaaaatttaaccgttcactgaacacagcacgagactatgagggtcatggatctcacacactatcaacaataggaggaacctttgttcctggggcaaatgtattcggcttgggaaatggaactgccgaaggtggttctcctagggcccgtgttgctacttacaaggtgtgctggccaccaattgatggcaatgagtgctttgatgctgatatcatggcagcctttgacatggccatacatgatggtgttgatgttctttccctctctcttggagggaatgctacggattactttgatgatggcctttcgatcggggcctttcatgctaacatgaaaggcatccctgtcatatgctctgcagggaattacggaccaacacctgccactgtttttaatgttgcaccttggatactaacagttggtgcaagcaccttggacagacagtttgatagcgttgttgaactccacaatggacagcgcttcatggtttgatttgatttgtgttattcataaccgcttaaatatcatctgttaatttactcatgatccacacgaattacttactttactcactctagaggagctaattccgtttcccactcaaatatttcatccttggttatcagggagcaagcctttctaaagctatgccggaagacaagctttacccactcatcaatgctgcagatgcaaaagcggctaataaaccagttgaaaacgctactctctgtatgcgaggaacaattgaccctgagaaggcgaggggcaaaatattagtttgccttagaggtgtcactgcaagagtggaaaagagcctggttgctttggaggccggtgcagcagggatgattctttgtaatgatgagcttagtggcaatgagcttattgctgatcctcatctcctgcctgcatcacaaattaattataaagatggtcttgctgtctatgccttcatgaattcaaccaagaatccgttaggatatatttatccacccaagaccaagttgcagataaagcctgctccagccatggcagctttctcttctagagggcccaacacagtcacaccggagatcctcaagcctgatgtcattgctcctggtgtgaacattattgctgcctactcagaaggggttagcccaacaaatctgggatttgataagcgcagggttccttttatcaccatgtctggaacatccatgtcttgtcctcatgtggctggagttgttggccttctcaagactctccaccctgactggagtccagcagttattaaatctgcattaatgacaactgctaggacaagggacaacactggcaagccaatgcttgatggggggaatgatgctaaggcaacgccatttgcctatggatctggtcacatcagaccaaaccgtgccatggatcccgggttggtgtatgacttaaccaacaatgattacctaaactttctttgtttctctatctataatcagagtcaaatagagatgttcaatggtgctcgttatcgttgtcccgatataataaacattctggatttcaactaccctacaataacaataccaaaactctacggctcagttagtgtgacacggagggtgaaaaatgttgggccaccaggcacttatactgcaagactcaaagtaccagcacgtctttccatatctgtggagcctaatgtgttgaaatttgacaacattggtgaagagaagagctttaagttgacagtggaagttacaagaccaggtgagactactgcatttggaggtataacttggtcagatggcaaacgtcaagtgaggagtccaattgtagttgggggggttagagggtagatcattatcaagtgataacacataattaattaggatgacgtcttttttttttttctttttctggtttatattattgggagattgggaaaagggaaatgcataacttaaaatggttggttttgtcattttctattgattagttactctcacttggaagaaccacaatctgtcaatttgagaacaaaataaataaaattttatattaaataaattttcattaaaaaaaaaaaaaaaaataaaaa

SEQ ID NO: 6026 - DNA, 1742 bp, Glycine max
tcgagtcagctacgtaggcccccccccccccccaattggatactcatgatcctctgcattgctgtgaccattggatttagggacacaaaacacatgggaaatgcttcagggttagcagtgatgaccgtgatgctggtgacaacatgccttacttctttagtaattgtagtttgttggcagaaaccccctataatagctctttgcttcctgttgttctttggctttattgaactgctgtatttctcagcttcactgacaaagttttgtgagggtgcctggttacctattctgctggccctattcctcatgattataatgtttctttggcactatgcgaccatcagaaaatatgaatacgatcttcacaacaaggtgtcactagattggcttctagccttaggtccaagcttgggaattgctagagtcccaggaataggcctagtgttcactgacctcaccactggcatcccagcaaacttctcccgctttgttaccaacctccctgcatatcaccgcatccttgttttcgtgtgtgtaaaatcagtgcctgtccctcatgtccctgctgctgagaggtatctggtaggccgtgtaggacctcctgctcatcggtcctaccggtgtatagtcagatatggatatcgcgatgttcatcaagatgttgattcctttgagtctgaactagtagcaaggcttgctgatttcatccaatatgattggtaccgatctaggaggagtagcatgagcattgaggatgatggttcaaactccaatgaatcatcaagttacagattaactgtaattggaacaactggtttcaccatccaaccaggatacgagagtggcggggagagtgtgcagcaagcaagtgtatctgttggtttcccaactgtacaaagtgtgactgatgttattgagatggaaccggtcatgactgagaggagagtgaggtttgctattgaagatgagcctgagagtgatgcaaggtctgagacaggagtgcaaatgcaggaagagttggaagatctttatgctgctcaagaagctgggattgccttcattctagggcattctcatgtaagagcaaagcaaggctcatctgtactaaaaaagttggcacttaactatggctacaatttcttgagaaggaattgtagaggccctgatgttgcacttaaggttcccccagtttctcttttggaagttggcatggtttatattgtgtagaatatctaacttgtaattagcttctttttttttggtgtttttcatatagaggacataggcttcaatgccatagcagtgtgcagtttccaaaaggattttgtgaatgagactgtgggaatgactctacccttaaaatttaacgtgatttatatagaatgcttgagtgcatgaacagaaaggcttatatagatgtatgctaccgttccctgttcttgatgctactcttaagatctaagaagttttccaaattgtaagattaggaggtacactaacagcaataaacttgtaatttctttcaaaaaaatgtgtgaactgcagattttataaaactaacaaagatcatctccatgaaatagatattttacgcgtggagtaatattaagggaaagaatagaggtgaacaaacggaatcgtgtgtccgaacatatattggccataattatgtgtgagaataagaaaaaaaatccattaataccagcattttttgcaactaaagaaataaaataacctttcat

SEQ ID NO: 6027 - DNA, 718 bp, Glycine max
  misc_feature (669)..(669): n is a, c, g, or t
  misc_feature (706)..(706): n is a, c, g, or t
  misc_feature (710)..(710): n is a, c, g, or t
attccgaagtccaaataagtttctatgtctcagttccagactgcggctcgtcgccggtgcttatcttagctattctagcttctgttgtgggaagccaagcaatcatcagtggaacattttctatcataaaccagagccaatctctgggttgcttcccaagagttaaggttgttcatacatctgacaagatacatggtcaggtctacattccctgaaattaattggttactcatgatcctctgcattgctgtgaccattggatttagggacacaaaacacatgggaaatgcttcagggttagcagtgatgaccgtgatgctggtgacaacatgccttacttctttagtaattgtagtttgttggcagaaaccccctataatagctctttgcttcctgttgttctttggctttattgaactgctgtatttctcagcttcactgacaaagttttgtgagggtgcctggttacctattctgctggccctattcctcatgattataatgtttctttggcactatgcgaccatcagaaaatatgaatacgatcttcacaacaaggtgtcactagattggcttctagccttaggtccaagcttgggaattgctagagtcccaggaataggcctagtgtcactgcctcaccactggcatcccagcaaacttctccgnttgtaccacctcctgctatcaccgatcctgtttcgtngggnaaaacagg

SEQ ID NO: 6028 - DNA, 2691 bp, Glycine max
tcccacgccccagactaaatagtgctaagaactctaatggtggacaagatgaatatgctgatattcaagtcccttcagatttctttgctgctagttttctctatcagaaacaccacagcagaaaagaaaacccatcacacaaaacacacatacataattcacatggacaagttcaacatgccagagagttttaacgaccatctcctctggtttgattcatcactaaaatcagtatcagactcagcagagatgctctacacatataaaaaagtagctcatggcttctctacaaggctaactacgcaagaagcagagttgctctcaaagcaacctggtgttctctccgtcatcccggaagttagatatgatcttcacacaactcgaacaccagagtttctggggttggccaaatacagcactctttcactggcctctggcaaacaaagcgatgtgattgtcggagtgctagacactggtgtgtggcctgaactaaagagcttcgacgacaccggactggggccagtacctagtagctggaaaggtgagtgtgagagaggtaagaatttcaacccatcaaactgtaataagaaacttgttggtgcaaggtttttctcgaggggctacgaggcagcctttggacccatcgacgaaaagacggaatcaaagtcaccaagggatgatgatggccacggaagtcacacctcaacaacggcagcaggttctgcagttgtaggagcaagcctctttggttttgctaatgggacagcaagaggcatggccacacaagccagacttgcaacttacaaagtgtgttggcttggagggtgctttacatcagacatagctgctggaattgacaaggccattgaagatggtgtcaacatcctttccatgtcaattgggggaggtttgatggattactacaaagacactattgcaattggaacttttgcggccactgcccatggaatactggtttccaattcagcaggaaatggtgggcctagtcaagcaactttgtctaatgtggcaccatggctaaccacagtgggtgcgggaactatagaccgtgatttccctgcctatatcacccttggaaatggaaagatgtacacaggggtgtcactttacaatggcaaactcccacccaattctccactgccaattgtttatgctgcaaatgtaagcgatgaatcccaaaatctgtgcaccagaggtactttgattgctgaaaaagtagccggaaaaatcgtgatatgtgaccgaggagggaatgctagggtggaaaagggtttggtggtgaagagtgctggaggcattgggatgatactatcaaacaatgaagactatggggaagagttagttgctgactcctatctcctccctgcagcagctttgggccagaaatcaagcaatgagttaaagaagtatgttttctcatctcccaatcccacagctaagcttggatttggtggcacccaattaggggttcaaccatccccagtggtggcagctttcagctcaagagggccaaatgtgctcacaccaaaaatactcaaaccagacctgattgctccaggagtcaacatcctagctgggtggactggtgcagttggaccaactggcttgactgaagacaccagacatgtggaattcaacatcatttcaggcacttccatgtcctgcccccatgtcactggcttagctgcccttcttaagggcactcacccagaatggagccctgcagctataaggtctgccctcatgaccacagcttacagaacctacaaaaatggccaaaccataaaagatgtcgccaccgggctaccggctacgccatttgattatggggccggacacgttgatccagtggctgcgtttgatcctggtcttgtgtatgatacttccgtggatgactacttgagcttcttctgtgccttaaactacagttcctatcaaataaagcttgttgcaagaagagacttcacctgcagcaaaaggaacaattacagagtggaagatctcaattacccatcttttgctgttcctttcaacacagcttatggagtaaagggtggttctcgcaaaccagccactgtccaatatacaaggactttaacaaacgtgggtgccccggcaacgtataaagtttcggtgtcgcagtctccctcggtgaagattatggttcaaccacaaacacttagtttcgggggacttaatgagaagaagaactacacagttacgttcacgtcttcgtcaaagccttctggaacaaacagctttgcttatctggaatggtcggatgggaaacataaggttactagtcccattgctttcagctggacttagactctgatttttaaaagccctaactttgaattacctgttgcaagcaaacgtgctcgtcttcatgaataattgtatctctttgtttttattctgcttttggtgcagcaaaaggggcactgatgttatgtttctctttgctgtactcctttgaaaattagtacagaatgattgtacagaaaagaaacagggtaatggtgtacctgaataaatgacagtaagctctttcttatcccaaaaaaaaaaaaaaataggtagtcccacttgggttataaggttattcatctatatccccaaagagcaataaaacaactacacttgccatgatctgatagacatttacct

SEQ ID NO: 6029 - DNA, 1449 bp, Glycine max
cccactcgtccgttacgatttggatatttagtcattgaataaaaattcaaatttgaaagttttgttcaccgtaacgcgcgactgaaacaaggaaagtagaaacttttgatcattggttggtttcctttgagatttaacggcgtgtattcgaattcagatttaacgtttgttttattggttggttggttggttcctttgagaagaagaatgagtgggggcgagaaagaggctatggcagaagtgaaggagtggctggtgaagacgttcgaaggcgctgggaaatccgttccggaattcgaatacacgccgcgcagcgtcaagcatttgaaccatctcatgactctctccaaatccaaagacgaagccgcgcgcctcgttgctcgcgatttccgcctcaaggcctccgagtaccgatcccaagctgcaaggattagggagattttggagaatttgggattggcacaggagagcttgccttctaatgtggttacatccgcacaagttcttgcgaatgtggccaacttgttgaatataagagatactgaaatgagtagctttcttgtggcaatgggtgatatttccttgaggaagactgaagtggaggaaaaaagggccgaagtgaacaaggaatccaagcttctacttgattataccagaaaggccatagctaggctaacatatttaaaaagaacacttgctcagttagaagacgaggttgctccatgtgaggctcagaaggaaagttgggagacaaacttaaaagtaatggctgctaaagaaagacagtacaaccaacaatgtgacaactacaagagaatgctggatcgttctggttataccccagaggttagccatgggattttggttgaaatggccgagcatagaaaggagctagagaagaaaactaagcccatccttgatactctgaggagttaccaagatttgcctccggataaagctttggctgccttagcaattgaggataagaaaaggcagtatgccgatgctgagaagtatcttgaagatgtattgcagtcagctcttgctagttctgagtgatttagtactataatttttcatttattttttttgtaaatttgcttgcttttaagattctatttttcaaccttgctaaagatgtgtatggacaaatgtattacgtaagttggctttgcttggactggactgaatgggatcaggtgcagttgtattttaaattgcacatcatgcggtcatcgtccaattctcaggaaaatttgttgcatataattctttcatatttcatcttaaaatcaaaattttgaatggtgagtatcacgattgcagagaatcctgaaccttgctatgcacacaatactgttttgttggttgtaatatcatgtttactcaataataatgatgatgtttggtagtaaaaaaaaaaaaaaaaaactcgagactagttctctc

SEQ ID NO: 6030 - DNA, 1361 bp, Glycine max
cttattttcgattaatgttatagaaagtattggaaaactgacgtaaatgaaacacatgtttctaatgattcaaaattggtcttatttaatcttatctgagtgttcagtaagaaattcattactcgaaactatttttgagccactagggtacgtgttcgataatactgtggtttctgttcttccagactaaggtaaacgaaagtgcgcaatgcatgcaagcagcaaaatgggtgaaaaatataaaccttggatcatctttcttcatctactagtaatcacgtgttcctgcaatagaagctgcagagccaggggattgattgaaacagaagacaaattcttcaaagcaacctcaaatgatcatcatgaaacagaacatgcacatgctcactctcacgtggatcacatagatccttctgtgatggtgtttttcaccatcgaagatttgaaggttgggaaaacaatgcctattcattttcccaagagggaccctgcaacatcccctaagttgtggccaagagaagaagcagatccacttcctttctcactgaacaaactcccaaaccttctcaaaatcttctctgtatctcaaaactctcccaaagccaaggccatggaagatacccttagggaatgtgagaccaaacccatcaaaggagaggtaaaattctgtgccacctctttagaatccatgcttgacttcactcaaagcattcttggcttcacatctgatctaaaagttttgtccacctctcaccaaaccaaatcaagtgtcactttccaaaactacactatgttagaaaacatcatagaaatcccagcttccaagatggtggcttgccataccatgccttacccttatactgttttttactgccacagccaagaaagtgagaacaagatttatagggtcccacttgctggtgaaaatggggatagggtggatgctatggttgtttgtcacatggatacatcacaatgggggcatggtcatgtttcatttcaagttctgaaggtcaaaccgggaaccacttctgtgtgccactttttcccagcagatcatctcatctgggttcccaaactgcaaccacaaggttttgcaaccatgtgactttagtgttagtgttgtgtgcttataattgtatctcaagactgtttgatgtttgagtttttctttctttgactactaaaagatgtgctcagtgggagctaaagaaataatgcaaaaacttattatcggttatttggcatatgtaagattgcttgttttttaattttcagtatgaagtgtgaactaagacacacatcttttaattttttggttgaactcttttattgttaaataatcaaaaaaaaaaaaaaaa

SEQ ID NO: 6031 - DNA, 1378 bp, Glycine max
caaatcctggcacaatattagttggtaatacagattccccggcggaggcccccccccccgatgccagtcctaggactgatatttctacagatggtgacactgatgacaagaatcagccgtatgatagaaatgaagcccttgctgctgtttccgactctagtgacagatcgaaagacaaatcagatcagaagactctccgcaggcttgctcagaaccgtgaagctgccagaaaaagccgcttgcgaaagaaagcgtatgtccaacagttggaaagtagtcgtttgaagctgacccaactagagcaagagcttcagcgagctaggcagcatgggattttcatatctagctcgggtgatcaagcacatacattgagtggaaatggggcaatgcaatttgatgcagaatatgcaaggtggctggaagagcagaatcgacaaattaatgagctgaaagctgctgtaaactctcatgcaagtgacactgaacttcgcatgatcgttgatggtatattggcacattatgatgagatttttaggctgaaaggtgttgcagctaaggctgatgttttccatttgttgtctggtatgtggaaaacacctgctgagaggtgttttttgtggcttggtggttttcggtcatctgaactcctcaagctgctggttagtcaattggagcctctcacagagcagcagctgatgggtattaccaacttgcagcaatcctcccaacaagcagaagatgcattatctcagggcatggaagcattgcaacagtcccttgcagagacattgtccaccggagcacctgcctcatctggttcatcagggaatgtggcaaattacatgggtcaaatggccatggccatgggtaagctagggacacttgaagggttcattcaacaggctgacaatcttcgccaacaaactcttcaacaaatgcaccgtatactgacaactcgccaatcagctcgtgcactccttgctatacatgactacttttcgcgtctgcgtgctctcagttcactctggcttgctcgccctagagattgatgggcgcggtaaatagtatggcaaattaattttcatggatccatcactagcaatacttggtcatcataactcttgacaagttttcttgtgttgttttgttgtactctttgtatcactgatgttagtgcttcattgagtcagtctagaaacgaaattggtgacaagaagtatgaatattactaataatattgtccattgtaattgttgaagggctttgttttttccatacaaatatagttgggccatatgatatattttaagggttgtttcagtcgccatagtttacccttggatctgagttcatacaaaattgttgagtttattctttt

SEQ ID NO: 6032 - DNA, 2101 bp, Glycine max
atcactcccaagacaccgctgatggcgtctcccgggccggccgggaaggatttcgatgaaatcatttacaagaaagttgaattgagtaaaaacaagcgtagtaggagactgactgctaagatgttgtttgaatggtttgtgtttgtgtgcattgcaagtagcttggtggctagtttagctgttggaaaacttaaaaggaccgagatttggggtttggggttttggaggttgtgtgtgcttgtgatggtgaccttttgcggcatgttggttacaagatggtttatgcacattgttgttttcttgattgagaccaactttttgctgaggaaaaaggtgctgtattttgtctatggactgaagaagtgtgtccagttcttcatttggcttggtttggttcttctcacatgggtgctgttgattaaccgcggggtccaccgaactgaactggcctcagagattttgaatggggtaacatggactcttgcttccctcctcattggagcattcctgtggttcgtgaagacattgttgttaaagatcttggcatcgaatttccacgtcaagtctttctgtgagcgaattcaagcatctctcttccatcagtacattctgcagaatctctctggacctccacttgtagaagcggctgcgtaggccccccccccccacagtgttggtcattttagttttaggagtacagatggtaaaggtggcacaaagaaagagactattgatatcgcaaagcttcaccagatgaaacaagagaaagtttctgcgtggactatgaaggttttggtagatgcaatgacaacttcagggctgtccacaatctctagtgcactagatgaaagtttcgatgaaggagaaaatgaacaaactgataaagagattactaatgagatggaagcaactgctgctgcctattacattttcaggaatgttgctgcccctggttgcacgtacattgatgaggatgaacttcggaggttcatgattaaggaagaagtgcgaatggtatatcccctactggctgaagcagaaacggggcaaattactagaaagtccttaacagactggttgttgaaggtttatcaagaacgcagagcattagcacatgccttgagtgacaccaaaacagctgtaaaacaactaaacaagctcgtgacagtactcctagtagtggtgaccataattgtgtggcttctactaatggagattgcgacaacaaaagtacttgtattcctctcatcgcagctagtacttgcagctttcatgtttggaaacacatgcaagaacatatttgaagctatcatctttgtgtttgtaatgcatccatttgatgttggtgatcgatgtgttattgatggtgttgagctattggttgaagaaatgaatatattgacaacagtcttcttgaagcttaataatgaaaaggtgtactatccaaactctgtcctggccacaaaaccaattagcaattattacagaagcccagatatgggtgaccgcgtagatttctccattgattttatgacaccagcagagaagattggggcactgaaagaaaaaataaaaaggtacgtggagagaaatccacaatactggcactccaatcatggcttagtagtgaaggagattgaagatgtaaacaagattaagatggctctcaatgttacccacacaatgaactttcaagagtttggggagaaaaccaagcgaagaactgaattggtgatggaagtaaagaaaatgtttgaagagctcaatatcagatacaaccttcttcctcaaggcattcatctcagacatattgaaccaaactcgagtgtgctcaatacatgattcagctgcatgcatgtgtgcctcctatgtttcatttcatctgtcaaataccaccagaccttttctttggttgatttaattcatgatagttgggagtggtgctttagtaaagtatatatatagggccttgattaacagacagtattaacaatttttttttccctagatatgattgtgaaattatgaattcaggactcttatgcttgactatacgaaccataaagtggatccaatgtaaaagtaaaatttcgtcccacaa

SEQ ID NO: 6033 - DNA, 1884 bp, Glycine max
cctcccccgctctcgatccctttgtgactccaaacaaagcccacacaccaacttcatttccattcacaatgtcaatttcctccacttccaactccctcattccccccaaatctttaatcccccaatcccaccccctcattcccaacatcaggcccgggctccggcccaagcctggcccatccccttccatcctcgccgtccacgccgccgagcccgccaaaaaccccgtcgtcaccgacaagcccaagccccaagcccaacaatctgcatccccggccgcggcccgtgcaaccaaatgggccgtggacagctggaagtccaagaaggccctgcagctgcccgaataccccaaccaggaggatctcgaggccgtcctccgcaccctcgacgccttccctcccatcgtcttcgccggcgaggcccggacactcgaggagcacctcgccgaggccgccatgggaaatgccttcctcctccagggcggagactgtgccgagagcttcaaggagttcaatgccaacaacatccgtgacaccttccgcatcatcctccagatgagcgtcgtcatgatgttcggcggccaaatgcccgtcatcaaggtggggagaatggcggggcaatttgcgaagccgaggtcggattcgtttgaggagaagaacggcgtgaagcttccgagttacagaggggacaacattaacggagactcctttgacgagaagtcgaggattccggatccgcagaggatgattagggcttattgccaagccgcggcgacgctgaatcttctcagagctttcgccaccggtggttatgctgctatgcagagggttactcagtggaatttggacttcacggatcacagcgaacagggagataggtaccgagagcttgctaaccgagttgatgaggctcttggattcatggctgctgctgggctcacagtggaccatcccataatgagaacaactgaattctggacatctcatgagtgcttattgttgccttatgaacaatccctcaccaggttggattcaacttctggtctctactatgactgttcagcccatatgctctgggttggggaacgaaccaggcagcttgatggtgcccatgtcgagtttctaagaggagttgctaatcccttgggaattaaggtaagtgacaagatggatccaaatgagcttgttagactcattgagatcttgaatccccaaaacaaaccagggagaataactgtgattacgaggatgggagctgaaaatatgagggtgaagcttccacatctcatcagggcagtgcgcagagcagggcaaattgtcacctgggtcagtgatcctatgcatggaaacaccattaaggctccatgtggtcttaaaactcgccccttcgatttcatcagggctgaagtgagagcattctttgatgtgcacgagcaagaaggaagccacccaggaggggttcatctagagatgacgggtcagaatgtgaccgagtgcattggtgggtcaaggacggtcacatttgatgacttgagctcacgttaccacacacactgtgacccaaggctcaatgcttcacaatctcttgagcttgctttcatcatcgccgagcgtttgagaaagagcaggatcagatcgcagcaacctcttgcccctctaggagtgtaaaagtgccttcaaaaccaacaagagaaagatatttttgttcttttttttttttgtcctacatatttattattaatcgatggttgtcactttgattttgtgttgtgtttgtatgtgtatactacctagtaatgcgtttggactggcaaggacaagagtacttctatggataataaagaaacgaaaacgtttccattgcgttggctaaagaaaagagcgc

SEQ ID NO: 6034 - DNA, 1065 bp, Glycine max
cccacgcgtccgcccacgcgtccgcccacgcgtccgcctcagctacgtaggcccccccccgttgcaaaaatccgatcagaagacaggttcaaaccggagcaaaaaaacttgttacgatggtttcttccgacaaggatccacgagaggaagtccttcaagcatggtacatggatgatagtgatgaagatcaaagactcccccaccacaaagaacccaaggagtttgtctcgttggaccaacttgctgaacttggagtccttagctggaaattagatgctgataaccatgaaaatgatccagagctgaaaaagattcgtgaagagcgtggctacacctacatggatgtttgtgaggtctgcccagaaaagttgccaaattatgagcagaaaatcaaaagcttctttgaagaacatcttcacactgatgaggagatccgcttttgtgctgctggaagtgggtattttgatgttagggattgcaatgatgcttggattcgagtgtgggtcaagaaaggaggaatgatcatcttacctgctggaatttatcatcgctttacactagatgagagcaactacattaaggctttgcgtttttttgttggtgagccagtttggactccacacaatcgtccaaatgaccatctccctgcaagacaacaatatgtcaaggattttgtggaaaaggatgttggcaaccatgctgttgatgccgccgcgtaagatctggttccgcctaatcgtagtacgtgggactgagactttgtgttgctaaagtaaggtttgaacaaatgaaaataatggtgcctttaaataaagggtcccagctttttatgttatggtttttgtgtagatgaccctttaagccttttacccacgcctgtgtttctgtgtaggtgaccctttgaaagatagccataatattataactacatattcatctaagttatagtacattttaagctatgtcatatatttagttgatttgtaaaattatgctatcaagtactatctttattcttatttataagattcaattaactgatttatcaaaaaaaaaaaaaaaaaa

SEQ ID NO: 6035 - DNA, 2170 bp, Glycine max
  misc_feature (6)..(7): n is a, c, g, or t
tccggnnaattcccgggtcgacccacgcggccgggatttccccgacttcaccttagctatcgccgaaaacccgtaccttcatataaacatatatatatctgatactctcacgtttcacgcgtccttctcccaccgcaccccacacttccggcaccgtcggaactcagcaccgcacatctgcaccccacactcgtcttctcacaaccgtcaatcgcagtcacagcgcacagcttcgagttcagaggtcccccccttcactgcaacgttttcaccttgatttcttcagctctagttctctctcacaagctttctccagctttgcaactagctttgtctgactctggcatatatttttgttcttcagaaaaatactaatggattcatcacaaagtgcggctcttgggggaaatggtgggagtggtggaaatgggacgttgatttctcaaattaatgacatggcagcctctgcaacaggagctgatgattctatgcagaagctgaaccaggtcagcaactccattcagaaaaccttgggccttatccatcagctttacctcacagtttctaccttcaatgctgcctttcaaatgcctctcctccaacgcatcaatggccttgttgcggagcttgacaacatggttaaattggcagagaagtgcaacattcaggttcctatggaggttgtcaatttaattgatgatggaaagaatccagacgaatttaccaaagatgttataaacagctgtattgcaaagaatcagatcaccaaaggaaaaactgatgctttaaagagtttgcgcaaacatcttttggaggaattggagcagaacttccctgatgaggttgaaacttttagagagagtcgtactgctgcagctgctgagttgaaacgtcaggcacaaagcgcactgccaaatggagatgtgagagttaaatcagagcattgagtgatatatttcttgtgtcttctagcgtttatgtatgcactgtatagtggagttcagcactgttccttgtttctgcatgttggttaaatgctgtaaatttgatgactaatttttgcttactattaattacttaacaaaaatccgatcagaaaacagcatcgaacccgtcgtagcagaaaaacttgtcaccatggtttcttccgacaaggatccacgagaggatgtccttcaagcctggtacatggatgatagtgatgaagatcaaagactcccccaccacaaagaacccaaggagtttgtctcgttggaccaacttgctgaacttggagtccttagctggaaactagatgctgataaccatgaaaatgatccagagctgaagaagattcgtgaagagcgtggttacacctacatggatgtttgtgaggtctgcccagaaaagttgccaaattatgaacagaaaatcaaaagcttctttgaagagcatcttcacactgatgaggagatccgcttttgtgctgctggaagtggctattttgatgttagggatcgcaatgaagcttggattcgtgtgtgggtcaagaaaggaggaatgatcatcttacctgccggaatttatcatcgctttacgctagatgagagcaactacattaaggctttgcgtttttttgttggtgagccagtttggactccatacaatcgtccaaatgaccatctccctgcaagacaacaatatgtcaaggattttgtggaaaaggatgttagcaaccatgctgttgatgccgccgcgtaagatctggttctgcctaatcatagtaccacatgaaaaggaccaagactttgttgctaaagtaaggtttgaaaaaaagaaaataatggtgtctttaaataaagggtcctggcttgttatgccttgatgtaccctcgccagtgtttttgttgcctgtccctgtataaagattgcattgtattattattagaattgggtacagaataaacataagcatatgttagtatgctgatgtatatttatgtatgcttgggctgtatttaaattttacgagataaaattgaagcgggagaacctagccttaaatataggtgacgtcatagatagatgtggtttagtgtgatgctaatatttttcatgatgaatatctcatgcgctttaaagttgtccatcaggtattagtttttccatctgtggaaaagaaacagattgc

SEQ ID NO: 6036 - DNA, 991 bp, Glycine max
tgtttcaccatgctaccatattgcctaatccaattgctgattatgagaaggaaaatctttgcctttatggatttccaagtgagcattgggaagtcaatctgccagctgaggaggtgccccctgagcttccagagccagcattgggcattaactttgccagagatgggatgcaagaaaaggactggctgtctttggttgctgtgcacagtgatgcttggttgcttgctgtggctttttattttggtgctaggtttggttttgacaaggctgacaggaagcgactatttaatatgataaatgatcttccgacaatatttgaggttgttacagggatggccaagaaacaaggaaaggaaaagtcatcagtttcgaatcatagcagtaccaagtcgaagtcaaactctaagcgcggttctgaatcaaagtacacaaaagcaatgcaatccaaggacgaggacgatgaaggtgtgggtgtggaagaggaagacgaagatgaacatggagagactttgtgtggggcatgtggagagagttatgctgccgacgaattctggatttgctgtgacatctgtgagaaatggttccatggaaagtgcgtgaagattacccctgcaagggccgagcatatcaagcagtacaaatgtccatcttgcagcaacaagagagctcgaccttgacaacatcatggctaggatggttggtgactataatcttggcaattttatgactactaatttgtttagtaggtcaagtttattagtcttgctgtgaatttcaggtatattgcttcagatgttattacattaggtatatgagctgctgtcgattcatctaccattaggatatttgtttcataagtggacttgaatgttgttttgttatgtgtttctttaaatttaatgtagctgtgtaactgtgttgtgtccatagcttagtgaagtttatattatctcccccggtggaaaaaaaaaaaaaaaaaaaaacaccccaa

SEQ ID NO: 6037 - DNA, 1341 bp, Glycine max
  misc_feature (1316)..(1316): n is a, c, g, or t
tgggcccaaggattgacatttattttagtttccctcgttgattccacaaccagctgggcatcaagaaaacccagccaacaaccacaaccaaacagggtggatagggatgtcgcagcagggcacaggttcagtggtggatttcgacctccccgacgagattctgtcggtgataccaacggacccataccagcagctggatctggctcgcaagataacctccatggccattgcctcccgtgtctcttctctcgaatccgatgcatctcgcctccgccagaagcttctcgaaaaggaccgaatcatcctcgacctcgaagaccgcctctcctccctcacccgcgcttcccaccaatccgactccaccctcaacaccgccctcaacgaaaacataaagcttacgaaggagagggatcaattggcagcaacagtgaagaagctaagtcgagacttcgccaagttggagacatttaaaaaacaattgatgcagtcgctaactgatgacaatgcattgcatgctgaaactacagatattggaacctgtgaccaatcagttccaaaggcatatcctgataaggatgatgatcgaagtggcaatatggcacatcattcatacaatggccctgcagatgtgggtaaaacaaatgacgaagcttccaggtattcagggcaaaggttttctttgaccccatatatcacaccacgtcttacaccgacgggaactccaaaggtgatttcaacggctgggtctcctagaggatattctgcagctgtatcacccaagaaaacttctggttttacctctcctacaaaacttccatatgatgggcgcccatctctctcttcatggtattcatctagtcagcagtcatcagcagcaaactccccaccacggggacgatcgcttccaggtcgaactccaaagattgatggaaaggagttttttcgtcaggccaggagtcgcctttcatatgagcagttcagtgcatttcttgccaacataaaggaattaaatgctcagaagcaaacacgggaggaaactttaagaaaagcagatgagatatttgggtcagataacaaagatctgtacttatcttttcaaggattgcttaaccgtaatgcacgctagtactgaaagcagcattgctgagtattgtatgagttggtatgtaaaatgccggttatcatttctgtccttgtttttctgtcactgtgtttgtgcatttttttttttgaaatgtggatgaagttgcacccagtgttttgagaaccagaccagtcattaactcaattgaggtattgaattatggggcactagntcaaccaaaaaaaaaaaaaaaagaa

SEQ ID NO: 6038 - DNA, 903 bp, Glycine max
  misc_feature (4)..(4): n is a, c, g, or t
  misc_feature (758)..(758): n is a, c, g, or t
  misc_feature (778)..(778): n is a, c, g, or t
  misc_feature (786)..(786): n is a, c, g, or t
  misc_feature (805)..(805): n is a, c, g, or t
  misc_feature (815)..(815): n is a, c, g, or t
  misc_feature (822)..(824): n is a, c, g, or t
  misc_feature (830)..(830): n is a, c, g, or t
  misc_feature (837)..(837): n is a, c, g, or t
  misc_feature (844)..(845): n is a, c, g, or t
  misc_feature (852)..(852): n is a, c, g, or t
  misc_feature (858)..(858): n is a, c, g, or t
  misc_feature (860)..(860): n is a, c, g, or t
  misc_feature (865)..(865): n is a, c, g, or t
  misc_feature (867)..(867): n is a, c, g, or t
  misc_feature (869)..(870): n is a, c, g, or t
  misc_feature (873)..(873): n is a, c, g, or t
  misc_feature (877)..(877): n is a, c, g, or t
  misc_feature (880)..(881): n is a, c, g, or t
  misc_feature (883)..(883): n is a, c, g, or t
  misc_feature (888)..(890): n is a, c, g, or t
  misc_feature (893)..(893): n is a, c, g, or t
  misc_feature (900)..(900): n is a, c, g, or t
  misc_feature (902)..(903): n is a, c, g, or t
tcanctacgcgggcccccccccccaaaaagactctgtgaagtgtgcgtgagaaaggaacagagagaagaaaaagaaaaaagatggaaggagagaaagagaatcccgattgtaacgccactttggtgaactccttctgcgaaatcacttcctcttccaaagaagaagcccttttctttttggagagccacaatttcgacctagacgccgccgtttcgactttcctcgacaacgccaacaaccctctcatccctcaaaacgacgacgtcgttgtcgccgcaaacccaaaccccaactccgtttcccctccctccgattctcactccccggacttcaacccttccaggtctccttcgccgtctccgtcgccgactcgcacgccctacgagctccgatcccgcaggtctctcggcaagaaaccctccaccagccgccaaggcaaaattcgcactctcggcgatctcaaacgctcctcccgcgatgatgattccgattccgatcccgatttcgaacccgacgagtactacaccggcggcgaaaagagtgggatgcttgttcgagatcctaccagaggaaacagcaacaacaacaacagtgtggatgatatctttgatcaagcgaggcaggttgctgttgatgcacctccggagaatcctcgaagctcgtcgaggtcgggaagttttagtggcacggcgaggttgctctctggagagagattgccatctgctgctgctgctgctcctgctcctcagcggggganagggaagttacccccactgnaattttcngggggggaagggggtttcntgggcaatgnagggccnnncacggngggtggntgatccnnaaaagcnccggtntnggggngnannaanaagntcnnangggcnnnaangcttgtncnn

SEQ ID NO: 6039 - DNA, 1483 bp, Glycine max
ccgtgaagtgtgcgtgagaaaggaacagagagaagaaaaaggaaaaagatggaaggagagaaagagaatcccgattgtaacgccactttggtgaactccttctgcgaaatcacttcctcttccaaagaagaagcccttttctttttggagagccacaatttcgacctagacgccgccgtttcgactttcctcgacaacgccaacaaccctctcatccctcaaaacgacgacgtcgttgtcgccgcaaacccaaaccccaactccgtttcccctccctccgattctcactccccggacttcaacccttccaggtctccttcgccgtctccgtcgccgactcgcacgccctacgagctccgatcccgcaggtctctcggcaagactcgagccgaatcggctcgagggcaaaattcgcaccctcggcgatctcaaacgctcctcccgcgatgatgattccgattccgatcccgatttcgaacccgacgagtactacaccggcggcgaaaagagtgggatgcttgttcgagatcctaccagaggaaacagcaacaacaacaacagtgtggatgatatctttgatcaagcgaggcaggttgctgttgatgcacctccggagaatcctcgaagctcgtcgaggtcgggaagttttagtggcacggcgaggttgctctctggagagagattgccatctgctgctgctgctgctcctgctcctcagcgtgtagaggaagttacccacactgtcactttctggaggaatgggttctctgtcaatgatggtcctctacggaggttggatgatccgcaaaacgcaccgtttctggagagcataaagaagtccgaatgtcccaaagagcttgagccagcagataggaggactgctgtccatgtcaacctcacaaggcgggatgaagactaccctgaaccagtgaagccacgccatcgtgctttccagggtgttggaagaactttaggtagcaccagctccagcaatgatgaacctattcaaacaactggtgcttcaccaagtactgctccattgccaacaatgggtttaattgtagatgaggcacagtcagtgacatcaatccagctgaggttggctgatggcacacgcatggtttctcgcttcaatcaccatcatacaatccgagatgttcgagcattcattgatgcatcaagacccgggggtgtaagaagttaccaactgcagtcaatgggttttcctcccaaacaactcgctaatttggaccagactatagaacaagctggtattgccaactcagttgtcatccaaaagttgtaggttgtttaccagattctattttcagtcgacttgaaattactatttttatgcttaaacattgattgatctacttatattttattagtgaatttgataaaatgttcgttgttaggatattccattaaaaaaaaaaaaaaaaaaatcccgaatttgcttttataagagaattgttgcgtc

SEQ ID NO: 6040 - DNA, 1390 bp, Glycine max
aaagattctaatacaactggctcgtgaccccgacaacttcatagctagtatggtaatgtactaatatattccccccgccccccccgcccccccccccacttaagccatcactcacattattcactcacttcccccctcttcattttgtagtcctcctttacctgcaaaaaacagcagatggctcagcttaacctcatacttatctggttatttttattgagtctgtgcctttattcatgtcctacttcggcccagttaagtagacaccactatgcaaaaacatgccccaatgttgaaaacattgtcagagaagcagtcaaaaagaagtttcatcaaacatttgttacggttcctgctaccattcgtctcttcttccatgattgcttcgtgcagggttgtgatgcctcggttttggttgcatccacaaaaaacaacaaagcagagaaggatcacccagataatgtttcactagctggagatggatttgacacagtgattaaagcaaaagaagcagttgatgcagttccattgtgcaggaacaaagtttcatgtgctgatattttagccttggcaacccgtgatgttattgaactggccggtgggcctttctacgaggttgaattgggaagatttgatgggctaagatctaaagattcagatgtaaacgggaggctgcctcatccagagttcaacttgaaccagctcaattcactgtttgcggccaacggtctcacccaaacggaaatgatagctctatcaggtgctcacactgttggattctcccattgcaacaaattcacgaacagagtatacaatttcaagagcaaaagtcgagtggaccctacactgaacgagaaatacgcaacacagctaaagtcaatgtgcccaaggaatgtggatccaaggattgcaatcgatatggacccaagcactccacggtcattcgacaatgtttatttcaagaatcttcagcaagggaagggcctcttctcttcagaccaagttctcttcacggactcaagatccaaggccactgtaaatgcatttgctagtagcagcaaaatcttccatgccaacttcgccgctgctatgaccaaattgggccgagttggaatcaagaatgcacagaatggaaacattcgcaccgattgttcagtcatttaatttaagaagggacaacagattattatcaagtcaggggaattcgttatttatattagttaccctgtgtttaaaataataagtactgaaagtatttaatttctcaattgccatgattcctctgttttgttttctcataaattcttccctttagattatccacttgtaactacttggttaactacatcaaacactttaaaagtaacaaaaatcgtgttgaaaaaaaaaa

SEQ ID NO: 6041 - DNA, 1227 bp, Glycine max
tcgagtcagctacgtagggccccccccccggaagttccacttaagacatcactcacttccccctctctgctttttgcagtcctcctttacctgcaaaaacagcaaatggctctgcttaacctcatacttgtctggttatttttcttgagtctgtgtctttattcgtgtcctacttcggcccagttaagtagacaccactatgcaaaaacttgccccaatgtagaaaacattgtcagagaagcagtcaaaaagaagtttcatcaaacatttgttacggtccctgccaccattcgtctcttcttccatgattgcttcgtgcagggctgtgatgcctcggttttggttgcatccacaaaaaacaacaaagcagagaaggatcaccctgataatctttcactagctggagatgggtttgatacagtgattaaagcaaaagaagcagtggatgcagttccattgtgcaggaacaaagtttcatgtgctgatattttagctatggcaacccgtgatgttattgcactggctggtgggcctttctacgaggttgaattgggaagatttgatgggctaagatctaaatcttcagatgtaaataggaggctgcctcaggcagagttcaacttgaaccagctgaattcactgtttgcggccaacggcctcacccaaactgaaatgatagctctgtcaggtgctcacactgttggattctcccattgcaacaaattcacgaacagagtatacaatttcaagagcaaaagtcgagtggaccctacactgaacgagaaatacgcaacacagctaaggtcaatgtgcccaaggaatgtggatccaaggattgcaatcgatatggacccaaccactccacggtcattcgacaatgtttatttcaagaatcttcagcaagggaagggcctcttctcttcagaccaagttctcttcacggactcaagatccaaggccacagtaaatgcctttgctagtagcagcaatatctttcatgccaacttcgctgctgccatgaccaaattgggccgagttggagtcaagaatgcacagaatggaaacattcgcaccgattgttctgtcatttaatttacgataaaaacaactcatgttaaggagggacattattatctagtcaggggaattcgttatgtatattatttaccctgtgtttaaaataataagtactgaaagtatttaaaaaaaaaaaaaaaaaaaaaaaaa

SEQ ID NO: 6042 - DNA, 571 bp, Glycine max
tcgagtcagctacgtaggcccccccccccaaaacactgaaaacacgcactttctcctttcttagttgctacttctgcatctccccttcccttctttcattctttgtcacaaaactacaaagacactgagtttagtgtttcgccaaaaccaatggatgatgatattgtaggactcggttttcgtccaacagaagaagaacttgtggacttttacctcaaacacatgttgctcggcaatgatccccgtgcccacgtcatccctgtcattgatctttgcgatgtggaaccttgggatgtaccagtgatgttagcaaaatcatcatcagctatacgatttggtgacccatattggtttttcttcagccctgttgatttcaagtattcaagaagtaaaaggtttaacaggacaaccaagtgtggcttctggaaagccactgggaaagaccgtgacattaggacaggggacactaacaccgtcattgggactaagaagactcttgtttactatcaaggccgtgtttcctgtggtgtcaagtccaactgggttattcacgaatatcatgctgttacct

SEQ ID NO: 6043 - DNA, 4185 bp, Glycine max
  misc_feature (4185)..(4185): n is a, c, g, or t
agtagttgctctgcttcatcatcttctctctatctttgttgcaaacttacaaacacagtactgagtttaagtgttcaccaaaaaaaacaatggatgatgatattgtaggactcggttttcgtccaacagaacaagagcttgtcaacttttacctcaaacacaagttgctcggcgatgatccccgtgtccacgtcatccctgtcattgatctttgcgatgtggaaccttggaatgtaccaggtaactaactcaacacccctttgtcctttttcttcctcttctctttacttcactgttgtttgtttgattctttccttgttttcaaaattagtgatattagcatcgtcatcagctatacgatttggtgacccagattggtttttcttcagccctgttgatttcaagtacttgaaaagcaaaaggtttaacaggacaaccaagtgtggattctggaaagccactgggaaagaccgtgacattaggacaggggacactgataacactgtcattgggactaagaagactcttgtttactatcaaggccgtgtttcctgtggtgtcaagtccaactgggttattcacgaatatcatgctgttacctttcatgaaaaccaggttcgtttcttttattcaataaattttaacactgcttgaaaataatctttctactaaattataggctttgatgttagagggccatatatgttgtactagtttgtactttttaggctttgatattagaggttttttttttttttttttaatgatacaagaatgagaggaataaatctagacatataatgatacttggattataaaggtttaatatcatgtgaccatttaaaaaaagttatgtgattatttttaaatctcatatgacttgtatgttttaattgtggccaatatttattctttttacactcatatcaaaaaggtcatctcactagatatgtctccttatttgcaatcctattggttgttctgagttctgactttagcagattgctgttattggatactttgtttgaatctcatttattttttttgccgtctcatattgctgttcatggcccaattttctacatttagggtcttgcttgatgaatgatgacaaagggggcatgaaagaaatatttagcttataaacgtgactgatgaccttcctataacctctttttaagcttatttcaatgaattttacatgggagcttatcaaaacaagttctttttagtttatcaatgagctcctcgacaaagcttatggataatctcatgtgatttattggataagtgtttaattaaatcttttatctaagcactctcaaaattcatcatcagtgttcatcaaagactgtcaatttcttctgtataaattagtctgaatttccttgttcttttatttgtgtgaattgcatcaaataaatgctgattatactcaaaaaattatgcagaggacttttgttttatgttgcttgatgaagaaacctgggaaaacaactgaaggcggaactgatcccctgatctgtgatgaaggggagcccagcagaagcatgatttctgactatgaaaatcagccaacagcagaaggaattgcatctgtaagatgaagcatcctttgtggacatatttacactctgccatgtgaaacatgctgagaactgatacttgtttcgtatatttttttttctttttcaggaaggtacttttacaggaatagaggcaatctttcaggcaaccccttgggcagagaattgcttctccccaatacaacagtctccgactcttattgagcaggaaggagcatcctttccaaactatgcatttaacaatgcctattttagaaatgaagacaacattatgcagactccatttgaatctgctacggaggctccccccccaaatttaatcttagccgatgaaagtatagtgatcaatgaagaaaataagcatgattttgtcaatagctctacccaatcagagtcattgaaaagggtatactgtgaaagcagtgatacagatgctgaagtcatctctaaactggtaaagatttatcaagttcaaataatactggggagagtatctccatttgtttctgaagtggcattggatctataggttaaaattgtagtgtgcattgtggttatgtgaatgttgccacatttttgcattggatctataggttatgtcatgttttgttgtgattcatgatcatgaatgattcacggctgatactttagagcatgcttggatgaagggaatagttaggaaagggaacaaaatggagataaaccaatctatttctgtacccatttttacccttccttgcatctcttccctaacatacatcctaggatttcagaatcacaagtactcttttcttaggtttctgatatttgtttagtttattttgagctcttcaagaattgaattcatctacttactttcttctgaaatcattacaggatgacaatattgtggatatttcaacagcatgtaatgattatcctaattcagatgaatactattcatcaaaaaggtttaaatcatcacatgatgctgtccatggtggaatatgttttctaccttctaaccttgaagcaaaccaagagaaaaacgagagtatgtttcaagatagtttctggggagcagagacatcatcttgtgactcgacactagataaacctttggagatcaattatattgatatttctagttctcctttcactccatggagatgagaaaattaatatcattgaagaccagtcaatttcgtatgatgggaactaagatctaagttacctccattagattggtagtagctattttggagtatgtcataaaatatgactagttctacaatagcaaatttattagaaaacaattctgtattagaaattgcataatggtagttatgcataaaaaataactatgggcagttatgtattaagatttaggagcttatatcctaacagtaaatctattagaaagtattaaaaactgcatgatagcagttatgcatagaaaacagccactagtagttatgtattaagagcatatatgtgatggtattagtagattgtgtaattaggaagtatgtgtagttgtttgcagtttatggacagagaatactctatgtaggagacttttgtctctaggacaacaagtgtattttgtatcaatgtattttgtgtgattttagtatttcaataatatatttcattagtttttggaaggtgagcaaagaagcctagttttaagatgaagagtagatatctccccctattaactgaacgaaggattgatgaaacagtttctttcatcttaatcatgctcagttgaccattgtttttctgctgcaaggatgtcttattattctggaccataaggccttatgagaaatattgaagttttatggaaaatatatgcaaaagccataaaagaatccctttcttaaggatcccattttgtatatggaatcaagtttgagcatatttttctatgatcaatgttaatcagctctggccaattttttcgtgcaagtggagaaaattttattaagacttgagttgtaataagaaaggcatgcatacacacaaaaaaaaaaaaaaaaaaaaaaaaaaaaaaaaaaaaaaaaaaaaaaaaaaaaaaaaaaaaaaaaaaaaaaaaaaaaaaaataaaaaaaaaaaaaaaaaaaatttccggaaccccggggaacccccaatttaaaaaggggccccccccggggggaacccccacttttggtccctttaaaggggggaaaatttaaagttggggaaaatcagggcaaaaattgttcccgggggaaaattgtaacccccccaaaatccccaaaaaaaaaaaacccgaaaaaaaaaggggaaaacccgggggggccaaaggagggagcaaaccccattaattggggtgggccaaagggcccgttttcaaggggaaaaacttggggggccccttgattaaagaaaccgcccaaccccggggaaaaagggcgtgtttgcaaatggggggtttttcggtttcctggcaaattgattcccggggccctcggacgttcatttggcggaaacgggaatcatctcactcaaagcgcggaaaaaccgttatccaacaaaatcggggaaaaacccagaaaaaaactttgggacaaaaggcccacaaaaaggccgn

SEQ ID NO: 6044 - DNA, 1765 bp, Glycine max
gtttaagtgttcaccaaaaaaaacaatggatgatgatattgtaggactcggttttcgtccaacagaacaagagcttgtcaacttttacctcaaacacaagttgctcggcgatgatccccgtgtccacgtcatccctgtcattgatctttgcgatgtggaaccttggaatgtaccagtgatattagcatcgtcatcagctatccgcttcggtggcccccccccctttttcttcagccctgttgatttcaagtacttgaaaagcaaaaggtttaacaggacaaccaagtgtggattctggaaagccactgggaaagaccgtgacattaggacaggggacactgataacactgtcattgggactaagaagactcttgtttactatcaaggccgtgtttcctgtggtgtcaagtccaactgggttattcacgaatatcatgctgttacctttcatgaaaaccagaggacttttgttttatgttgcttgatgaagaaacctgggaaaacaactgaaggcggaactgatcccctgatctgtgatgaaggggagcccagcagaagcatgatttctgactatgaaaatcagccaacagcagaaggaattgcatctgaaggtacttttacaggaatagaggcaatctttcaggcaaccccttgggcagagaattgcttctccccaatacaacagtctctgactcttattgagcaggaaggagcatcctttccaaactatgcatttaacaatgcctattttagaaatgaagacaacattatgcagactccatttgaaactacaaaggaagatgaattcctaaatttaatcttagccgatgaaagtatagtgatcaatgaagaaaataagcatgattttgtcaatagctctacccaatcagagtcattgaaaagggtatactgtgaaagcagtgatacagatgctgaagtcatctctaaactggatgacaatattgtggatatttcaacagcatgtaatgattatcctaattcagatgaatactattcatcaaaaaggtttaaatcatcacatgatgctgtccatggtggaatatgttttctaccttctaaccttgaagcaaaccaagagaaaaacgagagtatgtttcaagatagtttctggggagcagagacatcatcttgtgactcgacactagataaacctttggagatcaattatattgatatttctagttctcctttcactccatggagatgagaaaattaatatcattgaagaccagtcaatttcgtatgatgggaactaagatctaagttacctccattagattggtagtagctattttggagtatgtcataaaatatgactagttctacaatagcaaatttattagaaaacaattctgtattagaaattgcataatggtagttatgcataaaaaataactatgggcagttatgtattaagatttaggagcttatatcctaacagtaaatctattagaaagtattaaaaactgcatgatagcagttatgcatagaaaacagccactagtagttatgtattaagagcatatatgtgatggtattagtagattgtgtaattaggaagtatgtgtagttgtttgcagtttatggacagagaatactctatgtaggagacttttgtctctaggacaacaagtgtattttgtatcaatgtattttgtgtgattttagtatttcaataatatatttcattagtttttggagggtgaaaaaaaaaacctagttttaaaaaaaaaaaaaaaaaaaa

SEQ ID NO: 6045 - DNA, 1277 bp, Glycine max
  misc_feature (1268)..(1268): n is a, c, g, or t
atatatatatattccttcttccttacacattaaaagtcaccctcaccgcaattaatagcacatccaccacttacttctattacaataacacaatattctcatcggtaacatccatcaccagaaccatggtccaagagaagaagctcgtggacgaagtgtcgggttggctgagactctacgaagacggttcagtagaccggacttggaccggttcgccagaagttaaattcttggttgaaccggttcctccccatgaagaatttatcgatggagttgccactcgcgatatcatggctggtgacaatttccgtgtccggctttacctgccggaaaatatctccaatgaggagaagctacccattttcctccacttccatggtgggggattttgcataagcgaaccggactggttcatgtactaccaattttacactcgattcgctcgggtggctcgagtaatcgttgtctctcccttccttcgtcgtgccccggaaaaccgtctccctgcagcgattgatgacggcttctttgcactcctctggctagattccgtagccagaagaaatgcagaggagccgtggctcaaaaaacatggcaattttggccgtgtttttcttataggagatagctcaggtggaaatattgtgcatgaagttgctgtccgtgccggggaggctaagttggacctgctccatctcgccggaggaatcccgatacatccggggttcatgcggtcgaaacggagtaggtcagagttggagaaaccacaatctccattcttgacgttggacatggtggacaagttcatgagcttggcattgccattgggttctaacaaggaccaccccattgcatgccccatgggaggcggcgctccgccgcttagcgggctgaaactgccgccgattctgctgtgcctggcggagatggacttgatctttgacacagagatggagtacaacgaagccatgaagaaggccaacaaagatgtggagttgtttgttaacaaaggagcgactcatagtttctatctcaacaaaattgcggtggatatggacccaaatactggtgctcaaacggaggctcttattgcaaggatcaaagagttcattgagcagcactaaattattttgtgtttcttttatttttcttttttgaaaaattgaaaaataaaacttgaagtgtgcacttgacaaagtgagttactttaatgaatgaaataactaataagtaatatgttgtgtgaacttttacgggaaatcaagtantttgtaatc

SEQ ID NO: 6046 - DNA, 1537 bp, Glycine max
tcgagtcagctacgtagggcccccccccccaattgatgctgataattcaggcaataagaatgaaaggtatgatgaggttgtttcagaagcaactgaaactctggaagcaagtgcggcactttgtagcttgggaaatgaagatgctcctgcaactgcaagttgtgataatgacacttgcagtttgaaacattttgacataactaaagatccatcggaccactattttattggtgcaaatggacagagtaacaaccggaaatggttcaagaaagtgcaacaagattggagcatattgcagaataaccttcctgaggaaatctatgtacgagtttatgaagatagaatggatctcttgagagcagttattgtagggccatacggaaccccttaccaagatggactctttttctttgattttcaccttccgccagaataccctgatgttccaccgtcagcatactatcattctggtggttggcggattaaccctaatttgtatgaagaagggaaggtttgccttagccttctaaatacatggacaggcagaggaaatgaagtatgggatcctaaatcttctagcatccttcaagtcctagtttcactgcaaggcttagtactcaactctaagccttacttcaatgaagctgggtatgataagcaggttggaacagccgaaggagagaaaaattcattgtcatacaatgagaatacctttttacttaactgcaagactatgatgtatcttatgaggaaaccccccaaggattttggagtgctcatcaaagaacattttaggaggcggggtcataacatccttaaggcttgtgatgcatatatgaaaggttacttgattggctcgctgactagagatgcctctgtaagtgaaaagagcagtcagaattcaacctctgtgggtttcaagttgatgttagccaagatagtgccaaagcttttcttgtcactaagtgaggttggagctgattgcgaggaatttaagcatctgaaagatttgtagcgaagttatatggtgatacatcacttcatttctcaaattaaagccaactttggtctgctgtctctgccctaaggagcttgaaggaacagaatttggtgggatttattgacattgaaagaagcaaccactgacagagcaagccggatatacttttgattttggttacctgaagtggggaggctatgttggttactaacttgtatgctgtttacctttttccttattttttatttcttttatatctggggattaactctgtgccatggcatcctgcgatccttgtagccagtttcacttagtgtgaaataaggcttctgttattttattctctggggacagggtgcgagtcggggttggattttcacaggtatttgaaagggttaggttgtcttgcattgattgatttaccttctgtttctgaagaatacgatgaattgaatataattggacaatcacttcctgcgcccccctcccccttctcttatagtataatggatatttcatatttttgctttgtgtcaa

SEQ ID NO: 6047 - DNA, 1379 bp, Glycine max
gcacgaggggatatcaaaggggctaacatactagatgatcctaatggtgaaatcaagctggcagactttggaatggctaaacatataaattcttcttcctccatgctttctttcaaagggagtccatactggatggcacccgaggttgtaatgaatacgtagggccccccccccccccttgatatatggagtttgggatgcacaattcttgaaatggtcaacatcaaagcctccttgcgaatcagtatgaaggggcagctgcaatatttaaaattggtaacagcagagatatgcctgaaattccggatcacctctcaagcgaggcaaagaatttcattcagctatgcttacaaagagatccatcagcccgcccaacagcccagatgttactagagcatccctttattcgagatcagtcatcaacaaaagctacaaatgtcagaataaccagggatgctttcccctacatgtttgatggaagtcggacgcctccgccagttttagatcattccaatagaacaagtttaacttcattcgatggagattatgcaacaaagccaattcccgtaacttcacgtacagtaaggagcccaagagataacacaagaatgatcacatctttaccagtatctccctgttcaagtccattgcgacagtacgagccagcgcacaagagctgtttcctttctcctcctcacccaacttacactttgatggggcagaatacactcccctcatatccagtgagatcaaatgccacgttcactcttgacccttttcaggaaacttctttttacaaagcccacacgcccggtggatccccaagaagactcatttgagttgccgattgtaaatacctctaaaatcttttggtttcctcggcatgccttgtggcctgtggttgaacttcaatctgcactctttaagagtaccaactctatctaagggactctggtcaattctttatgcatgagaactagaccacataaggtcaagtgagttgtaggagctctcgatgcaggcattggactggggacaccgtgctgtttgtaacaatttattgattactgtaaatccaaggtgtttactgtctgtagtaacgtttatgttgtatattgttagttcatggcaggagaaaaaagggagtaagttttcatatatactctctctctctctctctttttcttctttttttttaaagattatgtatccatacttgagaatgatacgtgtatggtgtggaacttggttccaaaccgtagccagaatgatgatgggcttgaaagtgaaagagccagcgagtcctgaatgtccaaagttttagttggaagcagttattacgcattatgctatttcttgcaatgagtttgataattgat

SEQ ID NO: 6048 - DNA, 1167 bp, Glycine max
acggctgcgagaagacccccaaaagacgcagccaaaacagcaacaaacgacagagattcttcctcaacacaatcgaaaaaaaaaaagcttccgattctaaaaccagaacaacaaaaaagtaaaacacacacgtcattttaaaacatttcatttttttggttatttatttaaagagcgagtgttgtaacaaatggtgaagccgaagagcgtggagaaacccgcagaggaacaacaacaacgaagtgtttcatcgtacagaggagtacggaagaggaagtgggggaagtacgtgtcggaaattaggttacccaacagccgtcaaaggatttggttgggttcctatgacagcgccgagaaggcggcacgcgcgttcgacgctgccatgttctgcttacgtggcagcggcgccaaatttaatttcccgagtgacccacccaacatcgccggcggggggaacatgacctcctcccagattcagatcgcggcggcgcgtttcgccaattcggagccccgaaatgagcgttcggatcaacccgtggagtctttaacttcggatgaggaaacggcatcgtttccggtcatttcggatacggatacatcatctcctcctctctcagacgtgacgttccaaaacgacgccgaattagttactgggtcgttccctgatatgttttcggatttcgggtcgggcgattttgtgcccgatttctccgattttccgagcttcgacgatttcagccgggacttcttcttgcatgaacttccgggtttcaatttcggagaagagaacttggatggattgataattcaggactcgttcttgtggaatttctaagcgggtcagggttcggataattttattatatccgaacccgatatcagaatccggatcggatccgggtttgggttgggtcaaattttgcgtgccaagccctccatgtgttagtagttagtgatgattatagttttttttttttaacgtaccaagtagtcaaatgtttcgattttttgggatgcgaatcataattcatttatttgtcatgacttatgtgattaattgtaaagtcgtctgctgaatgatagtgtaatttttttggccattcgttcaattataaaaggataagatattttcgtctggataaaaaaaagggcgccgaaaaaaaaata

SEQ ID NO: 6049 - DNA, 1224 bp, Glycine max
ggcaactcttgctgaagccaagggtatcaatggtttgcgagctgtttttggggaagtctatcctgatcctgttagagttgtgtcaattggacaaaaagttgaggatctccttgctgaccccaagaatgaaaaatggttatctatttcatcagagttatgtggaggtacccatatttcaaacacacgagaggcaaaagcttttgcacttttatctgaggagggaattgcaaaaggaatacgcagaataacagctgttacaactgatcgtgcgtatgacgcaatgaaagtggcagatgaatttgagcagcaagtagatgatgcggctaagttagtaggaactttgctagaagagaaagtttcatcattgaaaagcaatattgaaactttatctattcctgctgccaagaaagctgacatcaagatcaagatagttcgacttcaggatcaagtaagaaaagcacaaaagcaggtcgctgaggaaaacaagcgtaaagctgtaatgattacagcagagaaggctgaacttgctgcttcaaatgggaaaacattttgtatatctcttgttgatgttggtctggatgtagctgcagttcgtgaggctgttacaaaagtcatggaccagaagggcttatctgtgatggtttttagcacggacgaatctacgaacaaggctgtagtgtgtgccggggtgccagagaaaggaggtaaaggtaatctggatgtggcagattggctgagtaatgctttggggcctctaaaagggagatgtggtaaaggaaaaggtggtcttgcaacgggtcagggtacagaggcatcacatgtaaacgaggctatagatctggcagaaaaatttgcgtcgatgaaattgagttaatggtgtatttgcagtatatccttcctggggtgtaagcatgatatggatctttcgtttggtggtataatcataatcatacagaagggaagggcacttgaagtaattattagatccggatgagttgaacaaatttctaatttagtgcctgaatatttttttgctctgatagattatgaagatattttgaaattttaaactgtcaccgttttcgaaagcgtgtttttttattgtttatgtagctttgaattttgacgatttcagcatttcatttcgcagaaatggtttaatacatgttaatgttgggttttagcttcattttttaaacgaataaaaagtatttttttttcccc

SEQ ID NO: 6050 - DNA, 1390 bp, Glycine max
acgaggaagaaaagggattagttgttgatgtcaaaggttttgatagtgcgctcgctcccgctcgcgcgcgctcccgctgtgctcaaacaaagccagctggtggtgccattgtcatggatgccgatgctacctcagctttgcacaaaaggggcattgtcccaacaaatgatagcttcaaatatgcttggttcaaggaccatgagagtgtggtaaaagcaatatatactggttctgagtttgttgatactgttaataccggtgatgatattggtgtagttctggagtctacaagcttctatgctgagcaaggtggtcagatttttgatactggatcacttgagggcccacatgctttatttgaagtgcgtaatgttcaagtttatggaggctttgttcttcacattggtaatgggactggtgtctcagttggcgacaaagtagtgtgcaaggttgattatggaagacgcgcccttatagcccctaaccatacctgcacacacatgttaaattttgcccttagggaagtacttggtgatcatgttgaccagaaaggatccattgttcttgctgaaaaattgagatttgacttttctcatggcaagcctattgaagctgacaatttaaggagaattgaatcaattgttaatgagcaaattaaagctgagttggatgtaagtgcaaaagaggcaactcttgctgaagccaagggtatcaatggtttgcgagctgtttttggggaagtctatcctgatcctgttagagttgtgtcaattggacaaaaagttgaggatctccttgctgaccccaagaatgaaaaatggttatctatttcatcagagttatgtggaggtacccatatttcgaacacacgagaggcaaaagcttttgcacttttatctgaggagggaattgcaaaaggaatacgcagaataacagctgttacaactgatcgtgcgtatgacgcaatgaaagtggcagatgaatttgagcagcaagtagatgatgcggctaagttagtaggaactttgctagaagagaaagtttcatcattgaaaagcaatattgaaactttatctattcctgctgccaagaaagctgacatcaagatcaagatagttcggcttcaggatcaagtaagaaaagcacaaaagcaggtcgctgaggaaaacaagcgtaaagctgtaatgattacagcagagaaggctgaacttgctgtttcaaatgggaaaacattttgtatatctcttggtgaagtggctggatgtagctccagttcgggaggctgtcaaagtcatggccaaaaggcttttttggatggtttttagcccgggcgaatttccacaaggcttagttttggcccgggtgcccaaaaagggggtagggtaatttg

SEQ ID NO: 6051 - DNA, 1381 bp, Glycine max
atcttacgcatcctcgtactggcggcatagcttcgtccccccaacacacaaccctaacctaaaccagccgctgcgcacagctgctccgccgtgactctgtggtcgacggtataaaatgaaggtgaaaaagcagaagaggcacaggaagattttgacgttttacactgcttgcttcggttttcggaagcctttcaaggttctatgtgatggcacattcgtgcatcaccttcttgtgaatcgaataacccctgctgacacggccattggcaatgttctcagtgctacggtcaagctctacacaacaagatgtgttctagctgagttgaatcgactcggtagctcgtattctgaggctctggaggcagctcataaacttatagttgcaagatgtgagcatgaaaaatgtaagagtgcagatgcttgcatcatggaggttgttggaggaaaaaactctgagcatttctttgttgctagtcaggacactgacctgcggaaacagttgcaagaggtacctggtgtgcctctcatatttggtcttagaaatgctcttttccttgaatctccatctgcatttcagcggcaatatgtcaaaacttctgaagaaggacgattgcatatgacacagaaggagtaccagatatttaaggatagggtaatgaatagattgactggtgaggaagccaacaattccattactgaaataatggaaattgaagattcagaagatcagaccataaatgtgcaggcagtagagaagggtattacctcaaggaatcgtatggaaatcaaggatgaacctcagttcaagagaaaaagagctaagggtccaaacccactttcatgcaagaagaagaaaagtgaaaaacaaaatattggtcctttgaaggaaacgaatgaagacaacacagtgaagagaagtaggaaaaggaagaggtcacataaacaaaaaatggcaacagaaacaagcagttaggtccatatatatatatatatatatatatatatatatatatataggtccatatatatatatatatatatatatatatatatacccagttacaaataggtatttttagaagagctccttgactttactgcttctgttgagtcgagagaaaagcaagttttaaatccatgctgacatggaaggggaagtgtatcgagattagttgcttgttgaattttatactgtgtctattttgctggctatcgtatttttacctacggatagccaaatagccgttgttcacggtggaaatagattctgatatttatgatcttaattagagatgtaaataggttggtttggattgaatttgatcaaattcatgattcaatccaattacatttgaaaggtttgagtcgatttttctaagag

SEQ ID NO: 6052 - DNA, 1148 bp, Glycine max
accagagatagtgcagatgttaaagagctcaaagaacagattgccagcctcaaggcagcactggcaagaaaggaaggagaatcagaacattctttttccagcagctctgaaaaatacagaacaaaagctagtgagcctccaccttatcatattaaccagcgagatcctgacactgtggatcagcttggttgccggcaaccaatggttgaggttggcaacatagaacagcttcagagtaataccacagtgaggcacaaaactcagagctttgatttcgatgagatatcagcaaattcaccaccatggcccccagtgaacaatagtcttgcacaaaactatggggaggatgacaaagaaagtggttctggtgaatgggttgacaaggtcatggtcaacaagcaagatgtaaacaaaactgagaacctcttggggtgttggcaagcagcaaacaatgggaacttatctgaggccttttatcagaaatatatagaagattctcccaaaatgtactcggaacaatcctatactatgttcatgggagccaaccagtttaacattgcgggttctgatgacatcatggatgagcttgatgctgcaaccagtgattcctcagaacctgacttactttggcaatttaatcattccaaacttagcagcgtgaccaatggaattggatcaaagactatgagatctatctcaaaggcagcaaaaaacagccctgagttgagcaagaatgctgttcattcttctcctctaggtccttcaccttcattgaaaaactcaaatggtgtcccacatcgatcaggaaggcatccggctccagttgacgtgaaacgtagaactgggaatagaaaataaacgtgtttactgaaaaggtaaagagagtgattgtttatatttgattttttttttaattttttcaatttttagatcgacgcgagagagagagagagagattgttataattttttttgttggtttgtattttgtaatcacacgggtaatggagcaataatgcttgttgctttgtttgtatcgtggcattcttttattttactctacactagatttttaggggatgtaaaaaaatgaaactcctaacactgcaacgattttttatttgtacaaatcaatttccttatctcaaa

SEQ ID NO: 6053 - DNA, 2386 bp, Glycine max
  misc_feature (2377)..(2382): n is a, c, g, or t
  misc_feature (2384)..(2385): n is a, c, g, or t
tgatgcaaacacatcccttacaacataataaacgcaaagtgttgttgttgggccgggacagcgattaacaagaagtgaaagggataatttcatcatggctcgacaattgtgtgaagaaaagtccaaggacatggcttcatcaagtcatgggttgttctactcagatgtatcatccaataacccaactatccaaccccatctgatgaaccacatccaaggctttgtgaccgacccggacatgttcaacctcaccacaggtatggatatgaatagggttttcaaagaaccttcagcaacacagcgaaagcaacggtgtcatgatgtggaaaagtttcttcggcaaaccaggtcaactcgcgggttcttcctcttccaaaacgatgaaccgggcttgtagcaatttttataaccagcatgctgatgcgtataatactaataagcaagacttcacatcagggatttctgagacaagtagcgagaacttagttgtcggtggtgcccatgattctgccccgtggcaagagaacaggctaatggttgatgattcttccttaaggggcctgttcccttgggaaggtaacccaaggcccagtcaaggcctttcactctctcttagttcaaccaaccctttaagtattggcttgcaatcgtttgagctaagacaaacaagccatcatcagcatctttctgattttgtttcaagagagggttttttcggaaaaccagtcaatgctcaacagcagcaacaacaaatgttgcaagatgggtatttgagtcctagcaaaggtgcaaatatttatcagggacattttctaatcaagaactccaagttcttggtgcctgcgcaggtccttctgaacgagttttgtagcctagggacaaaggaaaatgatgtactaccaaagcaaaagtgctctcaaaagaacaagcagtgggaagaaggtaatagcggtggtggttcctcaaagaaccattctcttagctctctagagtatgtggaattgcagaagagaaagacaaagctgctcgcgatgctggaagaggttgatagaagatacaaacactaccgtaaccaaatgaaggctgtggtgtcctcctttgaagcagtggcgggtaatggtgcagccactgtttactcggctctggctttgaaagccatgtcaagacattttaggtgtttgaaggatggaattatggatgaaattgaagccacaagaaaaggcatgggagagaaagaccacgtagcggcagtacccggcacaacaaggggcgaaacaccaaggcttagaatcgttgaccaatcgctgagacaacaaagggcctttcagcaaattagcatcatggaaacccatccttggagaccccaacgtggccttcccgaacgttccgtttctgttcttcgagcttggctttttgagcactttctccatccgtacccaagcgatgttgataaacatatcctagcccgccaagccggtctctccagacgtcaggcacgtgtatataggattttatttaattaatgtgaatattaagagaactaaataaatggttgttattacatgcactcaagagtagattgtacgtacgtgttgaatttggaagcaggtttcgaattggtttattaacgcgagggtgaggctatggaagccgatggtggaggaaatgtatctggaggaagagaaggagcaagaaaacgacgtagcatcatcggatattaatgttcccgaagaggatgagaagccaacgcaggaggctccactccttcgaattgactcagagtgcatgtcgtctatcgtcaacgacgtcacaaagagcggcaaaaccatccaaaacgacaaccaaatggacgcattcgggtcggtggagcttgacttttcgtcctacacgcatgcgcaccattcttccggcgtgtcgttgacgctggggttacagcagcacggtgaaagcggggtaagtttagcgttcctgccagcggcaacacagagctcgatgttttacccacgggatcagattcaagagtgtcaaacagttcagtactctcttttggatgccgaaggacaaaacatgccgtttaggaatgtcatggggacacacttgcttcatgatttggtatgatatatcgcaaagtttattgagttcaatcatggaggacgtggatttaattaggtgtcacgtaagtagaaagtttagtttttaattttaatatatatagtgcatagttatatatatattaatgcttccatatagaaatttaagctacacttgtagttaattacataatatatacacttcctagtttcaacatgcattcatgcctcctctattttggaatttaaatcttcaactgatcgatgcaagattatatatattaatnnnnnncnnc

SEQ ID NO: 6054 - DNA, 1285 bp, Glycine max
  misc_feature (1258)..(1258): n is a, c, g, or t
  misc_feature (1264)..(1264): n is a, c, g, or t
  misc_feature (1270)..(1270): n is a, c, g, or t
tacggttgcgacccgccggccggacggggaacaagtggctatataagagatgaagtttcactctctttatagcatttttgtgggatgcgtcagtgagaatggctagcaagcaagtctattagtcacctttgttttagggtccatttctcgtaccccattttgttacacacttgatatatgatttatcttgctcaaaagaagtctcactttaataagattttattcatatatgcactatgcagtgtgcttcatgtaattatttgaagtaggcaaatagtttattttttcagagttatttgatcgttgatagttctttcaagtttcacgttgatttggtgcaatccttcatcaaagtcgtcattatcacataatttgtgaatcagacttcggatcgaacctctgaccacatgcttaaaggacaaagttacttctcaaccatgtcacacaatgttggcatggagaattgatgctttcttggtgtagattgcttgcatatgacaaaaatgaagataaaggactttgccatggagacatgttttaaagagaacagatactaaggaagtagtagcaatttttctatggcaactacagtgcatcacaaagttaaatttttctaaagagtgataaactcttgacattgtcattataaaactttcctaatgccccattgatattgcactttgtggatttatgtcaaactccctccctattcattttttttaatcttctcaaaagaaaataagttcctaccaataattccgtagttggcctccaaatccattgcattaacttaagattcttcatggcgtgactttccacagagaaaagttgtgtgaaaagaatcttgatagttgcatgccttggaaggaatggatgtgtgttgtcttgatgcacatcctcaatctatatgagcatatatattattatttttttgtgtatcctttttggtaagggcattgaacttttcactgctggcaatgaggcttaaggcattggcaatcattcatggggcatctcatagagtagcttttttggcaaaggcagcagggttggaatctacttgatggacgttagaatttgtagcacatcaaataaaatagtgaagccactttggacggtgggtccttcacctctagggcggtgctgataatatttgcagttttttttccctatattatttttttaataattcactgtagtattattagtctgaagtatttttggactttttaggtgattaattttcacacaaagcatntccttntaaccnaaaaaaaaaaaaaaa

SEQ ID NO: 6055 - DNA, 1068 bp, Glycine max
  misc_feature (5)..(5): n is a, c, g, or t
  misc_feature (11)..(11): n is a, c, g, or t
  misc_feature (16)..(20): n is a, c, g, or t
  misc_feature (24)..(25): n is a, c, g, or t
  misc_feature (33)..(33): n is a, c, g, or t
  misc_feature (49)..(49): n is a, c, g, or t
  misc_feature (51)..(51): n is a, c, g, or t
  misc_feature (56)..(56): n is a, c, g, or t
  misc_feature (59)..(59): n is a, c, g, or t
  misc_feature (61)..(61): n is a, c, g, or t
  misc_feature (69)..(69): n is a, c, g, or t
  misc_feature (78)..(79): n is a, c, g, or t
  misc_feature (94)..(95): n is a, c, g, or t
  misc_feature (99)..(100): n is a, c, g, or t
  misc_feature (102)..(102): n is a, c, g, or t
  misc_feature (120)..(121): n is a, c, g, or t
  misc_feature (129)..(129): n is a, c, g, or t
  misc_feature (131)..(131): n is a, c, g, or t
  misc_feature (135)..(136): n is a, c, g, or t
  misc_feature (146)..(146): n is a, c, g, or t
  misc_feature (150)..(151): n is a, c, g, or t
  misc_feature (153)..(153): n is a, c, g, or t
attanaagganacagnnnnnattnntataaaanccccccacagaatgangnaccgnaanancgaccccntaaaaaaanncgtttttctggatannccannanaaggggaatccaataagnnaaatagananaaanngcaaaaaaantctnncncatactccagccattccctgaatctccaaaaggatattcggagaagtcatctgtgttggttgaatcacgggtgctatctgtactacaagaaccttcatcagagttgctgctaataagggatgaattatcacttgacgagtcttcttccaaaatccttttcaggtggtgaaactttgaatagaaagaggctaaggcaggtgagtcatctgaagaaatggaactattggcatgttcagaaacaccagaatttgtagatatagatcttgctttcgttgtaagagtctttccactgactttacgttttgaatctggggacagtattctgttcctaattaatcttggggcccttggcgagcaccttgcatagaaaagcatatatgctccttttgtcaagactctatccaattcaacagctgtcaccacactgtcatcaaccttgaaccacttgttttggatattcttcacatagcacacatagtgacccgaaaaggcagcattcatgatatctaagtgaacaactaccccatacaatctgtatatgggtgatttatcactagtcccgctcatgaaaggtgccaagttaagtatttcaggaaattgaataggcttgttgagcttcccaaatttcccagactgaaatctctttaatgcaactgtaagaacattcggtgcctctgaaacccacgcgtccgtcttggccttctccgtgattcaaccaacacagatgacttctccgaatatctttttggtgattcagggaatggttggagtagtgtgtggaggaattctgattctgacacatcctcctcctcctcatcttctcccttgaattggggacattcgcccatatctgatgtggtccgatatgattcagtctccctactactgctgttgcctcgatccgagctcccggct

SEQ ID NO: 6056 - DNA, 1248 bp, Glycine max
  misc_feature (1240)..(1240): n is a, c, g, or t
  misc_feature (1242)..(1242): n is a, c, g, or t
  misc_feature (1247)..(1248): n is a, c, g, or t
caatagtgcattcggctacgtaggccccccattcattcattgtagcgcttgctgggtttgccgtgttcgcgttcgttgttcgatcggagaagacccttttccctctcgtcacttgagatggcatcaagacaccgtgttcacagagaacccttgaatgctcgaagggggtacccgccagaagggccatatgctcgcgtgcctcccatgcctcgcccgccacctcctattcctcctcatccggctgtgttggaagaggaacttgaatttcagcatgccgagatgcggagactcgtggcagacaacaggaggttgattgatgaccgaatggcgttgcagcgagaccttggggccgctaaggaggagcttcatcgcatgaatcttgccattggtgacattcgcgccgagcatgaggctcattcgagggagcttgttgagaaaggcatgaagatggaggctgaccttagggcaaatgagcctttgaagaatgaggtcatgcaactgcgatctgaagttaagaaacttaacaatctcaaacaagaactgacagggaaggttcagacactcactcaagatgttgcaaggttacaagcagacaatcaacaaattcctatgatgagggctaagattgatggcctgcaccaagagctaatgcatgccagaaccatggtggattacgaaaagaaggcaaacatggagttcatggaacagaggcagtcaatggagaaaaatttggtttccatggcccgggaagttgagaaattacgtgctgagcttgctagtgctgatagcagacattggggtgctggtatgtcaggtgggccttatggaacaaaatttggtagcccagagggttttccagctccatatgcagatggatatggcagtgttcacctgggtgctgcagataaaggtcctatgtatggggcgggtgctgcctcaagaaaggagcatgagaagccacacatgaatcgtcgttgaaattcaagttattgctattggtgatgaagaaaggcttgctatcactttgccttctctatttgcagaatagctgagattgagtttgatgtccttctgtgtatgcatgcgacaacagtggtcattttatctggaactctggatatatttagtcctaaactggcatatgtaggttttagtgtcgctttgcttttttttaaagaaaacattgctgcagtatctcagtttataatttagtatgatggaattcttcactttacctaananaaaann

SEQ ID NO: 6057 - DNA, 1024 bp, Glycine max
  misc_feature (979)..(979): n is a, c, g, or t
  misc_feature (988)..(988): n is a, c, g, or t
ggggggttataaaggggaaggatttattcccttgtaggagatgttttttcgcataaagccttttgcaaggggggagaaatcttagtaaaaggaaaaaggggtttaaggcacagggtgggttccttctgaagagaaatgggaacgtaattgtccaatggttcagagaaccgaccaggaagttttgtggaaaataataatcatgacctgatgttgtaaagaagttcgtattccaccaggacttttaacttatttggaaatctgggggagacaggttatttatgtatccttaaagtttaattccttgggggccccctttgacggagaccatccttgcgcatgggaaagaggtaatagtagagctaccctttagatccaaagacgtcttattcccaaatttcaaacaagctggttcacgcacggctgtcaatcatcacttggggccccttgttttggatattcttcacatagcacacatagtgacccgaaaaggcagcattcatgacatctaagtgaacaactaccccatacaatctgtatatgggtgatttatcactagtcccgctcatgaaaggtgccaagttaagtatttcaggaaattgaataggcttgttgagcttcccaaatttcccagactgaaatctctttaatgcaactgtaagaacattcggtgcctctgaaactgtcagcttcttcttggccttctcatatgatttacatctgacacagtggtacttgttttccccatccaaagtctcagtgcttgtaaatcgtcgaagggcctccaccagggttgttatctcgccttctatctcaacagtcagatccatcatcctttcctgacgctcagacttccctccacatctcatgcattttatctttgatcgaaggtaacctccaaatgtttgacccattaaagtagtgtccgcggcgggggcgcccattgctgtctccaggggggcccggtactcaattcgaaaanttataatantataataaagaggaagcgatggggggtggaggatag

SEQ ID NO: 6058 - DNA, 1429 bp, Glycine max
gtatagcgagtcagctgcgtacgccccccccccaactcaaacgcttgtttcgcctaaccaaaggaaactccactgcggtttccctttcttctctgtcttcactactctcttttctcaataggaacaagaaaaatggaagttgcggcggcgaaagcgctgaaaccaagcttgcggacagagtttattttccctcaagcaatttacgacgagattttatgttttaacgcgaacaacgttgttgccgatgaagatttctccatggacgacttacttgacttttccaacggggaattccaagttggaaaagacttcgatgattacgaggaagaggaagacgaggaaaaaaacagcacctccggttccttgcagtcgcaggacagagccgaagacgacaacaattctaattccaccgctggaggcggcggccacgactatgttttcgccggcgagttgtcagttccggcagatgatgtggcagacttggaatgggtttctcactttgtggatgattctctcccggagttatctatattgtaccccattcattgttccaagaaaacaagagtatgggccgaaccggaatccagattgagcccggcccaaaccgtttcaaaagtcccgagaaagtcgagaactgaaaagcctagaaagcccaacactcgtgtctggtcctcttttacggtgtttgctggctccgttgggttcggcgagttggtgactaagaagcagaagaaaaaggttgaggcccaaagcggtggggcccagtctctgcgacgttgtagccactgccaggtgcagaaaacaccgcaatggaggatcggtccactagggcccaaaacactttgcaacgcttgcggggttcgattcaagtctggtcggctttttccagagtatagaccggcctgtagcccgaccttttgtggccacattcactctaacaaccatcgtaaagtgttggagatgagatggaaaaaacagatagcagaatccgttactggttcagaccggaaacaattgatcccaaattattaaattttgttagacaaaatttacaatggagtagagtgctagtattattttttcgttagaattaaagttttacctcttatatgcatataaaagtttgcattattgagataaaattttaattctaactaggctatccaaggaactatgtttaagtagtttttttagagtccaataggctatagattaggaataggtcaacgaaccggtctgagccggtttgatatttgtaccacggttagtgagtagtgatttaaattagtgctagtgagctagggaggaactaagtggtagtaatggacattaggaaggcattgattgcatgtatcccattttcctagatcaattgagtataataaaatcgagaaagagaaaatttaattacaaaaaaaaaaaaaaaaaa

SEQ ID NO: 6059 - DNA, 1304 bp, Glycine max
  misc_feature (1286)..(1295): n is a, c, g, or t
tgccaaacaaaggtttgacctccttcagatcctcgccccgagactcaaccccctctctttctttttcttcccatttcacccctcgtctttccttgtttccggtgagggccaaccacaacatatgttaaacaaggaacaacctccaaaacataacatcctacgccaaacaaaactttgacctccttcagatctatacccttctctctctctctcttctattttcaaattctacatcatgggcacggaggttctacggccacaagattgtttcacccaacgcatcggtgttccaccgcctggcttttcccggcgaagaacctatggtacccaccacaacaacaaaaacaataacgttaacaattatttcaggggtaaccggaagccgacaacccgacccgaacaaagaaaacgggttgtggacaaaaggcccagtttagatgattcgaggttttcgagtttggagatggagaaggtcacgattcttcggaggggggaatcgctcgattcgaagctgaaaacagaggctttgaagaaggaaggtgataatttggtcgtggttgggacccagaggctcggacccgacccggatatggtcccgaagcagatccggatcgtggatttcaggtccgggcgcgagatttacgccggatccgcgttcgcggtgtcgccgtcgccgagcgcgctgcccttgccgtctttttcgaagaggcagccggcggtggcggttgccgactctgcgacccgtgatcttaggcgtcttctccggcttgaatgagccgaatcggtgccgtttccggatttcgggtcgggtctgacccgactctaacctatcttgtgttcctttcttcgttctcttccttaatctagaatcttctgcttctcctttacgcccctctgattttggagttatgacccgaccgtgatttttttaaacgggaaggcagatctggaattgggaaagtttgggggcgaaagtgttaataaaagaagtttggagtaatttatgacatcttgtaagattgtaagatcttgtggttgtggtggtggaggatgggttgtgaagggtatgtttaggttgtaatttcaggtaggaatggaaaaaataagctatattaaaaaaacaagacaaaaaagggaggaagatggggggttgatttgtaaaatccggaagtgtatggggttctttatgtgggctaaaatggattctgcttgtaggtctgtatacccttttgtaatgtaaagtgaaaaattaaatagggaaatgtggccaggttcagattccaaannnnnnnnnnagggcggcc

SEQ ID NO: 6060 - DNA, 1343 bp, Glycine max
gatttcagattagaatggagaaaataaataaacttgcccttaacaaccctcctcccccacaagctatacccgaccccctctctcttttcttcccattttgccccttcctcctttccttgtttccgaggagggccaaccacatatgctaaacaaggaaacaaatttctaacctccttcagatctacaccacccttctctttttttccagtttcataaattctacaccatgggcacggaggttctacggccacaagattgtttcacccaccgcatcgctgttccaccggcggggttttcccggagaagaacctctgggacacacaacaacaattacttcaggggcacgcggaagccggttacccgacccgaacagagaaaacgggttgtggagaaaaggcccagcttcgatgattcgaggttttcgaggttggagatggagaaggtcaccattctccggaggggggagtcgctcgattcgaagctgaaaaccggggctttgaagaaggaaggtgacaatttggtcgtcgttggtacccagaggctcggacctgacccggatatggttcagaagcagatccggatcgtggatttcaggtccggacgccaggtttacgccggatcggcgttctcggtgtcgccatcgccgaccgcgctgcccttgccgtcgttttcgaagaagcagccggcggttgcggttgccgactccgcgacccgtgatctcaggcgtcttcttcggcttgaatgagccgattcgcgtccatttctgggtttcgggtcccaattttaacctaccttggcttcctttcttcgttctgttcattaatctagaatcttctgcttctccgttacgctccctctgattttggagtcctgacctgaccgtgatttttttaaacgggagggcggatctggaattggggaaagtttgggggccaaagtgttaataaaagaagtttggattagtttatgacatcttgtaagattgtaagatcttgtggttgttgtggtggaggttggttgttaagggcaagtttaggttgtaatttcagattagaatggagaaaataaataaactaaaagtaaaaaaaaaaaagaagaagaaagaagggagggagatggggtgtttgatttgtaaaatttccggaagtgtattatggggttgttaattatgtgggctaaaaagggattctgcttgtaggtctgtgtacccacccttttgtaatgtaaagtgaaaaaattaaaatagggaaatttggccaaaaaaaaaaaaaaaagaaaaaagaaaaaaaaaggggcgcccgaattatgagccccgtcccccggggtttattttcgggacgggt

SEQ ID NO: 6061 - DNA, 1285 bp, Glycine max
ttcgtccgcagaaaaatgaaggttttgttgaatctgatttgttagataatcctgtttggcctcaaacatatggcaattgctttgtggcgactttggttgcagaagcagagaaagacaaagatattattgttgttcatgctggattaacgatggagccatcacttgaactgtttcaggaaaaatttccggataggttttttgatgtgggaatggctgagcaacatgcagtcacatttgcttctggtttggcatgtggtggcttgaagccattttgtgtcataccttcgtcctttctacaaagagcctatgaccaggtggtacatgatgttgatcaacagagaattccagtgcgttttgttattacaagtgcaggattggtaggttctgatggtccccttcgatgtggagcatttgatataaactttatgtcatgcttaccaaacatgattgtcatggccccatctgatgagcttgaactcatgcacatggtggctactgctactcgtatcaataatcagcctatctgctttcggtatccaaggggtgccctggttggggaaggctacactataggcgatggaatccccatcaagataggaagaggaagagttcttgttgaaggtaaagatgttgctttcctaggatatggatcgatggttcagaactgcttaaaggctcattcactccttgcaaagcttggcattgaggtcacggttgctgatgcaaggttctgcaagccccttgacattatgcttctgaggcagctttgtaaacaccactcttttctagttactgttgaggaaggatctattggaggatttggttcccatgttgctcagtttattgcagttaatggactgctcgatggaagaattaagtggcgaccaattgttttaccagacagatatattgagcatgcatcaccaaatgaacagcttgaccaagcagggttgagtggacatcacattgctgccacggcattgagtttactaggccgtacccgtgaagctctcctatttatgtgttcgtgacttgcttcgtgcccttttccagatacgatgaatggaagttggatagctccacaggaagaaggagaaccaacaaagcaaagatgtaaagaatgtcattttctctttaatctgtacagaactgatgttaaatagtaaaaaggaacttaacgggagttttgtttttttggacatctaacaggtaaattgttgagaaagtgactttttaatgcagtggttttagtttggataagtcaaaaaaaaaaaaaaaaaaaaaa

SEQ ID NO: 6062 - DNA, 867 bp, Glycine max
accaacacaaatcattcacatcataaagtgtttgaaattcaaaattctcaacacttctcttcaaccattctcttctcagatcaatacaacaatgggatttcgtttacctggcatcagaaaggcatcaaaagcggcggacgcaccaaaaggctatcttgcagtctatgtcggagagaaattgaagcggtttgtgattcccgtatcatacttgaaccaaccttcattccaggacttgttgagtcaagctgaggaagagtttggatatgatcatcccatgggtggcctcacaattccttgcagtgaagatgtcttccaatgtataacttcttgcttgaattgagcagaaatgtcacagtataggagactgacatagattggaggagacattttgtataataggcgtgttctctaagtgtacagatccccctttctcaagagagaggaaatacaaacataatatgttattctattgattaattgcaatgaattgagcaactcaagcagcttcgatctctatactttatgtttatttgtttcaatcttcccttctctctgtatgagccaggtatcaatattctgttagaagttgataaatttcaaatcagtaatggtacacaaatgatttccaggaagtgtatggcagaagtattttccctcggaccatggatagttaaaataatttggaagaaaaagttaaaatgtattctaataataattatttttatcaaattaaaattttgagctgcaaggtccgaagcacacgacgtaccttccctgccgaagcaggtgcaaaatacaattggacgtaacaccgaggtttattttcttccttgaatagacatggccgactctcgtgacaaaaaaact

SEQ ID NO: 6063 - DNA, 1138 bp, Glycine max
ttttttttgtgcttttgttttcacataattacccatcatttctcatgctcaacacatcaatagaaaacaggaaccaagcgtcatagactgaataaaagttaagttttagagatatacaatcaagcctcgggacaaaatacacaatcaattttaataacctatcaaagtataaaaatgttatcaaacctgagttctgggggttataatttgacactcttcaatggaaaattggttaagtattgtctcgactagacttaataggagaaatgcaagaaaaagatatggtacaacaatttttatttcgtagggaagaatattccctgaacgaagtgcatttatttgcgactgtaaccaggtggtggcatttgattcctgtttcctcttctatctaacaaagaatattgattggacgaatactgaccatgatccctgtgcccactcgggttgtttcgtggagtccaattctgatgagctctaggttggaagctttggctgtggtgactaccatgtgaattattaaacctagcattgtgattatttcctgatgattgatatccatgccttgaactacccccactaccttgatggtgatttctttcataattatgtgatctagggtgttgatagtcatttctttcgacaggatttgattgctggcgaggatgattgtaccccaccggtggcgcagggtatggttgattataaccatactgcggagcagtagggacagcattgtaaggtgcaaactgtggtctgccttggagtgagggagctgaaataggtggcggcattgcaacgtatcccgggcatgattcataaccatgtgaaggcaatggttgtcgatgatgacccatgggtgcaggataagatataggaggaccattatgcggatggcggtatccattagtatcaacctttgcctgtaaggaattgacgatgagtctgtgtgctgcatccccaagctcccgaccagaaatagatcctggagggtttttcctcccattttcagcatggtgtctcctgcctgaatcttcatgccacaaaacaggttcaggttttaaatcctcaattccaacaatcttttttggaaatttaactccttgaggtggtcgggtaatgtgtgctcgtgcatctgggc

SEQ ID NO: 6064 - DNA, 778 bp, Glycine max
cggtggggggccgttttaggaattaggggattcccccgggttgcaaggatttgcccggggccattttcttgggacatctaattgaaccaacacaaatcattcacatcccaaagcattcaaaattctcaacacttttcttaagaaattctcttctcaaatcaatacaacaatgggttttcgtttacctggtatcagaaaggcatcaaatgcggtggatgcgccaaaaggctatcttgcagtctatgtcggggagaaaatgaagcggtttgtgattcccgtatcatacatgaaccaaccttcattccaggacttgttgactcaagctgaggaagagtttggatatgatcatcccatgggtggcctcacaattccttgcagtgaagaggtcttccaacgtataacatgttgcttgaattgacaataaatctcacactgtaggagactaacatagattagtgaagacatttggtacaataggcgtcttctcaccttgtaaaaatctccgtttcttgagcaggaagggggaaggaccattagaatgacagattcatatttcatggagcatgtctctgtgtgtttaagcaacacgctgtatcattgtagtgactaccaatacatatttttatagagaattggtttctcactcaggatctctgcctttctacttttctcttctttctgtttaggattttacacctttaattagcttgtattttataactcatcagtcataaccatgactcatttttcattgcaaagtaattgattgataaatgat

SEQ ID NO: 6065 - DNA, 1195 bp, Glycine max
aaaaatcaaaattgaaagctgagagtagtagagtaacgcaacccattccatttccctctaaaatggcatcaagtaaaatgagggtggaggagctgcgaacggagctcctccaccgtggactctccaccaccggaaccaaacccactctggtccgtaggcttgaagccgctcttcgtaaacaaacgacgagtgacggtggtgcttgttctcctcgtaggactagaaagagagcaagggattcgaaccactccgaagaaatcgaggttgcagaggagacaaaagatgaggaggaggaggaggagaagatagtcaccgctacccaaaagggcgtggcggttctcgaccagtggcttccggattacgtgaagacaaactatcatgttctgcaactgggtggtgacgtatatgatgccatgttgaatcagacaaatgttcgggacaacaataacgttaaccagtgttacgttttgtcccagattagggtagtagcagaaagaaagagtaaccaggtggtagggtttctaattcttttcatcctcttcgcagagcctcagtagcttcgcattagcaatggcgagaatcaaggtgtacgagctgaggaacaagacaaaagcagagcttctgaaccaactgaaggatctcaaagcagaactcgctctcctccgcgtcgccaaggtcaccggcggagccccgaacaagctttccaaaatcaaagtggttaggctttcgatagcgcaggtgctgacggtgatttcccagaagcaaaaagcagcgctgagagaggcttacaagaagaagaaataccttcctttggatctgcgtcccaagaagaccagagccatccgaaggcgcttaactaagcaccaggcttcattgaagacagagcgtgagaagaagaaggaattgtattttccactgcgaaaatatgcaattaaagtgtaatgttagatcccaatacggatgataattttggcgtttgttagttgacacagttttgatgccgttttgtcctagttttcttttaatcatcatgaaacttttattaaatgttaactggttttactctcgcctttgttttttcgtcatatatgaaaattttcaatttttgcatgcaaaaaaaaatctatattcttttgtgatttaccagttattaataaagttcgtagatcagttttattaaaaaaaaaaaaaaaaa

SEQ ID NO: 6066 - DNA, 1605 bp, Glycine max
ggagcatacccagatgaatggctgccaaaaatggaaatactttgtttttgaatgggagacagcccagatgtccaaagctcccattcaaaagtttgctgattatgttgcaagcatatttgttcctacagtcggcgtcgtggcccccccccccccattgtgttggtatgtagctggggctcttggagcatacccagatgaatggctgccaaaaaatggaaatcactttgtttttgctcttatgttttcaatatctgttgtggtgattgcatgtccatgtgcacttggtttggcaacaccaactgctgtcatggtggcaacaggggttggggccaacaatggtgtgttaattaaaggaggagactccttggaaagggctcagatggtgaagtacgtcatatttgataaaacaggcactctaactcaggcaaaagccactgttactgttgctaaagtgtttggaggaatggaccgtggagattttcttacattggtggcttctgctgaggctagcagtgaacacccactggcaaaagcaatattgcaatacgctcgccattttcatttctttgatgagtcttctcctaccagtgataccaagagtgcttctgaggactacaagtcagggtggctttatgatgtctcagacttctctgctcttccaggaaggggcatccagtgctttatagatgggaggcgtattttggttggtaaccggaagctgctggaggaaaatggcataaatatttctacagaagtcgaaaattttgtagtagagcttgaagaaagtgcaaagacagggatactagttgcatatgatgatatattaattggagtcttagggattgcagacccactaaagagagaagctgctgttgttatagagggcctacagaaaatgggagtcatacctgtgatggttacaggagataactggagaacagctcgagctgtagccaaagaggttggcattcaagatgttagggcagaagttatgcctgcaggaaaggctgatgttgctcgctcaccccccccccatggaagtatagttgcaatggtgggtgatggcatcaatgactctccagcattagctgctgcagatgttggtatggcaattggggctgggacagatgttgcaatagaagctgctaactatgtgctgatgagagataacttggaagatgtgatcactgccattgatctttccaaaaagacctttttccgtattcgattgaattatgtatttgcgatggcttacaatgttgttgctataccagttgctgccggggttttctttccttggttggggatcaagctgccaccatgggttgctggtgcatgcatggctctgtcgtctgtaagcgttgtatgctcttctttgcttttgagaagatatagaaaacccaaacttactacaatacttgaaatagttgtaatttaacgagaattgaaacagaataacttgagggtgcaaataaatttgacccttgtaattccaattttgtgcatttttcctttatatccgctgcacccattggggtgcaattgtaattgtagctgccgattcattgtaaatgctcttgtaatttcatagttcttcctcttaaa

SEQ ID NO: 6067 - DNA, 1398 bp, Glycine max
ttcaggctagcagtgaacacccactagcaaaagcaattttagcatatgcacgccattttcatttcggcgcgggctcttctgatactactggtaccgagattgatgctgaaaatgatgcaaagtctgggtggctttttgatgtctcagacttctctgctcttcctggaataggtgttcaatgttttatagacgggaagcttattttggttggtaacaggaagttgatggaggaaaatggcatagatatttcaacagaagtggaaaattttgtggtagagctggaagaaagtgcgaagacagggatactggttgcatataatgatatattaactggagtcttggggattgcagacccactaaagagagaggcttctgtagtcatagagggcctccagaaaatgggtgtcacacctgttatggttacaggagataactggagaacagctcgtgctgttgccaaggaggttggcatccaagatgttagggcagaggtcatgccagcgggaaaagctgacgttgttcgttcattccaaaaagatgggagcatagttgcaatggtgggtgatggtatcaatgattctcctgcattagctgctgctgatgttggtatggcaattggggctgggactgacatagcaatagaagctgctgagtatgtgctcatgagaaataacttggaagatgtgatcacagccatcgatctttcccggaagaccttttctcgtattcgattgaactatgtgtttgccatggcttacaatgttgtggctataccagttgctgctggtgtgttttatccttcactggggatcaagctgccgccatgggttgctggtgcatgcatggctctctcttccgtaagtgttgtatgctcttctttgcttcttaaaagatataaaagacccagacttactacaatacttgaaataattgtagaataataagaaaggaatgaaacctactagggccggcctagtagtggggagatttgtgtagtttggacgagattttaggtttaaatctcgtcattattgttcacacaaaaaagagagaaataaatgagaataattataggttttagcttgtgagggtacaaatgacttttgatcggaacttctaattccagttttgtgcatgtttcttccgtttctgcattcctggggtgttgttgtaaatgtagtagctgccaattaattgtaaattgtacttggattgtaattggtgtagcactctcccctccaatacgcacaatttcactcctcttgatacgtaacttctcccatagagccatatgtaggggactatgtgaatgtgtatgtgtgcaaaagtgaatttatagtgtttctttgaatttatctaggttttttatacgtaacttctttccaacttcgtgagaga

SEQ ID NO: 6068 - DNA, 858 bp, Glycine max
gaaaaacaaacacagatagaaagaaaagaaatttcaccgtaccagagaacaaggaaggatagaagaaagtgaaagaaaatggcgttgtacatggacgaagaagagatttggaagtgtccgaagcatccatcaaagagaagaagaagcggaatttgccctacttgccttcgagaccgtctcgtaactctttgccctgactgtgctaacgtgcgcccctgttcctgctacgccaccagctcctcctcctcttcctcgtcttcctcctccttatcgcgtttttctggcgccggcgatggcgtcggttccgtcggccgcgtccacaacctcatcgagcaagagccagggctccgccgctcgcgctccatggcgattccgtttctcaggtcacggtcgcggttctctggcggcggagatagggtttcggatctcgacagcacgagggactcgccggcaatgaacggaagccggtcggcgaggtcgttctggtcaatgttcaagtcgcagaagagcagtagacacggcggcggaggaggcggcgcgccggagcaagagtgggaggcgaaaaagatattggcggaggaacgagacggcgatggtggcataaatccgatgatggtgcggtcaaggtcggtggcagtgacggcggtaacggtggtttccggcgacggagaattgagtccgcggacgaaagggagagggtggttcttcccaagtccgatgaaggctttccggcaatccagggtctccacagtgattcgaggaagcgtctccttcgcatagagggtgtaattttgtcccctaaaaaaattataataataataacaacaaatactttatataagtttatatatattaacc

SEQ ID NO: 6069 - DNA, 3242 bp, Glycine max
ttttcttaaacatgctgaagctgttgagaaagatcttcctgcaagggagcttcatgaacttttattgctttctctgcaatggctgagtgggatgataagtctttccaaccttgtctgtccattgcaacttctacgtgaaattgaaaccaaagtatggctcctagccgttgagtctgagactcaggtgaagagtgaaggagatttcaattttaccttttctaccagggagagtggtatcaagaacgaccccagtattattgaccgaactgctagtataatagcaaagatggacaaccatataaatacaatgaggagtagaattgtagaaaaatacgagtccagggaaaataacctattcctcccacaagaatcaagtgatggatgctggtctttcaactacttttggtgggaatacaaagacaaaaagaagggccaaaggatacatggcaccaagacgcccacctcttgaatcagcagataaaagtgctgatactgatgatggctctagtaccaatagtttaaaaaatgagtttcagttgcaagaggaaaacgtaaaagtggaaatgtctttttctaggtgggaagaaagggtcggagcagcagagctagaaagggctgtactttctttattggaatttggacaaattgctgccgccaagcaactacaatataaattctctcctggacaaataccatctgagtttagacttgttgatgcagccttgaagcttgctgctatttcaacacctcctagcaatgtatcagtgccaatgcttgatgaggaagtgcgttcagttatgcagtcatacggtataatgaatgataagcactatgttgacccgctgcaggttttggagagtttggtgaccatttttattgaaggcagtgggcgtgggctgtgtaagagaataatagcagttataaaagctgcaaacaccttgggcctctcattttttgaggggttcaacaagcaaccaattgaactactacagctgctttcgcttaaagcacaagattcctttgaggaggccaactttctggttcagactcatccaatgccagcggcaagtattgctcaaatacttgcagaatcttttctaaagggtgtgttggctgcacatcgtggaggatatatggattcacagaaggaggaagggcctgctccattgctgtggagattttcggacttcttgaagtgggcagagctttgtccctctgaaccagaaattggacatgctttaatgcgtttggtgattactggacaagaaataccacatgcgtgtgaggttgagcttcttattctgtctcaccacttctacaaatcatcttcttgccttgatggagttgatgttcttgtggcccttgctgcaactagggttgatgcttatgtcttggagggtgattttccatgtttggctcgcttgataactggagttggaaatttttatgctctcaatttcattcttggcattcttatagaaaacggtcagttggatcttcttcttcagaagtattctgctgctgcagacacaaacactggcactgctgaggctgtcagaggatttcgaatggctgttcttacatccttgaagcatttcaaccccaatgaccttgatgcatttgccatggtctacaatcattttgatatgaaacatgagacggcagctcttttagagtcacgtgcagagcagtcatgtgagcagtggtttcaccgctacaacaaagaccagaatgaagacttgttggattccatgcgctacttcattgaagctgctgaagttcactcttcaatcgatgctggcaacaaaacacgtaaggattgtgctcaggcttcccttctgtcccttcaaatacgaatgccagacttccaatggctttatagatcagaaaccaatgctagacgagcgttagttgagcagtctcgatttcaagaagctctgattgtagctgaagcttataacctgaaccagccaagtgagtgggctttagtactctggaatcagatgcttaaacctgaagtaatggaggagtttgtggctgaatttgtggcagttttacctcttcagccttcaatgctgattgatttagctaggttctatagagctgaagttgccgccagaggggaccaatcccatttctctgtctggctcacagggggaggattgccagctgaatgggctaaatatttaggaagatcattcaggtgcttactgaagcgaacaagggatttgaagttgcggatgcagttggctacagtggcaactggatttggggatgtcattgatgcatgtacagaagaaatggataaggtcgctgacaatgcagcaccactagttctgaggaagggtcatggtggagcttacctccctttaatgtgaaagtttctactgtagatcatcataatgattggataatcacgatggacaggaagttggttcttgaccttgaacccattgattagggaatattgctgcaagcattgaagatggcgagcagaaaccttaagtgttgaccgaatgaaaattggacggttaggtggtgaaagtgagatgtattttttttggttgagtgaatgcttgatggttgtatattaggccaactgtatttatagctcattcttgtaaaacaccatggtagttttggttttctccattttttttgcagggaggagagggtagtttattgtcgggttttgaggctagtagaatagaatgccccatgggtttcttttttcttcttatttttcccctcaaaaatgtatagttcttgtacatcaatataaaaatccatttgtcatgttttacatacaagctccaatcctatcgacaaaatactcatgcctagtgctgttttcacacaaactataggcagtcttttagttttgctctagaacacgtgttactgagttatgccatttcaatcttttcacggggtcgaatctctctagagtactagttttccatttgcttgctgttgaaagaatagtatttttatttttttttattttttacgaaatgaattgagaaaagcaatttctgccatgctattgaaccctttcctgactcaagttcgcttcctttaccaatttaagtatgtatgcttagacggagaagttgagtcaatgcgaatgaaggttactttttcaatataaattaactttttattctttttgttttgaaaattaatttaataaaagcaatcggggaacccggggggattttgttttgacaaaaggggtctct

SEQ ID NO: 6070 - DNA, 1476 bp, Glycine max
tcagctacgtagccccccccccccccgggctgcttcctcggccccccccccgctcttatcctcaaatcccaaccactatctctttctctagtcttactttcccatgtcttccactcccaccaatctcattgatttcttggtgaaccaagccaatggagtgaagggtctcgctgatttgaacctcgcaagtgttcctcaccaatacattcaacccctccaagccagattagaccacaccaaaattgtcactcagaaatcaatacccatcattgatttcacaaaatgggaagacccagatgtccaagattccatctttgatgctgcaaccaagtggggtttcttccaaattgtgaaccatgggataccctctgaggttcttgacgatctcaaggatgctgtgcacaggttctttgaattgccagctgaggaaaagcagtgtcttaaagacaactcaccccctgaagttgtcaggttggcctctagttttagcccctatgctgagtcggtgttggagtggaaagattatctgcaacttgtgtatgcctcagaggaaaaaattcatgcatattggcctcctatatgcaaggaccaggcactggaatatatgaagcatgctgaagctttaattagaaaattgttaaaggtgcttcttaagaaactgaatgtgaaggagttagataaagcaagagaacacactctaatgggggcaatgatattgggtttcaattactacccagcttgccctgaccctgaagttgtagcaggggtaggtcctcattctgatgtatcatccattactgtccttctacaggatgatattggagggctttatgtaagaggcagtgatggtgatagttggatctatgttcctcctgttgagggagctttagtaatcaatattggggatgtgctacagataatgagcaatgaaagatgcaaaagcatagagcatagagtggttgcaaatagaagcaagaccaggatctccattccaatctttgtcaacccagcacctgatgctgttattggtcctttgtcggaagtgttggatgatggtgatgaaccaaaatataaacaacttttgtactctgactatttcaagtatttcttcagcaaggctcatgatgggaagaaaactattgaatttgccatgatatgattggtgactgtatctatgaatatttggttttgactaagtctaatgacatcgtgggctctatgtagccgacctcacttaatagaataaggcttctgtaattgtatgatttgtgctcattgttggcagtatttaaggtgtttgaaatccagctgctttttgttcggatcaacatagccgaaaagcatatattatgctgatctttatttaacggaattctagcatgatacattgaaacagaaaatgcaaaaactttattgtgatgatcagctgtggctcctgtacaattttgattaaacattttggatgatttttccctt

SEQ ID NO: 6071 - DNA, 1161 bp, Glycine max
tcagctacgtaggccccccccccaaaaaaaaaaaaaaaaaagcacttaacattaaacaatggcgttgttctcttctgccgcaaccgttcttcctcggaacctggcattcaccaaactctccctctctcactctcacactcttctaccgcgcttcctttctttcccaactcccaagtcatcaaaccctcgcaaccgcgtcgcagtctctctccaaaccccacgcgctcaatccgccgcgtccgcttctccctccgcctccttccacggcctctgctacgtcgtcggcgacaatatcgacaccgaccagatcattcccgccgagtacctcaccctcgtcccttccaagcccgacgagtacgagaagctcggctcctacgccctcatcggcctccccgccacctacgccacgcgtttcatcgaacccggcgagatcaaaaccaagtacgccatcgtcatcggcggtgccaacttcggttgcggctcctcccgcgagcacgcccccgtcgcgctgggcgcctccggcgccgccgcagtggtcgcggagtcgtacgctaggatcttctttcggaactccgtggccaccggcgaggtgtatccgctagagtcggagggacgcctctgcgaggagtgcaccaccggcgatgtggtgacgattgagctcggagagagccgcttgatcaatcacaccaccggaaaggagtatcgcttgaaaccgatcggcgacgcgggtccagtgatcgaggccggtggcatctttgcctatgccaggaaaaccggcatgattccctctcgttgagatgttggcatggaagtatatacttggggaagctggaacgtttcgtggaactgtgttactttctcaattcagattttatctcgtaatatgcaattttaacatttgataggcaattccacagatagactactgcattgcctttcttaggtgaaagttatttggttgaaaattattacagtaatttagctttagacttgcttatttgtatttaggaaaaatgatattttccttgatatcagagtttggatgaatgtagcatcagcaggatatttagtaaattctggtttgtaaccttttgcattgcaaaaaaaatttgagaggctgcggccgctctagtggaaaataaaacgggcgaattagatcct

SEQ ID NO: 6072 - DNA, 1258 bp, Glycine max
ataatttttctcttggttgcgaattaagattggaaatgagaaaatagacggaagtgagagaggaggcactgagcatccaacaatggccttgttctctgctaccgcaaccgttcttcctcggaacctcgcattcgcttcctccaccaaactctccctctctcacagtcactctcttctacatcacttcctttcattccccactcccaaatcatcaaaccctcgcaaccgggtcgcaatctctctccaaaccccacgcgctcaatccggcgcgtccgcctccgcctccttccatggcctctgctacgtcgtcggcgacaacatcgacaccgatcagatcattcccgcggagtacctcaccctcgtcccttcgaagcccgacgagtacgagaagctcggctcctacgccctcgtcggcctccccgccacctacgccgcgcgcttcgtcgaccccggcgagaccaagaccaagtactccattgtcattggcggcgccaacttcggctgcggctcctcccgcgagcacgctcccgtggcgctgggcgcttccggcgccgccgcagtggtcgcggagtcgtacgctaggatcttcttccggaactccgtggccaccggcgaggtgtatccgctggaatcggagggacgcctctgcgaggagtgcaccaccggcgatgtggtaacgattgagctcggagagagccgtttgatcaatcacaccaccggaaaggagtatcgcttgaaaccgatcggcgacgcgggtccggtgatcgaggccggtggcatctttgcctatgccaggaaaaccggcatgattccttctcgttgagatattggcatggaagtagatatttggggaagctggaaccactcgtggaactgtgttacctttggcagcagctaccaattatttgagtatatactatttgcaacatactgctttctcaactcagattttatctcgcattatgcagttttgacatttgacagacagtcaattccgcagatagactactgcattagacttatttgtattttaggaaatatgaagttttcattatgtcgaagtttggatgaaatcagcaggattttagtatattctggtttgtaatcttttgcattgcaaaggctgatttgagagacttgtttttaaataatataaaataaaacgggcggattagatccttcacaaaaaaaaaaaaaaaaaaaaaaaaaaaaaaaaaaaaaaaaaaaaaaaaaaaaaaaaaaaaaaaaaaaaaaaaac

SEQ ID NO: 6073 - DNA, 1009 bp, Glycine max
tttttttttttttttttctgcctgtaagttcaaaatcttttatatagccataacaacttcactttatattaattatacaagtgattcaacaaaccaactaaaaaagacaatacaagatcctgattcacaacactgaaaattgggatgggtccagccgctagctggaacgagacatgaacagtttaacactagcggggacataaatctcaagaaactactgagatatttactagttttcacagttgcagagcatctaaatgagacaaaaaaacagggtaggcgatgttctatatatagcacaagatggagtagttaagcatgagaattggccagctgatttatcaaagccaaggcattactagtcaattgagccacctgaagaatttggcctctcaccgtgttctttacatttgaaccaccagcagcagccgtctcttggaagccatcggtgcacgtgctctcatcggtcaaagcagcactcacccacgtttctacgtcactcattgtcatctcaaaattggagggtgttagttgagccatctcagaaatagaccttctgagctcatcaacagagtcagccaactcctccacacagtccttcatcgctgcaacctctcttggcttcaggccttgcctctttgccagcgtcgacatcattgccgaggtcgacttggcagacgcaagggtcacattcagggctgtgcctgtcagaaccacacggtttgtttggatcaagtctgcatgcttcactaaggagctgtagcagagtcttggataggtcgtggagctgcaagatgttctaatgaacaccgtgctcgcttcttggtatggcctttcactgtcactgcctttcttggcaccctgtgataaggtcaaactagaagcaagaattatgacaagggatgtcataaggtgcttggaacaaatggcctccattcttttcctatcttgatgattgggattattaattttcttgtgtccccgccggccgcgtgggcgcagccgtagc

SEQ ID NO: 6074 - DNA, 2046 bp, Glycine max
cccacgcgtccgttcagctacgtaggccccccccccattcagagttgcatcgactgaaacccctaggaaaaaccccagtttctctctttcactagttccgttcaagttctaaccaagcactcacagtacttttgcttctctcgaagatgtctctacgagtgctgaaccctaacgccgaagtgctgaacaaatcggcggcacttcacatgaacatcaatgccgccaagggtttgcaagatgtcctcaaaaccaacctcggtcccaaaggaaccatcaaaatgctcgttggtggtgctggtgatatcaagcttaccaaagatggcaacactctcttgaaagagatgcaaatccaaaacccgacggcgattatgattgctagaacggctgtggcgcaggatgatgctagtggtgatggcaccacttctactgtcatcttcattggcgagcttatgaaacaatcggagcgttacattgatgaaggtatgcatcctcgtgtgttggttgatggttttgatattgcaaagcgagcaactctgcaattccttgaaaagtttaagactcctgttgtgatgggtggtgagcctgataaagagattctcaagatggtagcaagaacaaccgtccggactaagttgtacgaatcacttgcagatcaattgacagatataattgttgatgcagttttatgtattcagaagcctgaggaagaaattgatctgtttatggtggagatcatgcatatgcgacacaaatttgatgttgacacacgcttggttgagggtattgtccttgatcatggttctaggcaccctgacatgaagcgacgtgcagaaaactgctatatcttgacatgtaatgtatctttggagtatgagaagagtgaagtaaactcaggctttttctactcaagtgcggaacagagagaagctatggttgcagctgaaagacgacaggttgatgaaaaagtcaaaaaaatcattgaactgaagaataaggtttgttctggtaatgatagcaattttgttgtcatcaaccaaaaaggaattgatcccccatctctggacctgcttgcaagggaaggaataattgcccttcggagagcaaagaggagaaacatggaaagattggttttggcctgtggaggggaggcggtaaactctgtagatgatttgactcctgaatgtctgggttgggcaggattggtatatgaacatgtccttggtgaagagaaatatacatttgtggaaaatgttaagaatcctttttcctgcacaatcttgattaaaggtcctaatgatcatacaatagctcaaattaaagatgctgtacgtgatggtttgagggccgttaagaatacccttgaagatgaatctgttgttttaggtgctggtgcatttgaagttgctgctagacaatatctgatgaacgaagttaagaaaacagttcaagggcgtgcgcaacttggtgttgaggcttttgctgatgcgcttcttgtggtgcctaagacacttgctgaaaactctggacttgacactcaagatgtgattattgcccttacgggagagcatgacaaaggaaatattgtggggttgagcctgaacacaggagaacctatagaccctgcaatggagggtatttttgacaactactctgtgaagcgccaaatcataaactcagggcctgttatcgtgtctcagttactggtggtggatgaagtaattcgtgctggacgtaacatgcggaagccaacttaggtgttctttcttgaagtttctcttttgaatagggtgtgcaatgaactttctctatttcaaggtgccagcagcattcgttgggattgttatgactcgcttcttttaatctgctctaatggaacattttttctgggttttgttttttcccattttaattttattctctctcaatgactgtcatataagtgttctatgactgaattttgggctccttttgaaatttgtaagcataatttattttgtagaaaattagttgaaagaatgctttaccttggaaaaaaaaaaaaaaaaa

SEQ ID NO: 6075 - DNA, 1695 bp, Glycine max
cggtctcttgggcgtgtgttcactcccctcgggagcatccaaaatggcgcattcttctgttatagtcttcctctgcactctccttctcttcttttctccgtcaattcgtgcctccgacgatgacgtggcgctgcacgcgaagaagctcatcagagacctcaacttgttccccgacgctgacgtcaacatcgttcccgttgctaattgcaccctccaaccccgcaggatcgtcgagaagcgcctgaggttcccgaagctgctagcttcggattccgagccttcggttgaggatttgggtcaccacgctggctattaccccattcagcattcacatgccgcaaggatgttctactttttcttcgaatcacgcaataggaaggaggatcctgtcgtaatttggttgactgggggacctgggtgtagcagtgaattggctttgttttatgaaaatggccctttcaaaattgctgacaacttgtctcttgtgtggaatgagtatggttgggacaaggcatcaaaccttttatatgttgatcaaccaactggaactggctttagctacagttctgatttgcgtgacattcgtcataatgaagagggtgtcagcaatgacctgtatgactttattcaggccttcgcgggagagcatccccaatacgccaagaatgacttttttattacaggagaatcatatgctggacactatattcctgcctttgcgactcgtatccatcggggaagcaaagctaaagaaggaattcatataaacctgaagggattggccattggtaatggacttactaaccctgcaattcagtataaagcttaccctgattatgcactggaaatgggcataattaagaaggctacacgtaacctccttaacttagtattggttccagcctgtgaatcggcaataaagctgtgtggcactaatggaaagacttcctgtatggctgcatatgtagtttgtaatgtcatattcagtgacatcatgttacatgctggagatacaaattactatgatatcagaaaaaagtgtgagggaagcctttgctatgatttttcaaacatggataagttcctgaaccaacaatctgttcgggattcactaggcgttgggaaaattcattttgtttcttgtagcactgaagtttatctggagatcatgcatatgcgacacaaatttgatgttgacacacgcttggttgagggtattgtccttgatcatggttctaggcaccctgacatgaagcgacgtgcagaaaactggctatatcttgacatgtaatgtatctttggagtatgagaagagtgaagtaaactcaggctttttctactcaagtgcggaacagagagaagctatggttgcagctgaaagacgacaggttgatgaaaaagttaaaaaaatcattgaactgaagaataaggtttgttctggtaatgatagcaattttgttgtcctcaatcaaaaaggaattgatcccccatctctggacctgcttgcaagggaaggaataattgctcttcggagagcaaagaggagaaacatggaaagattggttttggcctgtggaggggaggcagtaaactctgtagatgatttgactcctgaatgtctgggttgggcaggattggtatatgaacatgtcaatagatttgaagggtatataaaggggtactgtttcctcgtgc

SEQ ID NO: 6076 - DNA, 861 bp, Glycine max
  misc_feature (716)..(716): n is a, c, g, or t
  misc_feature (773)..(775): n is a, c, g, or t
  misc_feature (784)..(786): n is a, c, g, or t
  misc_feature (794)..(797): n is a, c, g, or t
  misc_feature (805)..(811): n is a, c, g, or t
  misc_feature (828)..(830): n is a, c, g, or t
  misc_feature (835)..(837): n is a, c, g, or t
  misc_feature (856)..(858): n is a, c, g, or t
tttttttttttttttttttttttttttttttttttttttttttttttttttttttctatttttttttttaaaagaaatgaacttgaattataggtaagaattcaaattacatcaagttaacaaaaatttgagtacacattttagaaaaaaagggaaacaagagaaagagaagaaggaagcttaaaaaatcaatttgatgcctcaaatccactcatgcatccaccatttcacgggccgcaaaagaaagaacttgagggaatcttgagttttccggttgtcaaaaattgtctgcctttgtaggaacactatttttagcttcttcgtattgtgttggtgttaataacgctaacataagcgcaataattaacactcaaaaaaccacatgattggaacgtcgaaaacattgaatttggaacacctcttacaatcttccctcattgctttccttctattttcaaatttggacgcatcttagtgatgacttctgccgaatatatgcgaaggttcttcagcacccctgctccaaatacgtacatggggcacatcttggatgatccagtggtcttctcctccatcaggagcaatgcgctgcaccaattcagttggcatgtagttgatatagagatctttaagcttctccaagtgttgaattcccgagggaactgttttgagttgggagaggtcttgtaaagcaatttcttccacagaacacagtnctcctctgtcgataaggatgcacttcaattgatccaaatatctgagttccagtcgcnnnagtttctgnnnccctccannnngaaattcnnnnnnncaccttcataagcattnnnacttnnntcgaggaacaacaaccttnnnata

SEQ ID NO: 6077 - DNA, 1371 bp, Glycine max
  misc_feature (869)..(869): n is a, c, g, or t
taatttatgaaaaaaatccacattattggacttcatcgtaatggaactttaaaaacccacaacatttacaggaaatttttgcttacgaccctataaaaacaccaagttaatttcttcttaaaatgatacaatgaaattgttcaagtatttatcaacatggaaataaaaaactcaatccagttgaggtcaacatctaccaattctgagcacaataatagaaaggattagaatggggagaatcttataacgaagaaacgttaacattggttggtgtaggcatatactcgttagacaattctatccctaacttgtacgagagatgttgtagagaaagaaaaatgaagcaaatactagaagtgtttttgtggcttttgtttttattttaggaattacataatggttgcattttttattgaagaaaagaaaaaggccacgaatgtcattctacaaagttatagatgtgaaaaagacgcaccttctattttcaaatttggacgcatcttagtgatgacttctgccgaatatatgcgaaggttcttcagcacccctgctccaaatacgtacatggggcacatcttggatgatccagtggtcttctcctccatcaggagcaatgcgctgcaccaattcagttggcatgtagttgatatagagatctttaagcttctccaagtgttgaattcccgagggaactgttttgagttgggagaggtcttgtaaaacaatttcttccacagaacacagtgctcctctgtcgataaggatgcacttcaattgatccaaatatctgagttccagtcgctttagtttctgaaaccctccactttgaaaattcaaagtttcaccttcataagcattgttacttaaantcgaggaacaacaaccttggcatattttttagtgaattcaatggatcattagtcaacctggagctcaccaaagacagttgcacaagatttgggaactgtaaaatcccattttggcaaccttgttaacgtcccccataggacaagctgccaaagtgtagacataggtgacgtaatgtacaagtcaattacttccctccaatcagctgtataaatatgtagtttctccaagagtggcatctcatttattacggaacacaaagtcttttcgggttttcccctaaattttaccacccacagttcccttaactgctttagctttcctacctctctaatgaccactccatcatcatctataaacactggaggtatctcttctagggatgtcatgcctccaatatccttccattgaattgaacacctataatcagccagaagatgacgtagctttttaagcttactaatctcctctggcatctcgggggggggcccccgcggcgctctc

SEQ ID NO: 6078 - DNA, 728 bp, Glycine max
ctccagggaagaaaaacaattaacaaggccttttagagataaatttttcttatatttctttcattattagttgctaaaatggatagagtaagagagttggcatcaaagaaggcagcagttatattcaccaagagttcatgttacatgtgccacagcatcacgcaactgttctatgagcttggagcaagccctgcagtgcatgagctagacaaagatggctatgggagggaaatggagtgggctttgaggagcatggggtgcaacccttcagtgccagcagtgttcattggtggaaaatttgtggggtcttcaaaggatgtcatatccctccatgttgatggctctctcaaacaaatgctcatggctgcaaaggccatatggttctagctagtactcatccacactccaataatataatataagaagctgctagctccttaagatatatatgaaggagcatcttttatatatatatatatatatacaatgttttaagtcaagggacaccccttctttttcttgagtgtcctctttagcttatgtatcaaagaggaattctgtataaaaaaaaatgcagtcttgcttttttggtatgtattttatatataaaagggtggctagcttactatatatatagctaatgcctacaatgttatgaaacttgatcatcatgtgggagaaaattaactgctcctactttggttgatgcaactttgaactttctggcc

SEQ ID NO: 6079 - DNA, 1340 bp, Glycine max
aagccccggccctgccgtaccgatccccactttccggctcccccctcccgctcgccggctgctaggtggccccccccccgcaccaatcaatcattcattcactccaaggagggatctctctctctcactccttcttctctctcctctggcacccctaaagcttcttctgttctgtgcaggcagtttttctttggtttggttgcatcctttgatctgatcagcaaatttgagaattcagtttgggaagggccattcctctttagtgcaaaacagatcgcaggtgcctttgtgctgatggccactaatgaaaatcttccaccaaatgtaattaagcaacttgccaaggagttgaaaaatcttgatgaatctcctcccgagggcattaaagttgtggtaaatgatgatgatttttcgacaatatttgctgacattgaaggcccagctggaactccttatgagaatggagttttccgaatgaagctgttgctgtcccatgatttcccgcattctccacctaaaggttttttcttgactaagattttccatccaaacattgcaaccaatggagagatttgtgtcaacacacttaaaaaggattggaatcctagccttgggttacggcatgttcttattgttgttaggtgtctattgattgaaccattcccagaatcagctctaaatgaacaggctggcaaaatgctgcttgagaattatgaggagtatgctagacatgctaggctttacactggaatccatgcaaaaccaaagcccaaattcaagagcggagctatatccgaatcaacaactgctctgaatgttgatcagaccaacacctctgtgattagtggtgacatcaaaaccacaccggcgagtgctgcattgccagtgccagtgcttgcaaccaccacaacaagaggaaataatcaggaacaggcagcggctgttaatggttcttctgctgctacagtcatatctgctgcttctgcaccaccaaagaaggaaggtggacaagcaaaagctcaggcggacaagaagaagatagatgccagaaagaaaagtttgaaaagattgtaataaaaatcttcaatcattgaagttttttatttgtgttttagttttacattttgatagagaaagaggggagggagtggggatgtggtctcctgggttcaacatttgctttataaaacgagtgaggtattttctttgggagtaaatggatgaaattgaacttcttgttgtctttgaacttgtgctatgctctttgctaaaatattgaacttgtccataatacacccttattactggcccttagattaatcaaaaaaaaaaaaaaaaaa

SEQ ID NO: 6080 - DNA, 2266 bp, Glycine max
  misc_feature (2196)..(2197): n is a, c, g, or t
  misc_feature (2223)..(2223): n is a, c, g, or t
tacggctgcgagaagacgacagaaggggaccaatcaatcgttcattcattccaaggagggatctctctctctctctctttctctcctctcacacccccaaaagcttcttctgttccgtgcaggcaatttttctttggtttggttgcatcttttgatctgatcaacaagtttgagaattcagtttgggaaaggccattcctctttagtacaaaacagattgagggtgcctttgtgctgatggccactaatgaaaatcttccaccaaatgtaattaagcaacttgccaaggagttgaaaagtcttgatgaatcccctcctgagggcattaaggttgtggtaaatgatgatgatttttcgacaatattttctgacattgaaggcccaggtaagtagcttttatgttttttgttgtatgattgagcactcgcatttggtaaggagctcaaactaactgcagtactataattttgcagctggaactccttatgagaatggagttttccgaatgaagctgttgctgtctcatgatttcccgcattctccacctaaaggttttttcttgactaagattttccatccaaacattgcaaacaatggagagatttgtgtcaacacacttaaaaaggattggaatcctagccttgggttacggcatgttcttattgtaagtgcagtagatattcttgatttattgagtcaagttttgcttgattggtctttgtgtttattgccattgattcccattttgaacaggttgttaggtgtctattgattgaaccatttcctgaatcagctctaaatgaacaggctggcaaaatgctgcttgaaaattatgaggagtatgctagacatgctaggtaagttgagccaatgatggtattcctgtactggaattttgaaaatttaatgagtggctgaatggtgttgctaaggagcattttattagatgctttcaattacataaaaaaatattaaatatttttttttaaaatatatatgttccttttcattagcattctccctggtttagaccctgttctgaaatcttttatggcaaatgaaacttgaaccaagagctatgttgagccccccccaattcaaataacagagattgctttcttcatctgccatagttcatcagtcggacatctatatatatctacccttggtgtttgagagaaaggagtccattcttccttgtttcccacattgggggacacatgctgaatgtgatcccagctgtagtatttatatctcaaacaaactagttcatgtacctcattggagctgtgtttctttagctgctcaattgcacaggagttgagatgtaacatgtgggacgtttttgattttagactcgggtgtttttttattggatttgataaattttcttgactttgataaacatttgggagctagttgttggatttgataattttctcgcgtttgataaacttttctccatgctattgttaccttattctacctacttggttcataaattattttccattatgcatgaattgaggagtatcatttgtggcatgcaggctttacaccggaatccatgcaaaaccaaagcccaaattcaagagcggagctatatccgaatcaacaactgctctgaatgtggatcagacaaacacctctgtgattagtgctgacatcaaaaccacaccggcgagtgctgcattgccagcagccaccgcaacaagaggaaataatcaggaacaggcagcagcggctgttaatggttctaatgctgccgctacagtcatttctgctgctgcttctgcaccccaaaagaaggaaggtggacaagcaaaagctcaggtggacaagaagaagatagatgccagaaagaaaagtttgaaaagattgtaataaaattgttcaattattgatgttttttttaattgtgtcttagttttacaatttgatagagaaagaggaaggagtggagatatggtctcctgggttcaacatttgttttatataatgaattagtaatttcttgttaggagtaaatggatgaaattgaacttgttgtctttggacttgtgctatactctttggtaaaatattgatcttttagggaaagaatgctctataagtagcggtagacttaagttaggttatttttggattcaactcatttatgaaaatgggattaaaaattttcttttgaattcctannaaaaaaaaaaaaaaaaaaaaaaaaanaaaaaaaaaaaaaaaaaaaaaaaaaaaaaaaaaaaaaaaaaaa

SEQ ID NO: 6081 - DNA, 1139 bp, Glycine max
  misc_feature (1041)..(1041): n is a, c, g, or t
  misc_feature (1067)..(1067): n is a, c, g, or t
  misc_feature (1100)..(1100): n is a, c, g, or t
tcagctacgtaggccccccccccgattacatattgaaaagtcaatctaacaagtactccaccctaaaggaaaagctttctagttgcttgtcatctaatatggttcgcagatggtttgtttttgaatggttttatagtgcaattgattatccatggtttgccaaaagggaattcatggagtacttaaatcatgttggactagggaatatcccaaggttaactcgtgtcgagtggagtgtcataaaaagttcccttggcaaaccccgcaggttttctgaacactttctatgtgaagaaaggcaaaaacttgaacagtatcgggaatcagtgaggaaacattacactgaactgcggactggtattagggatggacttccaactgatttagccaaaccattatatgttggacaacgtgtaattgctcttcatccaaaaacaagagagattcatgatggtagtgtgcttaccgttgactatgacaagtgcaggattcagtttgaccgtcctgaattaggtgttgaatttgtaatggacattgattgcatgcctttgaatccatcagataatatgccagaagctctgaggaggcatattggttcccaaaaagcctctttcatgaataaagaaccacaaattaatggaaattcaaattttgggggctgcgaaatgcattcctttcccgtgaaggcaaaggttgctaccgttgataacctctgtgcacaagctggttgtgctcaaccatgtaaagtaacacaccatcaagctaaggaagctgacatacatgcagtttctgaattaaagcgtgctctagataaaaaggagacattgttgatggagcttcgaagtgcaaatagcgacatattggaaaaccaaaatggcatagaatgcttaaaagattccgagggtttcaagaagcattatgccacgggtttctgatgctatgctacaactgaggcaacgcaatacttacagaggaaactctctgccaccctggatgaagccacaagcaagtttcaatgttcacgatgatcttcctggtatngtggatagttctctacacaagattanggtcaaactgtgttcaagtattaaaagatccangctaagggcacatgcatggtagatgctgcatttgaggca

SEQ ID NO: 6082 - DNA, 2595 bp, Glycine max
gaaattaacccccgcacccacaaggaggagacaacacaaagtgcaaaaaaacagaaattaaacactactagtagctagctagggtgagaaaatgggtgaagctaaggaaatatggtctgcaccaataacccctagaacagcttcagtagtaggaacacctgttgtggcatctccacctgtgtcatgtccaccctctcagcttcactcaccatctctaacaaggtcacctctacttcaccctgaggatggagatgcaccacgtcgtaaaacatctaagactccaaagactccaagaacccctagaacccctagaaccccacttagaatctctaatttgactccaaagttcatcacccctttgggaagccctatgagaaaagctctgaggttcaccaagcttgatcctcaggatgcttggcttccaatcactgagtcaaggaatggtaacaagtactatgctgcttttcacaccctttgttctggtattggaattcaggcccttgttctccctgtggccttcactattcttggttggacgtggggaatcataactatgactctggctttcatatggcaactttacaccttatggctgctggtcaaccttcatgagtcggtagagcaaggtgtacgctactgtcgataccttcaactctgcggagctaccttcggggagaaacttgggaaaatcctagccttgttcccaatactgtacctatcagcagggacatgcaccacattgatcatcataggaggatccacagcaaggacattttaccaagtggtgtgtggtgaaacatgcactgccaaacctatgaccactgtggaatggtacttggtgttcacctgtgtagctgtggtgctatcacagttgccaaacttgaattccattgctggggtgtcactcattggagctgtcactgctgtagggtattgtactgccatttgggtaacctctgtggcacggggtgccctaccggatgtgagctataaccctgtgaggactggaaacagtgttgaagatgcctttagtgtgctcaatgcattgggtatcattgcctttgctttcaggggccacaatctcatccttgaaattcagtctactatgccttcaagcgagaagcatccatcacacgtgccaatgtggaaaggggtcaaggtttcttacacgatcattgcagcatgcttatttcccatggccattggaggctattgggcctatggccaattgattcctgcaaatggaggaatgctcactgccctataccaattccactctcgcgatgtgtcaagattcgtgctagggttaacaagtttttttgtagtggtgaatggtttgtgctcgtttcaaatctatggcatgccagcattcgatgacatggaatcagggtacactacaaggatgaagaagccatgcccgtggtggctgcgtgcatttattagggtgttctttgggttcttgtgcttcttcataggagtggctgttccgtttttgtctcaaatggctggtttgattggaggagtggcgttgccagtgacattcgcgtacccatgtttcatgtggcttaagacaaagaagccaaagaagtatagtgccatgtggtggctcaattggttcttggggacattgggagtggctttgagtgccatattggttgcggctagtttatatgtcatcattgatactggtgttaatgtgagctttttcaatcctcagtagtctcacatatagagtgggaaaatgtactaggaaaatgatgttgggaggtaattaattagtaagagaattgctaaggttttctttctttctttttttgagaaattcaaatttgtgaccccactttgtagttctaggttgattttgcctaatagtgatatttgtataaatatcattaactgcataaggggaggggaaggtaaatcaagattgtataaattttcttgttctgcaaattgaaaaatacttaagagtttatttagtcatacatgatatgatgaagtaggatatagtataaaatttaataatatttagacaatgtttcttttgcattgtataaaatactatactatgcattatataatataataaatattatcttacgtcagttaatccactgttaatattgaatatgataagattgttctatattaaaaaagcacgtaattgaaaatattattcatttgaagttgttatgttatactaaattaggaaaaataaaagcttacaaggcataagagaagaaaactcgaccactatatacattatatttaatattaaaaaaaaacaaatgaaagctgcgtaaaataattacaattcaaaactataagagttcaatcgataagttgtagtttttaattgagtagatttaatttctaaattacctaatcattgtctttagttcaaatagaaaaaaatagtgcaaattaataattgaatagcaatcttcattgagaacaactattatattcgctgcagtctactctattatttatacaattcacacactcaaaagtcttaataccaaaaaaaaatatttttggacactcaagacattatttgacatatagtgagaggaagagaaaaaaaatataagc

SEQ ID NO: 6083 - DNA, 2040 bp, Glycine max
  misc_feature (1)..(9): n is a, c, g, or t
  misc_feature (12)..(17): n is a, c, g, or t
  misc_feature (19)..(19): n is a, c, g, or t
  misc_feature (21)..(21): n is a, c, g, or t
  misc_feature (23)..(23): n is a, c, g, or t
nnnnnnnnnggnnnnnngngnangcgtccggtaccctttgcgaagcctagtttctattgtggtactcaagatttgaattctgcccatcaaagttttgcacgactgcatagtggattctttggaacacctcacatgttttctgttgttcgacttctgggatcccgatcattaccttggcttattagagcccttcttgatcacatatcaaacaagattactttgcttgaaccaatgattacaggattacaagactctttgccaaaatcaattgggcttcttcctttcgatggaggtgtgacaggttgcgtgagactcgttaaggagcatcttaactgggagacaaaatcagagctgaaagctgaggttcttcatggcataaaagagattggaagtgtattatattggatggggcttctagatattgtgttgagagaaaaggattctatggatttcatgcaaactgctccctggctgggcttgcttcctggagcagatggtcaaatagcaacttctcaagatggtggagacagccctgttgttagtttgtttaaatcaacagctgctgcaatggtttcattaccctggttgtccatcacccacctctttccacatagctacgtagccccccccccccccagatcttttatacaaggctaacttgaacactggcaagtgtgctggagtatgcacttgctttcactagtgctgcgttggacaagtattgtaataaatggagtgctgcacccaaaacaggcttcattgacattacaatttctaaagatttctatcgaatttacagtggtctccaaattgtaagaagcaaccttccacacccctttcatttttcacgttgcttaataacttgatagcgctatgaatgatgaattgacttcacatataaaattatttacatgtataggaattgtcatacaccttttagctcacagttttgataagttaaattggcccctatttagtttgggggggctcttaaattgggctgaaaattttctgaagcatggaagcattactagttaaaggtgccttctctcgttttcaggatggctgaaaattagcctgaaccactttgtaatatcttgttcaatacattaatgaatttcctggtgtgtattttaaaaaaaaatatatattttgatgtgtgcttttgcttgagctacatagggatacttggaagagtctgcccaagtgccatcaaatagtcatgaaaggctgggagattcagttgcttgggggggatgcactataatttatttgcttgggcagcagctgcattttgagctctttgacttttcatatcagatcctcaatatcgcagaagtggaggctgcatctgttatgcaaacacataagaactcacaattttctgtgaagggatgggaagccttattggaagcaatgaaaaaagcaaggagattaaataaccatgtattttctatgcttaaagcacgttgcccccttgaagaaaagacagcttgcgctattaagcaaagtggtgctccaatacatcgtataaaatttgataacacagtttcagcatttgaaacactgccgcagaaaggttcttaaccgagtagtctagtggtagacttccagcaaattctgtgccttgttccctatacggtgtacatttaactatgcggtgttgtttgtaatagatactaagtacgtaatgtttcatgagccgagtttctattcagaggtagcaacaattttgcatttgataaaaaaaaaatgtttgacataggtgttcgatttgaacaaactgttggacaatatttggcctgctcgtatcgtatggaactaggttcaatctgaactcctacgaaaaaattcaaaccgaaatatcagagtacagctttaatggagctcagtcagttggtagttacaactgtcactagctattagtagtagttatgattgaatttagcttgtacaagattgtataaatgcgtttctctacctcttatgagtaattcaagtcgagatcatttgtggccggccgcaaaaaaaaaaaaaaaa

SEQ ID NO: 6084 - DNA, 2442 bp, Glycine max
ccacgcgtccggtcgcaacattgacagatcttggtttcttatggtttagagaattctatttagagtcttcacgagtcattcagtttccaattgaatgctctcttccctggatcctcgcggccggtgtacttgagtcaccgaattctggtcttctcgagagtgttctgatgccatttgacatctataatgattcagctcagcaagccttggtgttgctgaagcaacggtttctatacgatgaaattgaggctgaggtggatcattgttttgatatatttgttacaaaattgtgtgaaaccattttcacatattacaaaagttgggcggcatgtgaattgcttgatccttccttcctctttgcttcggacaatgcagaaaagtatgccgtgcaacccataaggctcaatatgctgcttaaaatgactagagtgaagctgcttggaaggatgattaatttgcgaagtttgatcactgaacggatgaacaaggttttccgtgaaaatattgagtttttatttgatcgttttgagtgtcaggatctgtgtgccatagtggaattagagaagttgttggatgtcttaaaacattcccatgaactactgtctagagatctttctgtagactcttttagtctcatgttgaatgagatgcaagagaacatttcccttgtatcattttctagtcgattggcctcacagatttggtctgagatgcatagtgattttttgccaaatttcattctctgcaatactactcaacgttttatcagatcatcaagaacggttcctgttcaaaagccatctgtaccctcttctaagcctagtttctattgtggtactcaagatttgaattctgcccatcaaagttttgcacgactgcatagtggattctttggaacacctcacatgttttctattgttcgacttctgcgacgtaggccccccccccatcattaccttggcttattagagctcttcttgatcacatatcaaacaagattactttgcttgaaccaatgattacaggattacaagattctttgccaaaatcaattgggcttcttcctttccatggaggtgtgacaggttgtgtgagactcgttaaggagcctcctacctgggcccccccccccgaactgaaagctgaggttcttcatggcataaaagagattggaagtgtattatattggatggggcttctagatattgtgttgagagaaaaggattctatggatttcatgcaaactgctccctggctgggcttgcttcctggagcagatggtcaaatagtaacttctcaagatggtggagacagccctgttgttagtttgtttaaatcaacagctgctgcaatggtttcataccctggctgtccatcacctacctctttccacattatgtcaaaacaagcagaagctgcagatcttttatacaaggctaacttgaacactggaagtgtgctggagtatgcacttgctttcgctagtgctgcgttggataaatattgtaataaatggagtgctgcacccaaaacgggcttcattgacatcacaatttctaaagatttctatcgaatatacagtggtctccaaattggatacttggaagaatctgcccaagtgccatcaaatagtcatgaaaggctgggagattcaattgcttgggggggctgcactataatttatttgcttgggcagcagctgcattttgagctgtttgacttttcatatcagatcctcaatatcgcagaagtggaggctgcatctgttatgcaaacacataagaactcacaatttgccgtgcagggatgggaagccttattggaagcaatgaaaaaagcaaggagattaaataaccatgtattttctatgcttaaagcacgttgcccccttgaagaaaagacagcttgtgctattaagcaaagtggtgctccaatacatcgtataaaatttgataacacagtttcagcatttgaaacactgccgcagaaaggttcttaaacgagtagtctagttgtagactgccagcaaattctgtgccttgttccctatacggtgtacatgtaactaagcggtgttgtattgtatgtaatagatactaagtacggtacgtatatgttcatgagccgagtttctatacagaggtagcaacaattttgtatttgataaaaaaaaaaatgtttgacataggtgttcgatttgaacaaactgttggacaatatttggcatgctcttatggaactaggtccaatctaagttctgaaccctacgaaaaaatacagaccaaaatattgttgtcagattacagctttagtggagctcagtcagttggttacaactgtcactagctattagttgtagttatcattggatttggcttggacaagattgtataaatacctttctcgacctctaaaaaaaaaaaaaaaaaaaacaaaaaaaaa

SEQ ID NO: 6085 - DNA, 854 bp, Glycine max
ggtatctcaaaccaagtcacgccaaaaatgtgatagaggttcctatttccgagctcttaaatacatctattttgtgcctttatctatctgcttgtttgttgcttggacaacgtgataactttagtgtgggtcattctgttgtcgtggtctatgactcctggagtcctggttttttgatagcggggaatgcaaacctgcagcacttgtttcatttattttcctattgttcaagaacctaagaagttgtggactgcgaggtatggctttataacatcggattaggtagtcttgtgtacagtgttgagaagatttgtgatgaatctggtgaggatccaaattgcagcagatcggtgactgggaatagcattgctgatcacttggtctattatggcgttgacatgggatcagatgagccaagttcatgcagaattgttatggattcttatgttcagaatactaacatcaaagattcaagaggaaacttaatcttgtccagagatcctgcaacccccctcatcaaattgagtggagagggtgacaatcaggaaaatcccattaatgttgattgaattggcatcagatatctgttgcatgatatgttccagaggtttgccgtgtggcattattcttcagatttcttctttcttcatggtccatacagctgaacaattttattgaacaggctagggctggaaggagtttgtatagtcttggactcgtgtacatatgctcatacttgtatatataactaataattatatttttttacttcataattaataattcttgatactttgttaagtgtataatttcactttcaaattctactgaattccacttctcatttgggtgat

SEQ ID NO: 6086 - DNA, 1563 bp, Glycine max
ctctttgacttctccttcatctctttcgctggacaaaacccctttcgccggaaaacccaccgcaacctttgtggttcgcaactccgtttccggcttcaccgtgctcctcttacacgcagtatatatatatgtatgtatatggggaaaactaggtggttgataatattggttacctgtttatgcctgctttccttttctgatggcagagaactcaaggttaggcataaaaagcaacattaccaatacaatcatacagttgctacaatattagtggaatatgcttctgcggtatacttgtcagatttaactgaactttttacttggacgtgctctaggtgtaatggcttgaccaagggatttgaaatgcttgaccaagggatttgaaatgatagagttagttgttgacgtcgagcattgcttacaggcatttgttggagtggctgatgatcctcgtgccattatcattgcattcagaggaacaaatgaacacagcttacagaattggattgaagatttatattggaagcagcatgatataaattatccaggcatggatgatgcaatggtacaccgtggtttttataccgcgtaccacaatacaacaatacgtcctgcaattttagatgctgttgaaagagcaaagaagttttatggagatattgaaattatagcaacagggcattcaatgggaggggcaatggcttcattttgtggacttgatttaacggtaaatcaaaatgaaaaaaatgttcaagttatgacatttggacaacctcgtgttggaaatgctgcttttgcatctctctataccaaactagttccaaataccatccgagtcacaaatgaccatgatattgtacctcatttgcctccatattattattatttaccgcagaagacataccaccacttcccaagagaggtttggctttataacatcggattaggtagtcttgtgtacaacgttgagaagatttgtgatgaatctggtgaggatccggattgcagcaggtcggtgactgggaatagcattgctgatcacttagtctattatggcgtagacatgggatcagatgagcctagttcatgcagaattgttatggattctcatgttcagaatactagcatcagagattcaagaggaaacttaatcttgtccagagatcctgcaacccccctcatcaaattgggtggagagggtgacaatcaggaaaatcccattaatgttgattgaattggcattagatatctcttgcatgatatgttccagaggtttgctgtggggcattatacttcagatttattttttcttcacggtccatacagctgaacaattttattgaattggctagggctggaaggagtttgtatagtctttgactcgtgtatatatgttcatccttgtatatataattaataattctatattttttactgcataagtaataattcttgatactttgtcaattgtataatttcactttcaaattctactgaattccactcctcatttgggtgataattctttttacccattgtcgtatccaaagtttaattttacgc

SEQ ID NO: 6087 - DNA, 1603 bp, Glycine max
tcgagtcagtacgtaggccccccccccaaaccccaagtcggagcaggagccattactctccgccaccgccatgacggttgcaagcgccgcctcttcacgcaccaagaggctcgtcaagctaacgctctcgctcctccgcctcggcttcaactcctccaaatgcaaaacggcagcgaagatggcggtggcgaggatcaagctgctgcggaacaagagagaggtggtcgtgaggcagatgcgacgcgacattgcccttcttctccagtctggtcaagacgccaccgctcgcatcagggttgaacatgtcatgagagagcaaaatgttttggctgcaaatgagttcattgaactcttctgtgaattagttgtggccaggctcccaatcatttcaaagcaaagggaatgtccagcagatttgaaagaaggaattgctagcttaatatttgcagcccctaggtgctctgaaataccagaacttgtggcacttaagaatatctttgacaagaaatatgggaaagattttgtatctgcagctgttgatctcagacctagctgcggtgtaaatcgccagttgattgaaaagctctcagtacgaacaccaccgggtgaagtaaaattgaaagtgttgaaggaaatagctaaggaacatcaaattgattgggatactacagaaagtgagacagaacttctcaagcctccagaagagctaatagtagggccacgtgcttttgtcagcgccagcagcctaccagtgaaacattcttcaaatgtgtcagtggaatcaaatcagccagctactagattatcaggtggtggaagaactgaggccgtgtattacgaggattccaagtctgctgctgaagcagcagctgaagcagctaagaaagcaattgctgctgctgaagttgctgcttatatggctatgaaggagtctattgaagctccacaaccatatgcttacaatgataagttgtataactcaggagtcaactctgggaccttccaatcaaacaatcctgcaaaatgtggcctgaacaagactccaaaatctacaactgaagagaaaatgtacaggtcacagagcgtaccaagatctgatcatctgaacagtgaggatacattgccggatcaatatggtggaaatgattataggaggcacagctaccatccaacttctgcgcattcagatattaagtttgatgaatcagattgtgatgaagaaattgaagcagaagaacctcctgtggttactatgccccctaatcggtttccaccaccagtaccttcatctatggttaaacaggatagccgcattcatgttcatcccaaattgccagattatgatgaacttgctgcccgctttgatgcactaaaattcaagaagtcacaatcctgaacccactttagcaaccaactgtttatgaatctatttaattaatttatacacaatacatataagaatggtatattttgttacatagagatactaagaacattggatgctatactttggtacgtacggttctgcctcagcatgttatattttttttctggaatagtattaactttcctcaaaaaaaaaaaagaaaaaaaaaaaaaaaaa

SEQ ID NO: 6088 - DNA, 1993 bp, Glycine max
  misc_feature (100)..(100): n is a, c, g, or t
aatgacacgtcaccgttgaaacttgaaaattggaaaggatagtactctaataagtaggggaagagaaaatagatctgaagcttcgtcgcgaaaaaaaacnaaacattttgattccattctatccataatcaatagcagcttttgttctcagttctcatggctttgagatctggttcatcttccttcacctacgatctgttcctcagcttcagaggctctgacacacgccagggtttcgccgccaatctctacaaagctcttgctaacaggggaatctacacttccatcgacgatgaggagcttcagagtggagaggagataacaccgacgcttctgaaagcaattgaagagtccaggatttccatggccgtgctctctgtaaactatgcttcttcctcgttttgtttggatgaacttgcaaccatctttgactgcgccgagaggaaagcactgttggttttttataaagtggaaccttctcacgtgcgacaccggaaagttagttatggagaagcgttggctaagaaggaagaaaggttcaagcataacatggacaagttgccaaaatggaagatgcctttttatcaagcagctaacttgtctggctatcatttcaaagatggatatgcacatgaatatgagttcattgggaggatggttgagcaggtctgctgcaagattaatcccacttgtttacatgttgcggattatttggttggactagagtcacaagtgtcaaaagtaatgaagcttttggacgttggatctgatgatggtgtccaccacatgacagggatccatggtatgggtggaatagggaaaacaacacttgctctgtctgtaatttaattgctaactgttttgatagttcatgttttcttcaaaatgtaagaaaaatcaaacaaacatgagctacaacatttccaaagcatccttctttcatatatacttggaaagaagaaaattaagttagcaagtgagcaacaaggagtttcaatgatacaacatagactccagcgaaagaaggttctcttgattctagatgatgttgacaagctcgagcaattacttccattggctttggaagtaataggttccaacttgtttggaaaaaatacaagaagaaccaaaatctgtcatcaaacaatataaacaaattcttactattcaaatcctagagatacttaaactaagctttgatgcattggaagaagaagagaagagtgcttttcttgacattgcttgttgcttcaaagaatatggacttatattgcttttcttgacattgcttgttgcttcaaaggatatgcattgatagtgctttgcttgacatttgtgcgttgataaatgttgaagatatacttggtgctcattatggtgacaacgtgaaatagtattgacatattggctgaaaaaatctctcataaaggttagagatggtagaggtacattgcacgactttaggacatggttacaaaaattgtcactcaagaatcaccaagagaaccagggaagctataattcaagttttggaagacaacaccttgaggaactagtgaaattgaaatcatatgtctagatttctccatatttgccaaagaaatagtataatggaatagaaaggccttcaagaagatgaaaaacctcaaaacacttattattagaaatggaaaattttccaaaggtcccaaataacttgagttggatggcttatccaagaagtttgtgaatctaacagttttgaattttggccggtgcgaatctttaattacacaaatacctgatgtgtctggtctcccaaatttggaggaacttttatttgaattttgtaagaatttaactacagttcacggttccattgattacttggacaaacttaaaatattgagtgcttttaataaatgtactgaacttggaagtttttcacccatcaagttgatctctcttgaaaaacttgaactttcatattgttctggtctcgagagttttccag

SEQ ID NO: 6089 - DNA, 1264 bp, Glycine max
tcggctgcagaagacgacagaaagggacacatttaaacactaatcataagcctctcaaccctatccttcttagttacatatttcaattttaaaattccaattacaatgattcttccaaacatcaaagttcgttttttcttactcttttgccttattgggatagtgtcagcacagttatcctctaccttttatggcaaaacgtgtcctaatgcactttcaaccattaaatcagaagtagtgtctgctgtgaacaacgagcgtcgtatgggagcctcgttgctccgtcttcatttccatgattgctttgttcaaggatgtgatgcatcagtactattggatgacacatcgagtttcaagggtgagaagacagcaggtcccaacgctggttcgattagaggttttaatgtaatagacaccataaagtctaaagtggagagcttatgccctggtgttgtttcttgtgctgatatccttgctgtagcagcaagagactcggttgtagctcttggtggacctacttggactgtgcaattgggtagaagagactcaaccactgcaagtttaagttctgctaactcagacttgcctgctcccacttcaagtttaagtgcccttatcagttctttctccaacaaaggtttttcatctaaagaactggttgctctttcaggatcgcacacaattgggcaagctcaatgttcaagtttcagaacaaggatttacaacgacaccaacatagattcctcttttgcaaaatcattgcaaggaaattgccctagcacaggtggtggcagcacattggcccctcttgacaccaccagcccaaacaccttcgacaatgcttacttcaagaacttgcagagcaaaaagggtctcttgcactcagatcaagagctcttcaacggaggatccacagactctcaagtaaattcctacagcagtaatcctgcaagtttcaaaactgactttgccaatgcaatgattaaaatggggaaccttagtccactcactgggtctagtggccaaattaggaccaattgtaggaagaccaactaagattttgggccttcttgtactaattaagtatgaaacaaagtcaaggttatgggataatttagatatatgttgtatgcgttgcagtttaggagcaaagtaaatgcttccttaattgtagtaataatataatataagaatatcaatgtcaaaatgtttggacttggttaaaataaaaaaaaaaaaaataaaaataaaaaaaaaaaaaaaa

SEQ ID NO: 6090 - DNA, 1125 bp, Glycine max
agagttgtgcgcagttgcgcatccaatcccttcactgttgttttcccccaattcccagtcccacatagcttagaacttacgatctacaattttacaaatacaaatacccttctccctcgctcaaaacacaaacaagctcgcttcttccttctctcatcaacaacatgcagatcttcgtcaagactttgaccggcaagaccatcaccctcgaggtcgagagcagcgacaccatcgacaacgtcaaggccaagatccaggacaaggaaggtatccctcctgaccagcagaggttgatttttgctggtaagcagctggaagatggtcgcactcttgctgattataacatacaaaaggaatcaacacttcacttggtcttgaggctaaggggaggtaccatgattaaagtgaagactttaactgggaaagaaattgaaattgacattgaaccaactgatacaatcgaccggatcaaggaacgtgtagaagaaaaagagggaattccacctgtgcagcagagactcatatatgccggtaagcagcttgctgatgacaaaacagctaaagagtacaacattgagggtggttctgtacttcacttggtgcttgcattgaggggtggtacttattagtgtagatgcatatcagaacccaaagacatgaaaggaagctctatacctgtcccgtctctgaagacatcattgttcttatgtgcttggttgtaattgaggctgctattggtggtcagtaactcagtatctttaagttgtatgctatttgaaacccgaagttggcctttataaagaatatctgaaaaccaatgatttaaaaccatagtttaggtacatattttgctttcttctgcttttcaagggagcaccaatgttaaccttcaaacgcttctgtcagtgtcagagaagtttatcttctgtagccttgtttgtgggtgtcttccgcttgaaaagagggaaatggaaggttgattgttcgtgttttaagccattttggaatggaatgttgtcaaaatgatggatcggattgaggtcatcggggcattgtagttgattttaaaatttttaatgtttggttttaggaggcttactttcgcaccttccttttctaatggac

SEQ ID NO: 6091 - DNA, 577 bp, Glycine max
ggcgagttacagctgcgagaagacgacagaagagggggagaaaaaggaattgttgaggcagcgattagtattggaaggaaaggtagagattttcagtttgatgctatgaaagactttgaaaattttatgtctctttgtagaggtggaaaaaaactgaaccatgcgtctacaattgcagggtcgccaaagcttggaacatatgagactgattttgggtggggaaagcccaagaagtgtgaaatacttcacatagaatattcaagaactatctccctttcggattctagggatgaagaaggtggagtggaagttgggctagcacttggaagggctcaaatgagcaaattttctgctatattggaagaatatctcagaaatattgctatatagtcgtgactaacattcccatcttcttaaaaataattataagatgctaataattgttgttgtaggtctctgcattttagtatttattttagtcttcatcgtttttataagttgtttgtgtcttgtattatttttgcattatcaattctggaagctataattcaatatttattccacgctcgtgcttgcc

SEQ ID NO: 6092 - DNA, 1363 bp, Glycine max
ggctcgagaatgtattggccacactacattatgtagataacattagatatcacatgatgaagcaaattaggaaactgcttagcggagatctcaggaccaaaaaatttactacgaaacggtcaaatgtagtgaaccctccaagaatcccatagcattcccaaaaaatcactgataaaatcgcaggcgaagcgtcacagtcactccctctcctcacacgaaaaaagtatccccccaacccaccccaccccacccccaaccctcaacttagggttcttctgttcttcttcttcttctcctttaaccaaacaacaagaaaaaaaaatcacattccccaaaacacccttctcgctccgcatggcgaaaacgaggccaggcagaaaggacgtggactcgtacaccataagaggaaccagcaagatcgtccgagctggagactgtgttctgatgcggccctcggacacgtcgaagccgccttacgtggcgcgcgtggagaagatcgagcaggacaacaggagcaacgtgaaggtgcgtgtgaggtggtactaccggccagaagagtcgattggtggtcggagacagttccacggggctaaggaactgttcctctccgaccactacgatgtgcaaagtgcacacaccattgagggcaagtgtgttgtgcactcttttaagaactacaccaagcttgagaatgtgggtgctgaggattactattgtagattcgagtacaaggccgccaccggggctttcacccctgaccgtgttgctgtgtattgcaaatgtgagatgccttataacccggatgatctcatggtacaatgtgaagggtgcaaggattggtaccatcctgcttgcatgggcatgactattgaagaagcaaagaaactagatcattttgtatgttctgaatgttcatctgatgatgatatgaagaaaccccaagctacattttctgcatcactgggagctgatggcaaggtggagccaaagcggcggaagagatgaccataatgcagtagtagtaaacatgtgaggtgtgtttggctctagctgaatttggctggctctatggtagcttttgtgtgttgtacagcttcttctagaggctataaacatttcatgtatttgactcaggttatgtatctatccgtgttagattttatcatgacattcatctgtttttcatttgtccatgatgagacctccgatccaagtgttaattcttgagatggcatcaaaccttaaaaactaagtacagagcaattgttagtttaaaatgttggttcctttttggtacatagcttttgatgtttggttaaagtaggtacgttatttaaacattcataaattaccagcagtgtaa

SEQ ID NO: 6093 - DNA, 1647 bp, Glycine max
tcagctacgtaggccccccccccggcaaatccagtaatttaccaatcgctactaattgactcgtgcggtgaaaagatcccatcagaatggatctggaaaaccactgaacaagaagaagagtcttcttcgtttaaccaccacatcggagaaacacaaacacacgcgcgcacacacacgtgcgtggtgcagactctccagtctcacacacatgtgtccgttgctgctgtaaccgtcgacgaagaagaagaagaaagaaataaaccgtttaaagtaaagcaaaattcgtaaaccaaacaaacccttatgcgtggtgactagtgagtgacgactcagatctgttgcggggttatcgaaattggttattggccgagggagatggaggggaactccggtggaggaggcggcggtggcggtggaaacgacgtggaattgctctgcaagacgctgcaggtggagcacaagctcttctacttcgatctgaaggagaatcctcgcggccgctaccttaagatttccgagaagacctccgccaccaggtccaccatcatcgtccccttctctggcatttcctggttcctcgatctcttcaattactacgtcaattccgacgaccaggacctcttcagcaaggaattgcagctcgacaccaaggttttctattttgacattggcgagaatcggaggggccgttttttgaaggtgtctgaagcttctgtcagcagaaaccgtagcactataattgttcctgctggaagctccagggatgaaggatgggcagcattcaggaacgttttggcagagatcaatgaagcctcaaggcttttcattctgcccaatcagcaaaattctgaatcctcagagcatcttgttggactttcggatgatgttggtgctggcttcatatctggtcatagtactcaacctgccacttcttctgagttgaatgtggacaggtctgttgatttgccgcctcaggatgaaattgggaacttgggggtctcaaaagtgatcagggctgatcagaaaagattcttctttgatcttgggagcaataataggggtcatttcttaagaatatctgaggttgcgggttctgatagatcctccattattcttcccctgtcagggctcaagcagtttcatgagattgttggtcactttgtcgaaatcacaaaggaccgaattgagggaatggcggttgctaatgttcgcacaattgatccccctcaaagatgaatgctaacttgggataagaatgggtgttgtcttcgagtctgatttgtgttattttattttattttccctcagcctcctttcttcttctcatattgttcttccattaatgcttttgaaataatgcaaactctggttggtcagcagaataatttgaattgcttggcaaggttaatatgaataggaataacggaagaaaaaaaggatcagagacttgtacttgtttggatagtttggcacccaagctacaatctgtaataatgtttgattgtttattttgcgttccttgcacagatttcgcatggatttaagttctcatgcctaccatatgttaggttggtgacttaactattttgtagggtttggtttccatctaacagcatgaactttgctttcatagtgaaaaaaaaaaaa

SEQ ID NO: 6094 - DNA, 2379 bp, Glycine max
gatagtcgcagcttctgagttctctcatttctcgtcttcactgagaaaaatccttctttgtgcatgctcctcgtttccatctaaaggggagagggggtgagtgagaaaaagtgagtgaggtttctagcttctactgttgagtaaacatgactatggaagagggcagggtagagaacgaggactacacacaagatggaactgtgaacattaaagggaaacctattcttagatccaaaagtggtggttggaaagcttgctcctttgttgttgtatatgaggtattcgaaagaatggcttattatgggatatcatcaaatttgattctgtatcttacaacaaagcttcaccaaggcacagtttcctctgcaaacaatgtcaccaattgggttggtaccatttggatgacacccatattaggcgcctacattgctgacgctttccttggccgctattggacttttgtcatagcctccaccgtttatctctcgggtatgtctctgcttacactggcagtgtcccttcctagcctgaagccacctcaatgctttgaaaaggatgtgacaaaatgtgccaaagcctccacactacagcttgcagtgttctatggtgcactctacactctagcagtgggaactggaggaaccaagcccaacatctccaccataggagctgatcaatttgatgattttcaccctaaagagaagttacacaagctatccttcttcaattggtggatgttcagcatcttctttgggacactctttgcaaacagtgttctagtttatatccaagataatgtggggtggactcttggctatgctcttccaactcttggccttttagtatcaatcatgatattcgtggcagggacacccttctataggcacaaagtgcctgcagggagtaccttcactagaatggctagggtcgttgtggctgcttggaggaaatcaaaagttcctgttcctagtgactctaaagaactatatgagcttgacaaggaagggtatgcaaagaaagggagctacagaattgaccacactccaacattaaagttccttgataaggcctgtgtgaaaacagattcaaacactagtccatggatgctgtgtactgttactcaagtaggagagacaaaacaaatgataaggatgattccaatcttggttgctacatttgtgcctagtacaatgatggctcagataaataccctttttgtgaagcaaggtactactcttgacagacacctcggaagcttcaaaattcccccagcaagtttggctgcatttgttactgtgtccttgcttgtttgcattgtgctctatgaccgtttctttgtgaagatcatgcaaaggtttaccaagaaccccagaggcattacccttcttcagaggatgggaattggccttgtaatccacacactgatcatgatcattgcatctgggactgaaagctatagactcaaggttgcaagagaacatggggtagttgaaagtggagggcaagtccctttgagcatattcattttgcttcctcagtttatactcatgggaactgctgatgcattcttagaggttgcaaaaattgagtttttctatgatcaatccccggaacacatgaagagcattggaacttcatattccacaactaccttaggccttggtaacttcatcagttcctttcttctctcaacagtgtcaaatatcaccaagaaaaatggtcacaaggggtggattttgaacaatctgaatgagtctcatcttgactactactatgcattttttgcaatattaaacttcctcaacctcatcttcttcgcgtatgttactaggtactatgtatatagggttgaagtttcagattccatagacaagcttgcaaaagaactgaaggaaaagaccgtgtccaacgttgtgaatccaaaagactagttgattggggtatctaaggggagaaagaggattaagaccgtgaaaagtttcaaaactactttatgtacaaatttggatggccaaagaactagatatgtgtgtgtctgtggggggtgtgtgcgtgttaactttggagtggttttggtcattggaagtcacttcagaagagaacctaatcaagttattatagttattgggggtcgttttagaagcatgtgatcatttttccttacctttgtaaccttcgagaaatgtcacttgcatcttgaaaaaaacacaagattggaaaaaggaatgtaatatgtttgaagtttttctttctagatcttaattttcgggccatttaagcttttctttagtcaagaaattgtaaaataaaggttgaagacaaaatctatcaggttagattttcattttcattcctccaataaaattgcttttttattat

SEQ ID NO: 6095 - DNA, 2401 bp, Glycine max
ttctacgcgtccgcttcagttctctcatttctcgtcttcactgagaaaaatccttcttcgtgcatgctcctcgtttctatctaaaggggcgaaagagtagattataagggggtaagtgagaaagagagtaaaaacaaaattaaaacatgactatggaagagggcagggtcgagaacgaggactacacacaagatggtactgtcaacattaaagggaaacctattcttagatccaaaagtggtggttggaaagcttgctcctttgttgttgtatatgaggtattcgaaagaatggcttattatgggatatcatcaaatttgatcctttatcttacaacaaagcttcaccaaggcacagtatcctctgcaaacaatgtcaccaattgggttggcaccatttggatgacacccatattaggcgcctacgttgctgacgctttccttggccgctattggacttttgtcatagcctccaccatttatctctcgggtatgtctctgcttacactggcagtgtcccttcctagcctgaagccacctgaatgctttgtaaaggatgtgacaaaatgtgccaaagccttcacactacagctagctgtgttctatggtgcactttacactctagcagtgggaactggaggaaccaagcccaacatctccaccataggagctgatcaatttgatgattttcaccctaaagagaagttacacaagctatccttcttcaattggtggatgttcagcatcttctttgggacactctttgcaaacagtgttctagtttatatccaagataatgtggggtggactcttggctatgctcttccaactcttggccttttagtatcaatcatgatattcgtggcagggacacccttctataggcacaaagtgcctgcagggagtaccttcactagaatggctagggtcgttgtggctgctttgaggaaatcaaaagttcctgttcctagtgactctaaagaactatatgagcttgacaaggaagagtatgcaaagaaagggagctacagaattgaccacactccaacattaaagtttcttgacaaggcatgtgtgaaaacagattcgaacactagtccatggacgctatgcactgttactcaagtagaggagaccaaacaaatgataagaatgattccgatcttggttgctacatttgtgcctagtacaatgatggctcagataaataccctttttgtgaagcaaggtactactcttgacagacacctcggaagcttcaaaattcccccagcaagtttggctgcatttgttactgtgtccttgcttgtttgcattgtgctctatgaccgtttctttgtgaagatcatgcaaaggtttaccaagaaccccagaggcattacccttcttcagaggatgggaattggccttgtaatccacacactgatcatgatcattgcatctgggactgaaagctatagactcaaggttgcaagagaacatggggtagttgaaagtggagggcaagtccctttgagcatattcattttgcttcctcagtttatactcatgggaactgctgatgcattcttagaggttgcaaaaattgagtttttctatgatcaatccccggaacacatgaagagcattggaacttcatattccacaactaccttaggccttggtaacttcatcagttcctttcttctctcaacagtgtcaaatgtcaccaagaaaaatggtcacaaggggtggattttgaacaacctcaatgagtctcatcttgactactactatgcatttttcgcaatactaaacttcctcaacctcatcttcttcgcgtatgttactaggttctatgtatatagagttgaagtttcagattccatagacaagcttgcaaaagaactgaaggaaaagactgtgtccaacgttgtgaatcccaaagactagttgattgggtatctaaggggacaaaactactttatgtacaaatttggatggccaaagaactagatatgtgtgtgtctgtggggtgtgtgcgtgttaactttggaatggttttgatcattggaagccacttcagaagagaacctaatcaagttatagttattggaggtcgttttagcatcatgtgatcattttccttatcctttgtaaccttcgggaaatgtcacttgcaccttgaaaaagcacgagattgaaaaaatgaatgtaatatgtttgaagtttttctttctagatcttttcttgccatttaagcttttctttactcaagaaattgtaaaataaagggtcgaagacaaaatctatcaggtgagattttcattttcattcctccaataaaattgcttttttattttaaaattataaaaaaaaaaaaaaaaaaaaaaaaaaaaaaaaaaaaaaaaaaaaaaaaaaaa

SEQ ID NO: 6096 - DNA, 2923 bp, Glycine max
tttagtcacagcacagtgtatatttcgcaactacaccatcgccatgcttacaccttgccttttttcgtttcactaataaataaataacactaatatattgatattaatacatcggagaccaaatcagaacaatcaaacagcctttttctgtgtctcttcaacgcaacaactagggattcgttcttcgccatctgcacagtattatgactgaaaacgcgtgttacgtgtgaagcattgtcaggaattatatggattccctcgcggcccgctcagggcgcaatggagcgaaagatcattgattttgaccaaggttgggactatatgcagaaggggattaccaagctgaagaaaattcttgaaggagcaccagaaactcctttcagttctgaggaatacatgatgctatacacaaccatatataatatgtgtactcagaagcctccgaatgacttttcacaacagctttatgacaagtacaaggatgctttcgatgaatacatcaaaatcaccgttttgccatctctaagagagaagcatgatgaattcatgctgagggagcttgtccaaagatggctaaatcataaagtcatggtccggtggctttcgcgcttcttccattatcttgatcgctacttcatttctcgacgctccctgcctggactcggtgcagttggcctcacttgcttccgtgaatcggtttatatggaggtacgagtcaatgctaggaaagctgtgattgcacttattgataaagaacgtgagggtgaacaaattgatagatcgttgttgaaaaatgttcttgatatatttgttgagattggtatgggtgaaatgggtcaatatgaacaggattttgaggtacatatgcttgaggatactgccgattattacaaaagtaaggctgcaaactggattgagattgactcctgcccagattatatgcttaaggctgaggattgcttgagaagggagagagatagagtgtctcattacttacactgtagcactgagcagaaattggtagagaaagtgcaactagagctgctggtgactcatgcaaatcaattactcgagaaagagaactctggctgtcatgccttacttagagatgataaggtggaagatctgtctaggatgtatagactttaccataaaatacctaaaggcttggatcctgttgccaatgtattcaagcagcatattacggttgagggtacatcattggttcaacaagctgaagaagctactagcaatcagactacaaatggttctggctttcaggaacaagcaagtccccacactgttttctgtttatcaattatataattgtaatgatagctggaaaattctgaaggctaatcatgtgacattgtaggtccttgtccgtaaatttttagagctccatgacaaatatatggtgtatgttaatgattgctttatgaatcatacactgttccacaaggcattaaaggaggcatttgagatattctgcaataaaactgttggtggtagttccagtgctgaacttttatctacattctgtgacaatatccttaagaaaggtggaagtgagaagctaagtgatgaagcaattgaagatacccttgagaaggtagtcaagttgcttgcatatatcagtgataaggatctctttgcagaattttacaggaagaagcttgcccgaagattactttttgacaggagtgccaatgatgaccatgaaaagtgtattttgacaaagttaaagcagcagtgtggtggccagttcacatcaaagatggaggggatggtggtagacttgacattggctagggataatcagctgaaatttgaggagtatcttcgtgataactcacatgtaaatcctggaattgacctgacagtaactgtgcttaccacaggattttggcctagttataagtcttttgatctcaaccttccttcagagatgatcagatgcttggaagtttttaagggcttctatgaaacgaggacaaaacacagaaaacttacttggatatactcactgggaacatgccacgtcactggcaagtttgatacaaaaaacattgaactaattgtgccaacctatccggctgctgccctactgctattcaacaatgctgataggttgagctattcagagattttgactcagctgaacttgggccatgaagatgttgttagattgctccattcactgtcatgtgcaaaatataagatacttatcaaggagccaaacaataaagttatatctcaaaatgacatctttgagttcaaccacaaatttacggataaaatgagaaggatcaagatacctctaccaccagctgatgaaagaaaaaaggtaattgaagatgttgacaaagatcggagatatgccattgatgcagcaattgtgcgcattatgaagagtaggaaaattttgggtcatcaacaactagttttggagtgtgttgagcagttgggccgcatgttcaagcctgatatcaaagcaatcaagaagaggatcgaagatctcatcactcgggactacctggaaagggacaaagataacccaaacaccttcaggtatctggcataaatggaagttactaatgtatagagtggccagtgttatggcctgcaaaaagcactggggtttgcctgaatttaattcttagggaagtacagttgaaaattcttaaggttacacaattctgtaaatgatcgtagccgattacttgattcagaagcaccaggagcgacttttttttgggcatacttgaatttttaagagctagtttataacaacatagcgaagcaagatatcgtactaaatacgttgcttttcttggttacttaaatgggaaggggaggtggcataatgaaagattgaaccttgatattataatccctaagtgttacaaattgaggcaagcta

SEQ ID NO: 6097 - DNA, 1332 bp, Glycine max
gttttaagagtaccatgcttcctttgcttcgaggcaatgagctggttatccagttttctaataggccccaccgccagcaacacaaaatctccgaagatctaattctggatgattatgcttctctgaatgtcaatgattctaaccaaaaattcatcactagtagcagcagccaaccaacaaagaaacttttctatggggcaaataaaaagaatcatgactcacacgaacataagaagaagatgattcataaggagattgagaggcaaaggagacaagaaatggctaccttctatgcctctcttagatcccttctccctcttgagttcatcaagggaaagcgttcaatatctgaccacatgaacgaggcagtgaattacataaagcacatgcagaaacatatcaaagagcttggtgccaagagagatgaactgaagaaactctccaatcattccaataatatggaaaataaccatgagggcttgcatacatcttgcaacttcactgtccacgagaaaaatggtattatgggaatagaaatcaccagtgtcttcagagaggaaaagcctaaaatttcaaagttactacagtttttgactgaagaaggacttgaagttgttagtttcttttcaacagaagtcaatggcagattgctccacagtgtgcagtgtgaggtgaaccattccaacagtgtagatccatctgagctgagaaagaaagtttccaaagcattttcaacctttagatgctctgattgattttgtcgttgaagctagctagcctcacaatctggctaataacaggaaatttacccatagcatgcattttaaacggagagctactctaactatggtactatagaaaaaatctaagagttttagtattgttatttttttggattaatagttgaatgagtttgagaagtgaaaaagagagagggagaaagagagattcattaaatggaagctcgtttaactattggtaaaaaaaatatcagtactaaaaccttaaatttctcaggctaccatagaatttctcttttagacttttctaacttgatagactttgtttggatgagtttgcttgcaaattttacattggcaactgtccccttttttctctttgatttggactctgctgctttctttgtgaagaatgagggaagaagacagtaaaatcgtacaactcaaaaatgaactctatcccaattccttttgtagcttttctgcaataaaatggattcagtttctgtcttttttttttttcctttcaaaatttacagatgtgcgttaattgtttacttgcaagttttagttaccttgtaattgaacgtag

SEQ ID NO: 6098 - DNA, 2867 bp, Glycine max
gttaatttgttagtctcggttagagagggttgagagacacaaagaagaatcatggaggtgaacaaccaaatcgtggagaggagcaagagggttaaagggagagtggttttgatgaagaagggtgtgttggacttccacgacatcaaagccaacgttctcgatcgagttcacgagttattaggcaagggtgtctctcttcagcttattagtgctactactcctgatccagcaaaggggttattgagagggaaggtggcaaacttggagaggtgggtttcgacgattacctctttgacatcaacaacagacacagagttctcagttacgtttgagtgggatgagagcatgggtgttcctggggcattcataatccgaaacaatcaccatagccagttctacctcaagacactgaccattgaagacattccagggcatgatggtcctgttaattttgtctgcaattcttgggtctaccctgctcatcgttacgcccatgatcgtgtcttcttcgccaacaaggcttatcttccatgtcatacacctgagccactgcgcaagttcagggaacaagaactaaaaactctctgcgggaaagggttcgggaagcttaatgagtgggacagagtctatgactatgcatactacaatgatttgggacttccagatgatggtcctgactatgcacgccctgttcttggaggatcacaatttccatatccacgtagaggaagaactagtcgtccacattgcaaaacagatcctaaaactgagtcaagattgcatcttctaaatctaaacgtttatgtgccgagggatgaacagtttggccatgtcaagttttcagattttctggcttactctctgaaatctgttgctcaggttttgcttccagagattaaatctttgtgtgacaaaactattaatgagtttgacacctttcaagatgtacttgatatttatgagggaagtattaagctgccaagtggacctttaacgagtaaactgagaaaacttgttccctatgagctattgagagaacttattaggaatgatggtgagagattcctcaaattcccagtgcctgatgtgatcaaagtgagtaagacagcatggaggacagatgaggaatttgcaagggaaatgcttgcaggggttaaccctgttattatccgccgtctccaagaatttcccccggccagcaaactagaccccagcgtatatggagaccaaactagctccatcagagcaacgcacatagaaaatagtttggatgggcttacaatagacgaggcaattcaaaatatgaggctatttatattagatcatcacgactcgttgatgccatacattagtcgaataaactctaccaacacaaaggacttatgcctctagaacgctcctggttctacaagatgacggtacactcaagccactggctatagagttaagcttaccccatccacaaggggaacaacatggagctgtgagcaaagttttcactccagcacaagaaggagtatcggcttcggtgtggcagctggctaaggcttatgcagccgtcaatgattcaggatatcatcaattggttagccactggttatacactcacgcagtaattgaaccgttcattatagccacaaacaggcagttgagtattcttcacccaatacacaagctcttgaagccacacttcagggacacaatgcatataaatgccttagcccggcacacgctcatcaatgctggaggggtactagagattacagttttccctggtaaattcgccttggaaatgtcgtccgttatatacaaaagcgggtcagcttccgggcggccccccccccccgatctgctaaagaggggaatggcagttcctgattcaagctgtcgtcatggactaaggcttgtgatagaggattatccatttgccgtggacgggatagaaatctgggatgcaatagaaacctgggtgactgaatattgtaacttctattacacatccaatgacatggttgaggatgacagtgaacttcagagttggtggaaagaagtacgaaacgagggtcacggtgacttaaaagacaggcattggtggccagaaatgaagaccaaagaggagctgattcaatcatgcaccattatcatatggcttgcttctgctttccatgcagctgtgaattttggacagtacccttttgctggatacctccctaaccgtccaacggtgagtcgtagattcatgccggagccaggtaccccagagtatgaggagcttaagtcagaccctgacttggcattccttaaaacaatcactgcacagttccaaactctccttggtgtgtcattgatagaagttctgtccaggcactcaactgaagaggtttaccttgggcaatgtgagaaccctgaatggactcttgatgctgagccattggcagcatttgagaggttcagacagaagctgttggagattgagaacaatatcatggaaaggaacaaggacaagagattcaaaaacagaaatgggccggtgaagatgccttacacacttctctatcccaacacctcagattattctagggagggtggactaactggcaagggaatccccaacagtatatccatctaatacaacactcctacctttctatcttcccattaaattctatttcaagcaatttgtgtgtcgtgattactagagtgtataatttataacattgtttgtcttcagattaccatgttgcctgcctctgctttaattggttcaagctcgttgtgtaactggttttgattgaaaaaccatatcatcttttgggagcatcataaacaattgaaattgcaagtgttttggttaagcttcacgcttc

SEQ ID NO: 6099 - DNA, 1386 bp, Glycine max
aattcggctcgaggtagctttttgatgagtacaagatagattaccggctccacggcggcggcccttgggcgcctccggggggaactgatgcttatgctcatgctaagaaggctggtcgatataagcagataaagcgtactgaaggggtttccagcactgatattgttggtcgcatgcttctctgtgtaagagaaaggtctattactgaaaaaaatcataatcattcttctttacaaagacaattcagcaatggccatagtccgaagtttgaagctggtgcatctgctgcaactgcaagtggaactcgtatatctcattttttgcctacatctcgtagaattgttcagttctcaagcggcggggggccagcacctgagtctcgcattgtatatatagatggtgcttttgatctctttcatgctggacatgttgagatcttgaggcttgctagggatcttggagattttcttcttgttggaatacacactgatcagacagtcagtgcaactagaggatcgcatcgtcctatcatgaatcttcatgaaagaagtctaagtgttttagcatgtcgctatgtggatgaggttataattggtgccccatgggagatttccaaagatatgctcactacatttaacatctcattagttgttcatggaaccattgcagaaagtaatgattttcagaaggaagaatgcaatccatatgctgttcctattagcatgggcatcttcaaagttttagaaagtcctttagatataactactactacaataattagaaggattgtttcaaatcatgaggcataccagaaccgaaataagaagaagggtgaaagtgagaaaagatactacgagggcaagagtcatgtgtctgaagaataattcatgtctgtcgtttggagcacagacataggaggataccaagctttttctcttttttgagaaatgagttttggttcaacttggtgcacaaagttggatattgtgttcagtgcgtctacaggttatgatttgtcaaacttattgaaccaacaacttacctacagttgatcacaagtatgaaagcgttccccaaataaattcgtgattaactaaattatctgttaaatgaggtatacttgaatagactcgcgaaccgaaatgttcaacttatgctaccagccgaacacaactcattttcttcattttttcttttcttttaaatgacctatactgtattattgctgtgtgagaagttgttgaagtattatgttgtctgattaagtattgatttttttgtttgataaactagtgaaaatatatccgttaaatgactattgaatagtttttaaatttgaatttctaaaagttactagcaatttccccgtgctatttatgattatcc

SEQ ID NO: 6100 - DNA, 1412 bp, Glycine max
ggctcgaggcgagaaacggtgtgtgggttcccggtaatccggaggcgacaaggcacggacatctaaataggggtatttccttcatttcactcctcaccccgcgcccccgcactttccatccaaccaacaatggcagatgtaaccacctacctccgccaccaccccgactccgaccccaaccccaaccccaatcccaaccccaaccccaaccccgacgacgaccaaaccctagttccctttccctattgggatttggacttcgatctcgaccccgaagtcccctcagacactctctccttcaccgaccgcgaaaatcaggtcaatttcatcatggatctctgccaccagagcgtggagcagtcgcaactcaccgatcctctctccaacgacgccggtttcggcgccatcgatggaatcgatttaggtttccccgccgctgacgacttcttcgtcggacagagattctccgtcggatccgacgaattcgcacactcacccacacacgctcgcggcgaacgacgacggcgtcctagggttctgcgcgcattccaacgaaaacgacgacgttgcaagcatccctctctgctgggacgcgcttcaattagaagaaaacaacaacaacaacaacacctacgaggatttcgagtgggaggaagtgatggacgagagagacgttatcagcatgctagatgacaccgtttccgtttccctcggaattgaagaggaaacagaagcagcagcagcagaagaagatgcagaatctgaagtcagcattttggagtggcaagttttattgaactccaccaatttggaaggaccgaattcggagccttatttcggagatagcgaggatttcgtttacaccgcggagtacgaaatgatgttcgggcaattcaacgacaatgcatttaatgggaaacctccggcctccgcctccatcgtgaggagtcttccgtcggtggttgtgaccgaagctgacgtggcaaacgacaacaacgtggtcgtcgtctgcgcggtttgtaaagatgagtttggtgttggggaaggggtgaaggtgttgccgtgttcgcatcgttaccatggggagtgcattgtgccgtggttggggataaggaacacttgtcccgtttgtcgctatgagttccccactgatgatgctgattatgagcggaggaaagcgcagagatctgtaatgtgatgatgatgatgatggggttattattagggtcagttttttgactttcagtaatagggtaatggatgaaaacttgaaaaagtatagattttttttttttgctgccgaagaaattgtgctttttaattttaaaaaaaaattgagtctagggaatgatgtttctctttgaattgtactttttgggatacatcacagaaatgaatcatttttccatcca

SEQ ID NO: 6101 - DNA, 1719 bp, Glycine max
aaagcagcaattatacattttggtaaaaagtggtataggcgcatctcattcatttggaggcacaccatgcagatcatcggaagttttcagaagctatggaatattgctggtgtacacttaaatcttgatatccccaaatggatgcatatccttcgtttggacaggcttaacaccaatgcagtgcaatggcttaacaagaaaggaaagttatttgaacccacatatctttatactatggaaaaggggtatttcttgttacctgaaagtgctaaatctcatcataatatacgtactgtgaatgttagcatatcagcttggcactcctgctttggaaacaggtggcagcaactactcataaacagatttgtcggatatgatacgattttaatcaatagtttattgagttctcctggtcaaggttatctttataactatcaaacaaaggaattctataaccttagttatgcacaagaagttccggaaggcccagctaggtttggagactatcttgtaacaaagtgtggcgtgcttatgatgtccttgtttgtattttttactaccacaatgtcagtatcatttacattaagagaaacacagactcgcatgctgaagttcacggtgcagcttcaacaccatgcacggcatcgccttccaacatttcagctgatctttgtacatgtgattgaatcactagtttttgttcctattatgattggcattctgttttttctctttgagttttatgatgatcagctacttgccttcatggtcttgattcttgtctggttgtgtgaactttttactctcatcagtgtccgaacaccaatatcaatgaagttctttcctcgcttctttttgctgtatttcctggtcttccacatatatttcttctcttatgcttacggtttttcgtatttggccctttctacaaccgcggcttttatgcaacaccttatcctgtacttttggaatcggtttgaggtaccggcactgcaaaggtacatgcaaaatcgacggtcacaacttcagcaacacccagacttccacattacctcttccaccattcttgcatcaacgttacacatcacaagattgaacacaagaaaccagggattaaataacgttgacttggctactggagcagggttgagacctggttttgatcaatcaatgccccaaaatggaccaggagttgccgatcctcaagatcggtcagaaaataatcgagacagggttgcgaaccctgcccagattcctgggcaagctgacattcaacaagcagaaaggggtccgaaccctggatccatgaattcattcagttctttgttattatggatcttaggaggtgcttcgtctgagggcctaaactcgtttttttcaatgttcagagacgtgagagagcaaggacaagtttttaatgaaacacctggggctggggctggggctggtgatgaaagccgtgagaatcaggataatattgacagatagcggtgaagaggtggagagcttgttaatataggaaggaacaacgtacgtatgtcatataggggactgctttctgctcggtccaaattaaaaaagctcaacaaaatgtttgtacaataatattctttatagcttttgctttataaatgctgaaaatttatgctagttctgtcctgaaagaaagttttaccgaatttattttatcttacaaaataaaattatattttttttaac

SEQ ID NO: 6102 - DNA, 744 bp, Glycine max
  misc_feature (718)..(719): n is a, c, g, or t
  misc_feature (734)..(735): n is a, c, g, or t
  misc_feature (739)..(742): n is a, c, g, or t
gcccattccaaacaaaaacctaagtcaacagtaaggttacttattcagtagttcttctctctcgaattttcactcactttctgtgcatcaatggcggcgataagtctccggaaggggaacacgcggcttccgccggaggtgaaccgcgtgctgtacgttcggaaccttcccttcaacatcaccagcgaggagatgtacgacatctttggcaaatacggcgccattcgccagatccgcatcggcaccaacaaggacactcgcggaaccgctttcgtcgtctacgaggacatctacgacgccaaaaccgccgtcgaccacctctccggcttcaacgtcgccaaccgctacctcatcgttctctattatcaacaagcgaagatgagcaagaagttcgatcagaagaagaaggaggacgagatcgcgcgcatgcaggagaagtacggcgtctccaccaaagataagtaaatgtaaaatacttcgttccttctcggaagtgcctagggttagggtttgggttttcgagactctgtttggtggttttattgtactgttattgttggagtaagtataagtgagtatgaattcatgtttacgatgttatttgtgagaatgaaatcaaatataaattcatcggaagtgccttgtggttgaaaaaaaaaatttttcgagaaactcgcctctgtatttactttggtttaattgtgttgccgttcgagtnnctattaatagtaaannggtnnnnca

SEQ ID NO: 6103 - DNA, 1620 bp, Glycine max
tcagctacgtaggccccccccccagtcttttcacctggcatcagcgaacatgaaatggctactcgtaatagacgaagctgagtagcgtagttaccagaagttacactgtgacagagtgacgaggagaagaaaggcaactacacacatacacacacctacttaattcgtttcagaggatagcgctcactatttcggaacttcagttgaatcattttcacgctcggaaccccaaaacaaagaaaagagagagactcctcattcaagataaatagatgaatttccgttgacaacgttgtgaagttatgaaaatgttgtttctccaaaccactgtcttacctagacccttctcacctttttgtgatgctagtttgcatccattgtcatcacttaacattcaaaatcctatgttggaatgtgctcacagcttttctcattattcccctgtatctagccaccgcattgtaaagtccatatcatgctctgtttctagtaagtctcattcaaaacccgatcctgaacctccggaacctgaagctagttcgaaccaaagagcaaggcctaaggcaagaagcagaagtggccaatctaaagatgtggtatccagcaatggtgataaaagttcagcagagacattccccactacaattcccaggaagccgaggcgtggtcgcagaagtgaagccgtggcagtggaagattttgtacgcggttcgctcgagcgcacgtttgctgcaattcgggaacaaaacaaggatgctttggagaatcatgagaacataatgaaggagagggatgatgacagttctaaatctgaaagtggtgataaggacgatgacaatgatgatgaagaggaagatggtggtgaaggcataagaaataagatggtgattgaggaagagagtaaaagctggcctttggatgcagatgttgggtgggggataagagcttccgagtattttgagcagcatccaatcaagaatgtggtgggagaagatgggtatgaaattgactgggaaggggagattgatgacaactgggtgcaagagatcaactgtttggagtgggagagttttgctttccatcccagccctttaattgtccttgtctttgaacgctataacagggcatctgataactggaaaattttgaaagagctagagaaagcaataaaggtatattggagagctaaagatcggttgcctccccgggcggttaagatagatatcaatatcgagagagatttggcttatgccctgaaagttagagaatgtcctcaaattttatttttaaggggtcacagggtcgtgtacagggagaaagaactccgaactgcggatgagctggttcagatgattgcatttttctattacaatgcaaagaagcctgcgtggatagatgataaggccttgtatactcgttattaatcttcaagaatgtcatatagcccttgacaacctgaagattgcgtgtctttgtaatgaaacaaacaaaattggcagcaattgttttatgtataaaaatataaagtactgtataaaagttaaaacaatcgggcactaccaaatttagaaatcttaagtgaaacagtgagcatacatattcaaaaaaaaaaaaaaaaaa

SEQ ID NO: 6104 - DNA, 990 bp, Glycine max
tcagctacgtgggccccccccccccgacgttgtgaaaataaaaaattgttcttgtttgtccatttagccatgaagaagttgtctttctccatccccaccgcaaaaccccaatcggtggacacttccaccacccgaaaggacgacgacagcgacggaaccaaacagtacatcaccgaattcgacccttccaaacccgcaaaccccaaaatcacaatccccccaatccaaaaccagtggaacccccaacaagacaacgaacacagcaccacgcggtggcgccgcactccggaggagaccgagctgctgcgtaagctgaaactggaggaagatctgcagaggttgccggaggaccaggggttggaggagttcaaggatgtccccgtcgaggttttcggcgaggcgttgctcgctgggtatggctggacggaagggatggggattgggaagaaggccaaagaggacgtgaaggtggtacaggtcaaggggagaacctcaagggaaggattagggttcgttgccaatgcttctggcaacaatttgaatcactgcgaccatcatttatgtaatttgcagttctagtattcacaccttagtggtgggttctctagtaatagagatatgccgtacagaatcaagggtctattggttacaatagtattattctctctttctctaatcatagctctccaagttctcttttctttgggtcaatccctatggaagcttgattcctaagatctagtacgttgaatccatgctctgattctgtttcttttaatttaatatttgttgtttccaaatgctgtctccatcggcattatgaattggtgattctatgttgatgttgtggggtgtgtggttcgtattgtttacagaaggctgtgcgttgccagtagtgtatgaggatcgttattgttatggtggcaatgtgttatacatgtctttggcatgcagtccgtaaataatgtgttgggttgtgatgataaaaaa

SEQ ID NO: 6105 - DNA, 1454 bp, Glycine max
cccacgcgtccgtacggctgcgagaagacgacagaagagggccagagtggcattttgtgttttgtcactttttctgtgtcttcttttcttttctattctcttttgtgtgggtagtgattttcagtttcaatcttggaaagccaacctttgcaattttcaacccgaaatcgtcgatttcttctaaaatatatactgtgcattggtctccttttcgaattgtggttgagggattaaagtaccgttattggtagagatggcttgtagggggtgctgggagtgccttttgaagctgtttaacttcatactgaccctcactggtctggccattgtgggctacggaatctatctttttgttgaattctctaaagcttcggatgatgacaacacgcctgcaatttctcccgtcagtgatgattctgctctgattcaacttggccggcctgtgcttatggccgtgtctctatccaacgacttttttgataacttgccccgtgcctggtttatttacttatttattggtattggagtggttctctttcttatttcttgttttggttgtattggagctgcaacacgaaatggatgctgcctgagctgttattcaattttggtggcattattgatcttggtagagctgggatgtgcagcctttatattctttgacaaaaactggaaagaagaaattccaacagacaaaactggagattttgatgcgatatatggatttctgattgagaattggaatatcgtgaaatgggttgctcttggaattgttatctttgaggcccttcttttcctgttagcccttattgttagggctgcaaataggccagcagattatgatagcgatgaggagttcattaatccaaggcagcaagtacgacagccattgctcaacagaccagcagcaagcccagcaacagggttaccggttgctggaacaatggaccagcgtccaagcagaaatgatgcatggagcacacggatgagggagaagtatgggcttgatacttcggaatttacttacaacccatctgagtcgaacaggttccagcaagtaaactcgcagccaactgaagaaaagagccgctgcactataatgtgatatattttgcagagtttgtgtacacaattcttgctgtactgcatcactccatggcatggcaacatcttcatgatagtgtgtaatattgtgctgagacgtcaaaaatttactctggtgttgcttatgttcatagttaggggaagtgagtagtgaagtcgttagatgccccattttatcgctttgaagccaatgtcttctttctcccatgtttttaagtgaccatcactcggtagttgggaaaactatgatttagtccttaaaagttctgattgacattaatttgatttacattactattaccatcaatttaattttctaaaaaaagttgactttaaaaaaaaaaaaaaaa

SEQ ID NO: 6106 - DNA, 1776 bp, Glycine max
ggctcgagggttttttttgttgttgtgtaatgatactcattgtcaccaccaacacgctttcactttactgaacaacgacttcatcttcactcttccttcaaatttccaacaagaaagtttgttcaactgtcccattattggcgttagctatgctacccactggagcaaaagagacccaattacgtgagagcaacagtcagaaggtccatcctcaaccaatagaagaggccatgaatcagaatccagaagcaatggaaaccctaatatctaaagtttttatgaatatctcttccttgaagtcagcttatattgagcttcaagctgctcatactccctacgaccctgataaaattcacactgctgataaacttgttattagtgagctgaaaaatctgtctgaactcaagcatttctacagggagaacaacccaaaaccagtgtgtgtttctccccaagactcacgtttagctgcagaaattcaagaacaacagagccttctgaaaacttatgaggtcatggtgaagaagttccaatctgaaatccagaataaagattcagagatccatcaattacagcagcagattgaggaggctagccagaagcgagcaaaactagagaaaaatctgaagcttagaggtttgtcaaccaaagaatcggaagatgaaaatggctttttccctgttgatctaactccagatctcttcacctctgctgtggaagtggctgcaaaagccattcatgatttttctaaacctttgatcaacatgatgaaagcagctgggtgggaccttgatgctgctgccaactcaatcgaacctgatgttgtttacgcaaagagagctcataagaaatatgcatttgagtcttacatatgccaaagaatgttcagtggctttgagcaggaaaacttctctgtcaaattagacaatactactgcaactaaagagagcttcttccaccagtttctcgctttaagagagatggatcccttggatatgctggggcaaaatccagattccatttttgggaaattttgcaggagcaaatacctggtggtagttcatcccaagatggaggcatcgttctttggaaatttagatcagcgaaattatgtgatgggtggagggcatccaaggactcctttttaccaggcttttcttaaactgaccaagtcaatttggcttttacacaggttggcttattcttttgagccgaatgttaaggtatttcaggttaaaggagggagtgagttctctgatgtttatatggaaagtgtggtcaagaatctgataatggatgacaatgatgaaaaacccaaaattggtttgatggttatgcctggattttggattgggggaagtttgattcagagtaaagtctatctctctggtatgaaggcggctgaatgattcctgaacacagtcaagactttcagaaaatgcatagttgattgtatgtggtttgtttgaattgtcgtttctttatcttgtaagaaaatgctgttgtctgtaatttttaatatcctttttagtggttgtaagagtaaatgagccctttatcctttgtttaaaaaaaaaaaaaaaagaaaaaaaaaaaaaaaaactgcacttgaattctagtgtttgtgggagaggggaataggaaggtatataacaaatgttccttaatttaggagtttcaatgctttggggagaagcaatgttctggtgtatgagttttccacagttgagggcactaaactaatcaacaagtgatgcattttcacttaaaagtatt

SEQ ID NO: 6107 - DNA, 1797 bp, Glycine max
aatttcctcattgtcaccaccaacacgctttcactttcctgagcagccaccccctcttcactcttccttcatttttccaacaacaagggttcaagggtattatgcttgctggattcattctcttgctgaaatgcagtctttctagaaagtttgttcaactgtcccattattggcgttagctatgctacccactggagcaaaagagacccaattacgtgagagcaacagtcagaaggtccatcctcaaccaatagaagaggccatgaatcagaatccagaagcaatggaaaccctaatatctaaagtttttatgaatatctcttccttgaagtcagcttatattgagcttcaagctgctcatactccctacgaccctgataaaattcacactgctgataaacttgttattagtgagctgaaaaatctgtctgaactcaagcatttctacagggagaacaacccaaaaccagtgtgtgtttctccccaagactcacgtttagctgcagaaattcaagaacaacagagccttctgaaaacttatgaggtcatggtgaagaagttccaatctgaaatccagaataaagattcagagatccatcaattacagcagcagattgaggaggctagccagaagcgagcaaaactagagaaaaatctgaagcttagaggtttgtcaaccaaagaatcggaagatgaaaatggctttttccctgttgatctaactccagatctcttcacctctgctgtggaagtggctgcaaaagccattcatgatttttctaaacctttgatcaacatgatgaaagcagctgggtgggaccttgatgctgctgccaactcaatcgaacctgatgttgtttacgcaaagagagctcataagaaatatgcatttgagtcttacatatgccaaagaatggtcagtggctttgagcaggaaaacttctctgtcaaattagacaatactactgcaactaaagagagcttcttccaccagtttctcgctttaagagagatggatcccttggatatgctggggcaaaatccagattccatttttgggaaattttgcaggagcaaatacctggtggtagttcatcccaagatggaggcatcgttctttggaaatttagatcagcgaaattatgtgatgggtggagggcatccaaggactcctttttaccaggcttttcttaaactgaccaagtcaatttggcttttacacaggttggcttattctttcgagccgaatgtcaaggtatttcaggttaaaggagggagtgagttctctgatgtttatatggaaagtgtggtcaagaatttgataatggatgacaatgatgaaaaacctaaagttggtttgatggttatgcctggattttggattgggggaagtgtgattcagagtaaagtctatctctctggtatgaaggtggctgaatgattcctgaacacactcaagacttcagaaaatgcatagttgattgtatgtggtttgtttgaattgttgtttctttatcttgtaagataatgctgttgtctgtaatttttaatatcctttttagtggttgtaagagtaaatgagccctttaagcttgtttacattcaaggcccctcttgtattgtgaaaatatcctgcacttgaattctagtgtttgtgggagaggggaataggaaggtatataacaaatgttccttaatttaggagtttcaatgctttggggagaagcaatgttctggtgtatgagttttccacagttgagggcactaaactaatcaacaagtgatgcattttccctt

SEQ ID NO: 6108 - DNA, 1672 bp, Glycine max
tcagtcagctcgtagtttttctgttgttgtgtaatgatactcattgtcaccaccaacacgctttcactttactgaacaacgacttcatcttcactcttccttcaaatttccaacaagggttcaagggtattatgcttgctggattcattctcttgctgaaatgcagtctttctagaaagtttgttcaactgtccctttattggcgttagctatgctacctactggagcaaaagagacccaattacgtgagaacaacagccagaaggtccatcctcaaccaatggaagaggccatgaatcagaatccagaagcaatggaaaccctaatatctaaagtttttacaaatatctcttccttgaagtcagcttatatccagcttcaagctgctcatactccctacgaccctgataaaatccacactgctgataaacttgttattagtgagctgaaaaatctgtctgaactcaagcatttctacagggagaacaacccaaaaccagtgtgtgtttctccccaagactcacgtttagctgcagaaattcaagaacaacagagccttcttaaaacgtatgaggtcatggtgcagaccctccaatctgaaatccagaataaagattcagagatccatcaattgcagcagcagatcgaagaggctagacagaagcgagcaaaactagagaaaaatctgaagcttagaggtttgtcaaccaaagaatcggaagatgaaattggctttttccctgtcgatctaactccagatctcttcacctctgccgtggaagcagctgcaaaagccattcatgatttttctaaacctttgatcaacatgatgaaagcagctgggtgggaccttgatgctgctgccaactcaatcgaacctgatgttgtttatgcaaagagagctcataagaaatatgcatttgagtcttacatatgccaaagaatgttcagtggctttgagcaggaaaacttctctgtcaaatcagacaatattactgtaactaaagagagcttctttcaccagtttctcgcattaagagagatggatcccttggacatgctggggcaaaatccagattccatttttgggaaattttgcaggagcaaatacttggtggtagttcatccaaagatggaggcatcattcttcggaaatttagaccagcgaaattatgtgatgggtggagggcatccaaggacccctttttaccaggcttttcttaaactgaccaagtcaatttggcttttacacaggttggcttattctttcgagccaaatgtcaaggtatttcaggttaaaggagggagtgagttctctgatgtttatatggaaagtgtggtcaagaatttgataatggatgacaatgatgaaaaacctaaagttggtttgatggttatgcctggattttggattgggggaagtgtgattcagagtaaagtctatctctctggtatgaaggtggctgaatgattcctgaacacactcaagacttcagaaaatgcatagttgattgtatgtggtttgtttgaattggtgtttctttatcttgtaagataatgctgttggctggaatttttgatatcctttttagtggttggaagagtaaaaaagccctttaagcttgttacatttcaggcccctcttgttttggggaaatatcctacacttgaa

SEQ ID NO: 6109 - DNA, 773 bp, Glycine max
ttttttttttttttttatatatcagaagtcattttttatttcagagaaaatccatgaaatttgattggtacaattgtttggtgtaggtttctaattgtttgcactgtttacaggtacgctattgttggtgtcaattcgacaaagttactattgaacaagctggcaaaattttcaattgtcaattatcaaacatcagttcagtatttgtattcgccaaggtaggattttgggtagtagctgccgtagtagcggtagaaaggattgtatcccaaaccgtatccgtatgggccgtaggatccgtattcgtagttcttgattccgtagtatgggaagttgtggagtccgtattcaccgtagaatggtttgtagccgtagcttccttgtgggtattcatatccgtatccaatgcggttctggccgtatccgtaacgggcgaaaccagtctggcggccgtagtatggtgtggaccagtgggagtagtatcctgggtaaccgtagtattgtccctggtactgtgggtatccgtaaccttgtttgtggaagtattcaccgaatgggtatcccttgccctgggtgtattccttgccgtagaattccttctggtatgggaggttgtggcccaatttgccttcgtactcgaaccgatgtcgtgtttgtacgggtatgcagctgctaccgagaagagagccaaaaagaccagagcgatcattttgagtgcttttggttttcgattaggatgttctaggtaagaaagttggaactggaggggtgaa

SEQ ID NO: 6110 - DNA, 1193 bp, Glycine max
  misc_feature (16)..(17): n is a, c, g, or t
  misc_feature (1163)..(1163): n is a, c, g, or t
atccattgcattcagnntgcaacttggaaggcgtcgtcggcctttcgttttttccccactgcgaagggatgctcaaagcgataattggtaccccaggttttccagtcaggacgtgtaaaacgacgccagggagcgcggtatcgatccttatagggcgaatgggtccgggccccccttgaggtcgacgtatcgatattttttttttttttttcttttttttttttttttttttttgagaactaaaaacataattagtcatcattaatttgaacttgtttggaacacattagtttgtatttttttataatatctcaatacactaccattaatttgcatttttataattatattgtggagagaatgatggagaaatgaagcattcattgatttcttatgttgagataggacatgtcattccatgaccaaacacttgatcttcttatgttggggcatgtggaacttgggttctctaggtatagtgggatgcttcattgacctccttgggacaaatggtctgtcaaaataaggcattggttgagcttttggaatgagttccttcctcaacctcctgatttcttcttcttcttctaacttttgttgtctttccttttccaacttgagttgttctatgaagttcattttttctgccacctgttggtcaaattcagcacgatcaattgcccgaatatcactatgaagctttaggtcaataggccttgtgctttctttaactgtaggttttaacaagcactcaggttcatctgttgtccatggaagcccctgagcaattggtatcctcatcttctcttcttcagtcatcatctcttgtactttcttcacaaattcttcctctttcaactttcccctttgctctgttcttaacttaaatggtttttgcctagtgacttttagcttctccttctgcttccacctcctccctccaaaagtcccagatgactccgagctatttctcctgctccttctacccccagaagtcctactagatacacttgcacggttacaatcccaagatgaagaaactgaaatcccttgaccaataccaagggttcttggatgtcaaaaccaaatcagaagtacaccaaaatggagaaggacccgaaacagaagcatcatcagtatgttaaacgcaataaagtcttaanctgaacaaaatgtggaaaactagacaataa

SEQ ID NO: 6111 - DNA, 1619 bp, Glycine max
ggtttcagtgaacatgttcgtcaatcagccctgaagattgttgaagttgtgctgcgccaaggtcttgttcatccaatcacctgtgttccataccttatagcccttgaaacggatcctttggcggctacgtcggcccccccccctcatcttctgatgaatatgaatgaaaagtaccctgcattttttgaaagccgcttgggtgatggacttcaaatgtcatttatgtttatgcaatctatttgtggcagttctgaaaatgttgatcataagattcaatctaagacctctacttctggaaaagggaagcccgaggctggctcccttgctcaagctaaacttggggtttctcgaatttacaagctcatccgagggaaccgggtgtcaaggaacaaatttttgtcctcgatcgtgcggaaatttgataatccaagatggaataaattactaatagctttcttaatatactgcacggaagtcctagcattgctgccattcatttcacctgacgagcccctttatttaatctatgctatcaatcgagtagttcaagtaagggctggaccactagaagcgaactttaaagcctggacttcaagcatttcacgtcattgcacacctcatgggaatggaatgtatcaacaggggaccgatgagcctactgttgcaagccaagtaatgccattggatttgaatggaacatttcagcaaaatgtagatcttcagccaaatatgaatgacatgagaaccctggatttaaatggatcaaatcatcaactgacagattatcctttatcgtataatggtagctcagaagcaaatctgcattctgtgggttacacagatcctttttccttcgcaaaagatgatctggagaaagttcaggccgactgtttatcagcaattgcattgcagcttcttttgaagctaaagagacacctaaaaatcatgtatagtcttgatgatgcccgttgtcaggcttattctcctaccgaacaaccgaaacctggagaggttatctccagacagaatattgcttttaatattggtgattcacagttcagtttgcctacaagtccgcaagaattgatacaaagatatcaggaatttaaacatgccttgagggaagacactgtggactattcacattacactgcaaatataaaacgaaagcgacctacaactacgccaagaagagttcaagttcggaaacctgtatacgtggcaggtgggtacgacaacggggatgatgatgaggattatactggcggaagtgcgacacgcaagataagttttagtggccgcaggagtagccttaagaactcaaggcaatatggattgatgtaaagtacatgatagataggctaacttgtacattaaataggaaggaaaagaaaaaaaatacagaataggatgagaaccaactgaataggggtaaaggaaacaggatgtagggaagcatgggcctggatggaatactccttgccttcttagatgactatgatttttgtctgtttccttctgtaatttgcattataatatagtggctgcattcttttgttgatgacccaaaaacatcaaaaccctacaaaaacaaaaattggaataccaaaaaaaaaaaa

SEQ ID NO: 6112 - DNA, 1199 bp, Glycine max
aacactcatagtttgctttgaccatggccttaaattctccaaactccagcaactttagcactgccctctctcttgggttggcttccaacaccaacgaagccttaacggtgaaaggaatgggccaactagggttgaaccaaaggatcactaaggtgagaaaatcctcattgaccgcaaaagaaagatcgtgtctggttcatggtggcagtgaaaacaacactgagagtatcataagagcaagtcagattgtaagagcccaactggtgcatgcagtatcatcaacaccatccccagtttccagtaataatgttgtggttgttgttgcggacaaaaagaaagccatcgagattctgcaggccaaacttctctgcgcctcagcatttgctcctaaaactagtcccacatcgctcaggccaattagccttagccaccgtttaactccaacgcccccactcaaaacgcgtcgtggttttcttaatgacgatgattttgcttattctctttgtccctctccgctgtctgtttgttttccccatgaaaccagtaccttgcagaatcatgttcgtggcggcgacaccaagtacgatggtcggatgcatagctatccgtacaagaaaaatgggccctacacgtgtcccaagtgcgggcacgtgtttgagacgtcgcagcggtttgcggcgcacgtgagttcgagtcactacaagtacgagaccaagagtgagagaaagaagagactcatggccaaaatccgaaagagaaatctccgtatagaatgggtaagtggtggactcactgttgttcctgacgatgctcctcctactagtgcttttgcttattcggcacgaaacaacaacaacgttgctcctccacctcctgttagggtggtgaaggttgaaggtcagagtggtatggagcttcagcttgctcctcctcctggatgggaaaaattaactgctggaggtggagctgttaaaatcaaattggagcctgtagctagctagggtcttaatctcttatcaagggtccagtagttttagtactctgtttaattgttattcatagggtcagattcaatcttcaattgtgtttatggaccacttatacggtctatagtgcttaattaattgggtcttgtcttcattgttcgccttctctcgttgaataaatactggattttatcttcaaaaaaaaaaaaaaaa

SEQ ID NO: 6113 - DNA, 1525 bp, Glycine max
gaagatatcaagatgttagtgaaaaagaggtgggatatatatgaggatgagacttatcacaacaacaaaccaacaaagatcttccttacaaaagtttgttttcaaagtgtgttttgtttcccaaatcctactcttgtgaccacaacccttcctcctctttcttttgaaacctctttttttctattccccaaccaaacaagcaaacgctactcactcatcatcactgagatcatggctcctaatatcaccactgtcaaaaccaccatcaccgacgctcaagccaaggtcgccaccgatcatggtcgtgcctacgtcaccttcctcgccggaaacggtgactatgtgaaaggtgtcgttggcttggcaaaaggtctgagaaaagtgaagagcatgtaccctctggtggttgcagtgctacccgatgttccccaagatcaccgcaacattctcacctcccaaggttgcattgttagagagattgagcccgtgtaccccccagagaatcaaacccagtttgccatggcatattacgtcatcaactattccaagctacgtatttgggagtttgtggagtacagcaagatgatatacctagacggtgatatccaagtttttgacaacattgaccacttgtttgacttgcctgataactacttctatgcggtgatggactgtttctgtgagccaacttggggccacactaaacaatatcagatcggttactgccagcagtgcccccataaggttcagtggcccactcactttgggcccaaacctcctctctatttcaatgctggcatgtttgtgtatgagcccaatttggctacttaccgtgacctccttcaaactgtccaagtcactaagcccacttcctttgctgaacaggattttttgaacatgtacttcaaggacaaatataggccaattcctaatgtctataatcttgtgttggccatgctgtggcgtcaccctgagaacgttgagcttgaaaaagttaaagtggttcactactgtgctgctgggtctaagccttggaggtacactgggaaggaggagaatatggagagagaagatatcaagatgttggtgaaaaagtggtgggatatatatgaggatgagactttggactacaacaatccactcaatgtggataagttcactgcggcacttatggaggttggtgaagtcaagttcgtccgtgccccatctgctgcttaagagtgtctttggaaatcaagtgtgatccaagtacatgtacaaagtcatacatcattacattaacttttatgtatttctaaaagtcatacatcattacattaagttttatgtatttctaaagtcttaagacttaagaggaccttttttatgtgtcccgcttttctttttttctttttccaattctgtcattgtaaagcagtgaataccgtatccttaattttataaatggatatgaattttattttgcaaaaaaaaaaaaaaaaaaaaaaaataatactgaaaaagagaaatttggtggactcagaga

SEQ ID NO: 6114 - DNA, 2563 bp, Glycine max
ccacgcgtccgcggacgcgtggggtccaaagcactttttattttcttctctctgcgatggccgtggatttctccaaagcggtcgacgacgggctgaagctctccaagcgcatatacttcgtgaaggacagggcggtgtccccgcccaagcctccgccgccgatggcgcgctgggccaccgcgttcctcccctcggcgccgatggtctacgcggtgatctccgatccagggatcgtggacaaccccgacatctcgagctaccaaccgcacgtgtacggaaggtgtgatcctccagcgctgattccgcttcagatgaacgcgattgagatggaagctgattgttaccacgaaaccgctttcgtcacagtctccggcacttggagactccactgcgtcatgggaagccgctcctgcgattgccgcatcgctgttcccgtgagccaccagggttcaattctaggtgttgaggtcagcgtttctagaaaatcatattctactcaactggttgtcatgggagatgagaatgggaaccaaaattccgcgccacctcaaaacggagggtttctcatcccgaatatatttactttaacaataccgcaggttgatggaggttccaatttgtcaattaaagttcggtggtctcagaaaatagtgtactccaaaggccagttctctttgaatgtgccgtttacctttccagattttgttaaccctgcggggaagagaatatctaaaagagaaaagatacaaattaatgtggatgctgttactggagttgagcttctgtgcaagacaataagccacccactgaaggaagtgaggcgtcatgctgggagtatgggcttcttatatgattccgatgttctctcatggtctaaagtcgattttagcttttcatatgctgtttcttcaagtcatataaatggtggcgttcttttggaatctgcatctgtgcaagattttgatgaaagagagatgttctacatgtatctttctcctggagatattcagagtcacaaggtattcaaaaaggacatcatattcattattgacatcagtggtagtatgcggggaaagctaattgaagacacaaagaatgcactattgactgctctctctaagcttaatcacgatgattcatttaatattttagcctttaatggagagacttatctattttccaaagcgatggatttggcttccggggatgctgttgaaagggccactgagtggattaacacgaactttgttgctgggggtggtacaaatatttctcatccgttaaacacggcaatagagatgctatccaatattcagtgtcccgcgcctccggttttcctagttacagatggaactgttgaagatgaaagacaattctgcgctatggtaaagaatcgtatgatcaatggagagtcaatatgccctcgaatttacacttttggcattggttcgttctgcaatcattatttcttgcgaatgctcgcaatgattggtaggggccaatatgatgctgcgttggatgtagatttgattgaacctcgaatgctgacattgtttgacaaagcttcatctctcattcttgcaaatatcaaaatggacacattggatgatcttgatgaccttgaggtataccctcctcatattcccgatctttcatcagagggtccattgattttatctggaagatacaggggaaattttcccaaaactcttaaagtcaaaggtatcttggctgatttcagtaattttgtagtagatatgaagatacaaaatgctaaggacattcctgtgcaaaagatttctgcaagagatcaaatagagcatcttactgctcaagcatggctcatggaaaataaacaactagaacaaaaggttgcaaaactgagcctgcagactggctttacgtctgagtatacacgaatgatgatacatgagactgatcatctaaagaaagtcaaggaatcatctggaccgaaagaagcgtcaaaaaagagcaatcctctattcgaggcacccgtccaaggccagagaatgattttactaccacatttaggtatcggcttcggcaacttaactgcaactgctgaaaatactcctccaggatttgaatcgaaattgcctgaagtgcccgaaatcttcaaggcagccacaaattgttttgaaaccttgtgcagttactgctgttgcatgtgctgcatccagtgctgtacccggataaacagccaatgtgcaaccgcattggcacaactctgcattggtctaggatgcttcggctgcatctcatgttgttcagatatatgctgttctggaaacgaaggctgaaatatcaattttgttgtatgattgttgtattttactgcatatagaaatcactgcatgtagtgttgtcattttggaaatgtatattgtgtttaatggggtgatttccttagttatattgtatagttttttttttttttttattctgatgatagtcgtgcaagtttaaactcgcaatagataaattataccattgtattaacaaagaagaaagtgacctatccaaaaaccaagttttatctgcc

SEQ ID NO: 6115 - DNA, 2238 bp, Glycine max
  misc_feature (2191)..(2191): n is a, c, g, or t
  misc_feature (2222)..(2222): n is a, c, g, or t
  misc_feature (2229)..(2229): n is a, c, g, or t
tacggctgtgcctcgatcgctcagtgacgtggctggacagcatggaccaagtctccgtagtacaaaacctatgcgggacacggtcgcagcatggctgcaactgctagggacaggataggagggagcgatctacggtccaacatgtatatgcgagtaaacgctccctatcctcgcgcggagtatgtgggtacgttcattcgtcttaatatacggagacgagtgccagagcgggtgcacgattaacaatatgggagaaaagacgggcgcatggagagacccgactaaacctgtatcacatgtgagatggtagtaccttgccttctatataggacgccgcgcccgagggcttttacaccgctattatattattcgcgggggctcgttttgttatagtgtggaaagttggtggggggggaatctcggatatctggccgcgcggaaaacgagttttgctgccatggggtttccgccaagcttggagagttgtacccccccctgagaggggaccaaaagggtgggagctgccaccgcgttggatggccgcttgtggaaactagtggacccccccccctgcccggcctgccttttttttttttttttttatcatatggtttgttagtcatggtctaagaaaatcatttgatacatgggatcagattttgtgtcatgtctttgtcttatgaatgttttgtgaaatgatttgaaggcaaaggaggagaatcacaaacattataagtgacatcatgtgtaagagaaaagagaattttacgatggagaggtatctattaggccacttgctgaactacaacgatgaaaaaggacaaatgctaagcgatgaccaaattgctgaatgtaattggggtcctatttgaagctgaggatactacagcaagtgttctaacctggattctcaagtatcttgaggatgaccacaaacttcttgaagcaataaaagtaagacttgttttttgtctcccaaaaagattttgtaaatccatgtagctcacaagtgttgaaaagtttatgctaattaatgagtcaacaaaattgttttgcaggcagagaaaatgggagtatataaagctaatgaaggagggaacatgccattggcatggggtcaggcctgaaatatgccaattactcatagggtatggtatatactatatactgctgtaaataatgtgatgcaacaaaattccatgtcttgggttaatttcaaggcaagttgctgaatatatatttctcattacaatcttgtttaaaagaaaaatctttttaaaaaatggccaaaaacatgtgaaacttaaatgacagcagttgaaaggggacatacctaggaaaacttagaaaaaacctacaaataaaagattttcaaaaaaaccaacttaattaacaaccaagttaacacatctaacaagtgaattttcattctacaacagtgtgaacttaacccaatctcatgcatgtgagttcaaacttctgactagtttatttgtcaactgtaattatcacaagttcatttataaagattttaaaaatttcaacgtgcaacttctacttttaaaataacagaacatagttattaggtgcttcaaatgatacaatactcacaaattttacctccgagatattcaattttcagactaagcaatactccattttagttatatcactaagtagctattacctccgagatattcaattttcaaatgttcgcaaaggaatttggcttagaaatcacacttataaagagacatatgttgaagataacattgttgaagtgaatttcgaagcatcaaagaacttatctttctttctttccctgattccatctactcacttatctaatcacatatgtagtgggatttgagtttgactcctgagtccatctaatcacttatctttctttccctttcacactatgaaaatcagtctgtattgttatagtcgctccccttccatttaattatagtgagctacctaggaagatttgactaactcattcctattacactttatcatcatcaacaaagaacttcttttttatgtgggtatcatcgacaaagaatactcacgaacttcacacttgcaggctgtagctaccttatatttattagacaagagacaacagacaagagaagaaaagggagactacatagtactatctttgggggggggggcctacgtagcntcactcgagggggggcccgggacccgttcgnccctatngtgagtcga

SEQ ID NO: 6116 - DNA, 1261 bp, Glycine max
ggaaatgaaaaaagtgacaagaagtgaagagaatgcgggttgtttgttgttccaattcaggcgtgagtgctttccctagttgtcttagattccctccactgatcgcaatttcaacaacaccctcttcgatccgctttctaaattctccacccctccgttccactgcttcgtgtaatttccattcaacatctctctctccaatcttcaatcttcaatcttcaatcgcgactattctaacataatacgatttcttcgtttgtgtttggttgcgcagcgcaacacgttacaataatggcttcgaagaattctcaacaagacacgcgcttagcgagaatcgcctctgcaatccgagtcatccccgactttcctaagccaggaattttgtttcaggacataaccacgctgcttcttgatacaaaggctttcaaagacaccattgacttgtttgttgagaggtacagagatcaaaacatcaatgttgtcgcaggagttgaagctagaggctttatatttggtccacccattgcattagctattggagcaaaatttgtccccatgaggaaacccaataaattgcctggggaggttatctcagaagagtattctttggagtatggaacagacaaaatggagatgcatgtaggggctgtacaacctggagaacgagccttaatcatagatgatcttattgccactgggggaacgttaggtgctgcaattaagcttctagaacgtgttggggtgcatgttgtggagtgtgcttgtgtgattgaattgccagagttaaaggggcgggaaaggttgggagacaagtcgctatttgtcttgattaatgggggagcctgatcttttttccaagtgattgtgtttttattagctggctcttgttaggagctttattgatgactgcttagatttccttaagatatattttgatgctgcggaaacggaaagcgtgctttgtttgagcgcgctcagttctgctcaattattattattattattatcttctgtgagtcccgtttggtaatgacgattgagagaacgatgtctataatataggacttgcttgccacttggctgcggaacatcctaaggggctaaggtttacttaaagaaacggaactccatctgatgctcaaaaaaaaaaaaaaaaaaaaaaaaaaaaaaaaaaaaaaaaaaaaaaaaaaaaaaaaaaaaaaaaaaaaaaaaaaaaaaaaaaaaaaaaaaaaaaaaaaaaaaagggggcggccgcttttaa

SEQ ID NO: 6117 - DNA, 1097 bp, Glycine max
acccaattgttttgcgttccaatggaaaagtgagaagtgaagagaatgcgggttgtttgttgctccaattcaggcgtgagtgccactcttccatctttcccttgtcccagattccctccactcattgcaatttcttcgatccgctttctaaattccacacccctccgttccactgcttcgccgcgacaagttacaagaatggcttcgaagaatgctcaacaagacacgcgcttagccagaatcgcctctgcgatccgagtcatccccgactttcctaagccaggaattttgtttcaggacataaccacgctgcttcttgatacaaaggctttcaaagacaccgttgacttgtttgttgagaggtacagagatcaaaacatcaatgttgtcgcaggagttgaagcaaggggctttatatttggtccacccattgcattagctattggagcaaaatttgtccccatgaggaaacccaataaattgcctggggaggttatctcagaagagtattctttggagtatggaacagacaaaatggagatgcatgtaggggctgtacaacctggagaacgagccttaatcatagatgatcttattgccactgggggaacgttaggtgcagcaattaagcttctagaacgtgttggggtgcatgttgtggagtgtgcttgtgtgattgaattaccagagttaaaggggcgggataggctgggagacaagtcgctgtttgtcttgattaaagggggagcctgattttgtgtttttattattttagctggctcttgttaggagctttattgatggctgcttagatttcctcaagatatatattttgatgctgcggaaacggaaagctcagttctgctcaattattgttattatcattatctgtgacgattgacgaatgagagaacgacggctataatataggacttgcttgccccttggcagcggaaacttaaatttaatgacacatgtaaaaggaacggaactccatctgatgctcgtttggagtgtgcttccttaaaactgatatgctcataacgtatagccacagatatgcatcaagtcacacgatcaaattaatttaattaatc

SEQ ID NO: 6118 - DNA, 992 bp, Glycine max
  misc_feature (8)..(8): n is a, c, g, or t
  misc_feature (950)..(968): n is a, c, g, or t
ttgactangcctcataggctcggctaagaagtaccgatcctgcatagtattagcttggcttgactcctctcatcagaagaaagcgaaaaaagcaaaaatgcaatctatgtccctgacgctgagcaagaggctctccaattcaaagcctctcttcagaatctcttccagcctcgtcgctcacgcatcctccgccacaacctctccgccgccaccttcgccgccagtcccctctccctccgccctcaacagcctcctcaccgctccgtggtccgccactcagtcacgcggaatcacgctttccggatctgatattagagtcgggaatctcattggaaaccgaggacgcgctcacgaggttctcaaactgtatcgccctcttgaaggaacgggcaaagccactcttgaggttccgcctcaaagtgtagctggttatgccacagttgctactacagaggatggtgccgaaaggaaggaacgaaacagtggattgagtaaggcaacgaagacaaagagagagcagctcctaaaagctactgcagttgcctctcttcttctaatatacccgaacacttattcattgctcttcgcaaatttctttgtgttctggcacttatatgcagggatcggagagattttggcagactatgttcaccatgaaatgaccagagaatttgtcatgatttctctcaggttgttcttgataatcgcattgaaggatgtttgcttaaattttgtatttgtataatcagatagtgcatgggttgtgctgacattactttccaataagagcccattgggggtcaaacttggcaaaacctttatttgtagtttctagtcgtttttctaacttaagaggggaggcaacatgataacttgatgatttatcatggtaattgatgaattttagcgtgtcttgcataaaaaaaaaaaaaaaaaaaaaaaaaaaaaannnnnnnnnnnnnnnnnnnaaaaaaaaaaaaaaaaaaaacttg

SEQ ID NO: 6119 - DNA, 1449 bp, Glycine max
  misc_feature (1)..(1): n is a, c, g, or t
  misc_feature (1449)..(1449): n is a, c, g, or t
ncgggccctttagaatttatgggttccccggggtgccaggaatttttgttttttttttttttttttttggtttttttttttttttttttttttctgaaaatgacattttattatttcataaaattgatctcatccatacaaaacccaactatgtaaggtaggtaagttgactcaattacagctaagcaataactgtagagaagctatattcaaacactgtagttcacagttatagaagttgtaatacttactccaataaccatattgcttattttcaatttcaagttggatttctgtctgttatggatgatgccttaacctctgtccatatgccccttccttcttttaattctgcaaagcaatacttgacgtggaaattttggcttgaattgcaacatttcccagttaagtgttccttccttcagactacacacatgaaaattgattcctccatcaactttctcacaataataccatcccttccatttttcatgttgggattcaggccaggcaaattagaatagtcaagtctttcagttagttggacagttgaaagctttctgcacatctgcaacctcacaaatggttaaaagtgtgcaccgaaatgttgttcaatcaaagccggacacgtggcagtccacgttcgcaagtaacagttaacatccaatttcgggcttcgggactgaaataagggactgcaaaaaatgggggactcaatctgtaaattaaattatagggggacaaaattcaaaatttgaatcaaatagggggactaaatttgcagttaagccaacattaaaagagtacaaaatagcagagtaaaaattgtaaaaaagtgtgagaaaaatcaaagaaagaagaatttagatagagagctgaaactatagatctgaaaatgtaatttcacaatttcaaaaaattgatctatacaaaacctaaatgtatatagttacatagttaagctcagttacaactcaacaataacttagacaaatctaaagtaattgcacctaacagtagaaattatagagaagtcacaactaaacaccataggttaaagttgtaaaatactaacagagtaacagcagtaatgtgacatcactccaatactccccctcaaactcaagaggggctgatccgagaattgataaaaacaaaaaaaaaactgagtttttgttgaagttctctaaaatggaggtgtgacagctttggttcagttagaatgtgagtacatttgtctagagcagaaacataatagagatgaaagctttggttgttcaccttccttacaaataataggacaagtcccacatgctttgttctaacatgaagaaagggattacgagctggtgactgttagatattaattagaaaaataataataacaagttttatggggggggggccctaccgtagctgactcgagggggggcccggtacccaatcgan

SEQ ID NO: 6120 - DNA, 625 bp, Glycine max
tcagctacgtaggcccccccccgatcataagatttcaagaccttagaaagagaaggaaaaaaaaaacttgtgtttcttgggaagccatgagcaccaccgagagtcaaagatataagggcacagtgaaatggttcaacgaggagaagggtttcggtttcataactcccgaagatggtggctctgatctcttcgttcactacagtgcgatccaaaccgacggcggcttccgcaccttgtcggagggtcagtcagtagagttcctcgtcactcaggacgacagcgggcgagccgcggccgtcaacgtgacgaccaccacggttaaatctagtgacagcggtaacggggaaaactctggtggtgatgctgccaatgttgagaaataagtgagaatgaattattggagtttcctgaattgcgagtatgatatttatattgatagttggacaatatactagtccattggtattttatattttattatattatctctggttattggcatttggttccaaacttgtaatacatttatcatgtgtttaacgtggttatgtagtaagttgttggatgtgtcgaattaatgtcaaataaaaatatatttatattatttttaaaaaaaaaaaaaaaa

SEQ ID NO: 6121 - DNA, 1269 bp, Glycine max
attaacctcgacccgcagacacagtccttcagtctgtctgtcgttctatttaattcccctctccaaatttcaacctctgtctcctctccttaacagcatcatcacatgcacccgcgattcctacgatcccttcccatggtctcttctctgcaccctcgccgtaccttctagaaccttccctcagatctcaattccccttccgctttctcctttcatggaaatggcttccactccccgcaccgtcgaagagatcttcaaggactacaccgcccgcagaaccgccatcgttcgcgctctctctcaagatgtggatgaattctacggactctgcgatccagataaggagaacttgtgcctctatggacatccgaatgaaacatgggaggtgactttgccggcagaggaagttcctccggagcttccggagcctgcactcggaatcaattttgctagggatggcatgaaccgcagggactggctttctctggttgctgtgcacagtgattcgtggttgctctctgtggccttctatcttggagctcgtcttaaccgcaacgaaaggaaacgtttatttagcttgatcaatgatcttcctactgtttttgaagttgtgactgagaggaagccagtaaaggacaagcccactgcagacagtggaagcaagtctagaggcagcaccaagagatcaagtgatgggcaagttaagagcaacccaaagtttgcagatgatggttatgaagacgaggatgatgagcacagtgaaaccctttgtgggagctgtggcggaaattacaatgcagatgaattttggattggctgcgatatatgtgagaggtggttccatgggaaatgtgtgaagatcactcctgcaaaagctgagagcataaagcaatacaaatgtccatcatgcagcttgaggcgaggcaggccctaagccgaaggcaaaatgtgaagtgaataatgctgtttcatggccgacaaagatactgtaatattgttgtatcttttatagaagttcttgtaaacggtatagtatctatgtctgatcataatctttcagattaagttaatttcttctaccaagattaatcatcagtgtatgttatataattttatagaatagaattctatacattttatttttgtctattaatctatattttgcttgaatttacccaggtgtatgtatggttattttaccttgtgtctgaattctcagatacaaggtagctggtaaaatactgagataagaactaccaccttttccgg

SEQ ID NO: 6122 - DNA, 1405 bp, Glycine max
gcaattttgcctcattgagtgaatactacttacttatatccactcagctacgtaggccccccccccagtttattttttctctctttgatcaaattcccttcccatggtctctctctcttcaattaattccatttagctttccccaaatcccaaaccctttttcgcttagatcccaatccaattgggttatggacatggcttccagtccccgcaccgtagaagagatcttcaaggattacagcgccagaagaacctctgttattcgcgctctcactcacgacgttgatgaattttacggcctctgtgatccagataaggataacctgtgcctctatggacatccaaatgaggcctgggaagtaactctgccagcggaggaagttccgccagagctcccggagccggctcttggaatcaattttgctagggatggcatgaaccgcagggactggctttctctggttgctgtccacagtgattcatggttggtttctgtggccttttaccttggggctcgtcttaaccgcaatgaaaggaaacgattatttagcttgatcaatgatcttccatctgtttttgaagttgtgactgacaggaaaccagttaaggacaagccaactgcggatagtggaagcaagtctaggggaagtgccaagagatctagcgatgggcaagttaaaagcaacccaaagtttgtagatgagggttatgaggaggatgaagatgagcataatgaaacactttgtggaagctgcggcggaaattacaacgctgatgagttttggatttgctgtgacatatgtgagaggtggttccatgggaagtgtgttaagattacccctgcaaaggctgagagcataaagcaatataaatgtccatcatgcagcctgaggcggggcaggccttagactgaaagaggcgatggaatgggtacatgtgaggtgagtgttgtttcatggctgacaagatactgtaattttgttacatcacttacagaagttaatgtaatgggcatagtatcgatgctcaagggcaaatttatcagggattaagtttgtttttccagatgaaccattggtgcatgccacagggtatagaatagaacatgacaaattttaattttatgattagtttatatttagtagaatatttgcttgaactttaaatattgtaatttttttatttttaacattgtttaagaaaacaaaccttttcaacagaaaaaaaaaaaaaaaaaaacattaaaaaaaaaaaaaaaaaaagggcggacagacaactaaaagaaataaaaaaacgggggggccgattcttggggggttcttgaacccggaaataatttccgtaccgggacttgaaggagaccctgttttccttatggggatagcttttaaacttggggaaattg

SEQ ID NO: 6123 - DNA, 877 bp, Glycine max
attttagtgttgccatctcaggttattgggcatttggtaatgaatccggtgcatcaattcttgctaacttcattggtgagacgaagcctttgcttcccaaatggtttttcttgatgactaacatattcatccttctacaagtgatggcactgactgcggtttatctgcaacctacaaatgaaatgtttgaagcaacttttggagacccaaaaatgggacaattctccatgcgcaatgttgtgccaagggtggtacttcggtcactatcagtggcagcagccacggttttagcagccatgttgccattctttccagacataatggccttgtttggggcatttggatgcattcctcttgatttcattttgcctatggttttttacaatatgactttcaagccctcaaagaacacaataatgttttgggtgaacaatgtgatagcagtagcatcctcaattttagttgtgattggaggaatagcatctattagacaaatagttattgatgccaaaacatacaatttgtttgcagatatgtaaaaattatagcaatacatacaaacaccagtgctaagtttcactgcaattctattattcatctcaaatcaagcaattctttcaacggtgtggattttccgacccattatcttgttagaacttagaaattactagctagtagtatgttttattgacagcttgatggttgtgggcaatgcacgtctatagctactggggtttagtagtttatcaagacagaactgtgcagtattagtctttaatgtgtaacatcatttgattgctggttgtagacccacaacgttgtgtgggtgccaaagatgtaattaatagttgaattgtttaagacattatgttgattg

SEQ ID NO: 6124 - DNA, 1479 bp, Glycine max
aaaaaccaaacccattaaacctacacactctcttttacagtgaaagtgtgagaaaaacccgtgtctctctctcgggttcgcaacgaggagacaacaccggagctctccgatcttccagaacattctagagtggcaacgggattcattcttcgcttcaaactttaaacacccaaacactaacccatctccatggacttgtacggtcggagccctgccagaaatggacccaacccggtgaaccaacccgaatggagctcaccgggcaccgacactgctctcgaagaatcgatgtggcatttgacgctgggtggtggcgaatcttacccggagcgatccggcgtgccgaattgtgtgtattacatgcgaactggtgtgtgtggatatggtggcaggtgtcgttacaatcaccctcgtgatcgtgctgcggttgctgcagcagtaagagctacaggggactacccagaacgggtgggggaacctccgtgtcagtattatttaaagaccggaacctgtaaatttggtgcatcctgtaaattccaccatccaaaaaatggaggtggatatttaagccaagctccactaaatgtttacggatacccgttacggccgggtgagaaagaatgctcctactatttgaaaacggggcagtgcaaatttggtatatcttgtaaattccatcatcctcaaccggctggcacatcattgccagcatctgcacctcaattttatcaacaggtgcagtctcctactgttcctctgcctgaacagtatggaggagcttcctccagcttgagagtggccaggcctcctatattgcctggttcatatgtgcaaggggcttatggtcctgtacttctttccccaggggttgtccaatttccgggatggagtcattattcggcacctgtaagtcctgtgccatctcctggcgctcaacctgctgttggggctacttctttatatggagtgacccagttgtcatcaccaacatcagcttttgctagaccatacacaccgctgccctctaccactgacccttcaagaagcaacccgaaggaacaattatatcccgaaagaccgggtgaacccgaatgccaatactatctgagaacaggggactgtaaatttggattagcttgtcgatatcatcatcctcgcgatcatattgtggcacggccacttcttagccctgtgggacttcctttacgtccggtagccctgcatggatttcagatgcaacaccgtatccagttgtgcacacttgtgagttgtgactacaatgcatgtgcaaatacaatcgttcacgatggagttagccacatgtagcagcagtcattatagcttatcaaatcatatatttgtttttcctctcactggctcttggagttcagtggctgattaaaggatttatattatttgtttgaagcattaattttatgtggaaggattaattgttcttaagcaaaaaaaaaaaaaaaa

SEQ ID NO: 6125 - DNA, 1887 bp, Glycine max
  misc_feature (82)..(82): n is a, c, g, or t
  misc_feature (197)..(197): n is a, c, g, or t
tcgagtcatacgtaggccccccccccgctgaaattagagaacgtgattggtgcaatgtggtcacttgtcatatggatactgnccaggcatatgtttggagacttcaaaattttgttcttggtgagcatatcttgaatccatgccctgaaaatccaacacctgtaaaggcttgtgctatcagtgcctgtggaaatttngtctttctagggacagcaggtggatggattgaaaggtttaatcttcaatctggaattcgcaggggtgcttatattgacatttcagaatcaagaaattgtgctcatgatggtgaagtagttggagttgcttgtgactcaacaaatactctcatgataagtgcaggatacaaaggagatataaaggtttggaatttcaaagaacgtgatcttaaaaccagatgggatgttgattgttctattgttaagattgtttaccatcgttataatggtctcctggctacagtagcagatgatttaacaattcgattatttgatgtcgtggctcttagacttgttcgtaaattcgaaggtcacacagatcgtataacagatttgtgcttcagtgaggatgggaagtggcttctgtcatctagtatggatggaagtcttcgaatttgggatgtaatcttagcaagacagatagatgcaatacaagttgatgcatctatcacagcattatccctgtccccaaacatggatatattagcaactacccatgttgatcaaaatggaatatacctgtgggtaaaccaggcaatgttctctagtacttcaaatgttgattcatgcgcaagtggaaaagaggttgtgagtgtcacattgccgtctatctcttctgcagagcattctcgagatgagcattatgatgagccagtgaatgcatctcaacctaaagatgctctgcatttcccaactcaagataagcaaatacccgaattagttacactttcattgctgcctaagagccagtggcagaacttaatcaacttggacattataaaggttcgcaacaaacctactgagcctccaaaaaaacctgaaaaagctccattcttcttgccttcagttccatccctctctggggaaatattgttcgagtctggtaagttatcaataaaggagaatgatggaacagatgatggaaaacaaatgaagacaagattagatatgccacaatcacgttttctgtatcttctccaatgctcaaaagagacagacaattatgcagcatttactgattatattaaaggattatctccgtcaagtctggatatggagcttcgaatgtttcagatcattgatgatgatgatgatcagcaagaagcagagaagagacctgagttggtatccattgaatggcttctggattattttattcatgagctttcctgcagaaataattttgagtttctacaagctgtcatcaggctatttttgaagatccatggtgagacaattcgtcagcagtcatgcttacaagaaaaggcaaggaagcttctagatattcaatgcatggtatggcagagagtagataaattatttcaaagttcgaggtgtgtgattgcctttcttagtaattcccaaatttaggtgacaaaccttcaacttgcaaccctcgagtgatagcaaaggcaacttgtgaggtcatgtatttgtttaggacttctattcactggaatgatagaaaagtagggcagcaaatttgttaaaagctggtggataaggttttgtattaggctaaaatatgtttttcaatcttgtaaaattatcaaagtttggatttggtccctgcaaaattctgtctgtttttttgtccctgtaaaattataatgtgttactttttggtttgaatcaaggtttggatgattct

SEQ ID NO: 6126 - DNA, 1307 bp, Glycine max
aacaacttctcggggtttggattttttcattccgcataggttccgtgttccaaacagtaaggaactactctcttctcttctatgctctgtaactctctagacgatgagtttgagtatgagcttgtgtggtagttacagtcttcaaattcgaaatcgcagaattgtaagctgcaatcttcaccaggatggcaggcatattgttcccatcaatacgcaccaaaaaacttccaaacctgaaaattgtcttcggtccaaatggaagattaatggcaataacattaggacatgcattggagtcatgacagtggcacacttggttgctccagtcactgcaaaagctgaagtggctgcttctatttatgctttggctgatggaagcctcaatgactggtttggaggctttctatattcagctggacaacaggccaatgaagctgttcagggccaattaacctctctcagtttcactagtttggctgtaatttatggggcagggcttgtgaccagcctttctccctgtacacttagtgtcttaccactgacccttggttacattggggcatttggctctggcaaaagcagagcagaggttgtaggagattccattgcattctccttaggtcttgcaaccacattagcactgttgggtgttggagcttcatttgcaggaaaggcttatggacagattggccaaggattacctttggctgcttctggtttggctataattatgggtctgaatcttcttgagatcattgagttacggctgccctcattctttgacagttttgatccacgtgcagccgctgccaatttcccatccagtgtgcaagcctacctggctgggcttacatttgctttagctgcctcaccttgtagtacacctgttctggccactcttttgggatatgttgctgcatccaaggatcctgtgattggaggcagcttacttttgacttacacaactggctatgtttctcctttactcttggctgcttcttttgctggagcattacagagcttgctctcatttcgcaagttctcagcatggatcaatcctataagcggagcaatgctgttaggtggtggtgtatatactttcttagataggctgttcccagtcacaatggtgatgtagaaaatctcttggctctaacacgctgtgatcttttttacttttaaccgttcaatgtatatatgtcacacaagtactcaattgaaatagaaatccaaatgagactttgcaaaaaaaaaaaaaaaaaaaaaaaaaaaaaaaaaaaaaaaaaaaaaaaaaaaaaaaaaaaaaa

SEQ ID NO: 6127 - DNA, 1301 bp, Glycine max
tcggactctttacccctgctgcaccaccaattgctgtatttctgggtgtaactgggatttcatttgttgccttccctcttagcaagaatttccctttagctctggcccaagctttagcctgtggaactgttggtgcttttctggtagacagaatcatcagaaaacagcttggacatcttcttgtcaagtcaaatacaccagagcctgaggccaaaagaagactctgtccaccaccacaatataggattcctcgatgatgttgcaggcccaaagggtgctcaactggaaatagtttatggagtctttgggtacatgcaggtcctctcagcatgtttcatgtcatttgctcatggcggagacgttcccgcctacgccccacgcccccgggcgggtgcgctagctattcttcaaggtggtgccgcaggaactgagattgtgattccaactgatgttcttgcttggggaggatttggcatcgttgcagggctaatgatgtggggttatagagtgatagctacaataggaaagaagataacagaacttacaccaactagaggatttgcagctgagtttgctgctgcctctggggttctgtttgcttcaaagctgggactacccatctctgcaacccacactctagtcggtgcagtaatgggcgttggatttgcaagaggacttaacagtgttagatcagaaactgtgaaggagattgtggcttcatgggtggttactattccagttggagctactctatcagtcctctacacatggatcttgactaagattttgtcctatattttatgagggtctattccaagacatgaaagcttatatatgggattagttcaagttactagcaccatctttcaaaggattgctttctgtggtacaaattggagagaagagggtaggtatggcatcacaggtatcttgggtagaagtctcttaactcagttggcaagggatgaatctttatgttcggatgtcaatcctgtgattgctcatgttaatttaatctcgaattggaacttaataagaaaggaaacgagtgggagaatttgtcagctccagcatttttagaccttttactttttttttttttttttatctagctaagttgaaaaacttagcaatccttatgatgtttaaaggttacaaattcagcgataatattggtaaaaacccaacgtctgtacttaacagattcatttaacctttttgcctcattaatatccacttgttgaaacattcttctaaaaaaaaaaaaaaaaaaaaaaaaaaaaaaaaaaaaaaaaaaaaaa

SEQ ID NO: 6128 - DNA, 822 bp, Glycine max
gtgcgccgctcgagccgaaattcccattcccatctcgagagttgttttattcatgtcgtgaactctctcccttcatctagctcgagtttttttcttgcttccgggagctctgaacttgaccgacgtcgttttcacatcaaaacccttcaacaaaaaaatggcgttcttcttgaaccaaactagtatcgcttcccattttcgatctcactctcagaagactgaagatttggcttcttttcctcgccgtcgattccacgtcgaaccaggggctcgtgaaaaagctctcttggcagaagatgcaactctgaaaccgttcaaatcgtacaagaagagtgtaaaaaagcttagaaaaattgggaatgcccttacaattgttgttgttgcaggatgctgttacgaagtatatgtcagagcttttacaagagaggaagctcagaaactgtaatgtcctgaaagttctggatgaagcaaatattgggagttagttttctgttttgttttattattgtggcaacaacttggacgttatgattagcaatgttagaataagcaaaaaagcatttgaaccaaaattgcttgtgcattaatagcttttccaccattccagatgtctactatctgatgataatgttgattggctggtcacaaatctgttgtggcctcagccttcaggtgtgagaaacagatctaattcgttcgaccaagtttgagggggagcagttatttgagggagttgttgtgattatctgtgagatgtttaatgcaattccataatcaagctttgcctgaaatgttaataaatctgataaccatgttaatggg

SEQ ID NO: 6129 - DNA, 670 bp, Glycine max
agggtggtttttattcatttcgggaactctcctttcacctagctcgagtcttttcttgcttcccggagctctgaacttgaccgacgccattttcacatcaaaacgcttcaactaaaaaaatggcgttcttgtggaacaaaactagtatcgcttcccattttcgatctcactctcagaagactgagggtttggcttcttttccgcgccgtcgattccacgtcgaacccggggctcgtgaaaaagctctcttggcagaagatgcaacgctgaaaccgttcaaatcatataagaagagtgtcaaacagctcagaaaaattgggaatgctctgacagttgttgttgttgcaggatgctgttacgaagtatatgtcagagcttttacaagagaggaagctcagaaactgtaatgtcctgaaagttctggatgaagcaaatattgggagttagttttctgttttgttgtatttttgtggcaacaatttggacgttatgattagccatgtcagaataagcagaaaagcatttgaacaaaaaattgcttgcttgtgcattagttttttcaccattccaaatgtatactgtctgatgataatgctgattggctgatcacaaatctgtggcttcaggtgtgagaaatagatagaattcgttctccctgtcaaaagtacgg

SEQ ID NO: 6130 - DNA, 557 bp, Glycine max
ctactattcgcctttccgcaccctcttccgtcgccgtcgattcgaacctcccccaaatcagcagcagtcgaccggaggcgccgccatggcccgtaccaagcagaccgcccgcaagtccaccggcggcaaggcgccccgcaagcagctcgccaccaaggcggcgaggaagtcggcgccgaccaccggcggagtgaagaagccccaccgctacaggccggggaccgtggcgctccgggagatccgcaagtaccagaagagcacggagctgctgatccgcaagctgcctttccagcgcctggtccgcgagatcgcgcaggacttcaagacggacctccgcttccagtcccacgccgtgctggccctccaggaggcggccgaggcgtacctcgtcgggctgttcgaggacaccaacctgtgcgccatccacgccaagcgcgtcaccatcatgcccaaggacatccagctcgcccgccgcatccgtggcgagagggcctaagctgtcctctccgtgcaccgcggtagtggatcgggatgagttgattccggttgtagtttgt

SEQ ID NO: 6131 - DNA, 498 bp, Glycine max
ctactattcgcctttccgcacccacttcggtcgccttccgattcgaacctcccccaaatccgcagcagtcgacaggaggccaagccaccgcgatggcccgtaccaagcagaccgcccgcaagtccaccggcggcaaggcgccccgcaagcagctcgccaccaaggcggcgaggaagtcggcgccgaccaccggcggagtgaagaagccccaccgctacaggcccgggaccgtcgccctccgggagatccgcaagtaccagaagagcacggagctgctgatccgcaagctgccgttccagcgcctggtccgcgagatcgcgcaggacttcaagaccgacctccgcttccagtcccacgccgtgctggccctccaggaggcggccgaggcgtacctcgtcgggctgttcgaggacaccaacctgtgcgccatccacgccaagcgcgtcaccatcatgcccaaggacatccagctcgcccgccgcatccgtggcgagaggg

SEQ ID NO: 6132 - DNA, 523 bp, Glycine max
  misc_feature (510)..(510): n is a, c, g, or t
ctcactcaaatcttcccaacccccaagcaccagaacctcctcaacctccccgcgcatcgacgacatggcccgcaccaagcagacggcgaggaagtccaccggcggcaaggcgccgaggaagcagctggcgaccaaggccgcccgcaagtccgccccggccaccggcggcgtgaagaagccccaccgcttccgccccggcaccgtcgcgctccgtgagatccgcaagtaccagaagagcacggagctgctcatccgcaagctccccttccagcgcctcgtccgggagatcgcccaggacttcaagaccgacctccgcttccagtcctccgccgtctccgccctgcaggaggccgccgaggcctacctcgtgggcctcttcgaggacaccaacctctgcgccatccacgccaagcgcgtcaccatcatgcccaaggacatccagctcgcccgccgcatccgtggcgagagggcctaggctgctgctgcaatccatatccatgcgtcgtgtcngatagatctctgt

SEQ ID NO: 6133 - DNA, 692 bp, Glycine max
agactttattgtgtttaaacacattacctagaacatcctaatcgaaaaacaccgcaaagcaatcttctcttcacttcaaaacacccgagcaaacctctccgatctcccatcccggcgccccccgctcctcccgcgatggcccgcacgaagcagacggcgcgcaagtccaccggcggcaaggccccgcggaagcagctggcgaccaaggcggcgcgcaagtcggccccggcgaccggcggcgtgaagaagccgcaccgcttccgcccgggcaccgtcgcgctgcgcgagatccgcaagtaccagaagagcacggagctgctcatccgcaagctccccttccagcgcctggtccgggagatcgcgcaggacttcaagaccgacctccgcttccagagctccgccgtctccgccctgcaggaggccgccgaggcctacctcgtcggcctcttcgaggacaccaacctctgcgccatccacgccaagcgcgtcaccatcatgcccaaggacatccagcttgcccgccgcatccgcggggagcgcgcctaggcgcctcgcttgccattgctaggtgtttaggatctgttcccgtcgtgttccatatctgcgtcgttcctgtgtaactagcttgttgctgtgcttcgatgctttcaatgaaatatggttaccagtatgagacaaaaaaaaaaaaaaaa

SEQ ID NO: 6134 - DNA, 514 bp, Glycine max
actccaaatcacccccattcctcccaatcccccaaatctcctcaacctcccggcgcatctccgacgacatggcccgcaccaagcagacggcgaggaagtccaccggcggcaaggcgccgaggaagcagctggccaccaaggccgcccgcaagtccgccccggccaccggcggcgtcaagaagccccaccgcttccgccccggcaccgtcgcgctccgcgagatccgcaagtaccagaagagcaccgagctgctcatccgcaagctccccttccagcgcctcgtccgcgagatcgcccaggacttcaagaccgacctccgcttccagtcctccgccgtctccgccctgcaggaggccgccgaggcctacctggtggggctcttcgaggacaccaacctctgcgccatccacgccaagcgcgtcaccatcatgcccaaggacatccagctcgcccgccgcatccgtggagagagggcctaggctccgttcggcgtcgtctgttagtcgtcctctta

SEQ ID NO: 6135 - DNA, 1091 bp, Glycine max
  misc_feature (1)..(1): n is a, c, g, or t
  misc_feature (12)..(15): n is a, c, g, or t
  misc_feature (21)..(21): n is a, c, g, or t
  misc_feature (42)..(43): n is a, c, g, or t
  misc_feature (75)..(75): n is a, c, g, or t
  misc_feature (81)..(83): n is a, c, g, or t
  misc_feature (108)..(109): n is a, c, g, or t
  misc_feature (111)..(113): n is a, c, g, or t
  misc_feature (115)..(115): n is a, c, g, or t
  misc_feature (118)..(119): n is a, c, g, or t
  misc_feature (146)..(146): n is a, c, g, or t
  misc_feature (148)..(148): n is a, c, g, or t
nggggggggggnnnntagggnggggtgacgcgaggtgtgcanntacatttgttatttaggaattaaaagacccangggggnnngggggagcttttcaaaaaagagggnngnnnangannttttttccgaaaaaaggagcgagaagntnttttttttttttttttgttaaaatagtgatactctatgtactaagaattccaagataagtttatagacatagcaaactttgatagttatgtgctgatactgatggtactctatggccagatgcacaagtaaacaggtgtgaaaaccttgtaacaatgttaatgttagatcatttaaaaagtgtcttatccagatcatttacagtgctacatctgcggtcttgcatgttgttcttgagcagtttaagacatgcattatcctcctgggaaactattatctctttggatccaatcccggcataattagtatctgtggagcatttgcggctattgctggtatgtctgtttacacctaccttaatctgaagcagcaatcaaacaagatatttcctcgacaggccacccttctaccaaaatctaaactaagcaaagaaaatggaacttcccaaaattgacattacagtgatgaaaaatgtctaacaaaattcctaatactgcattacatgagatgataattaaccaagcatttttcccttctgtgatttctagattccaatctgaccattttgggttttgatagtttatgttcaaatatattatactattgaagccgtactaggatacaatggttctattacacataggcaactgctgctcaagttggaacatctatctgtaaatgaatgatttggttgattcttatccggagttacgaattttttttccggcctatagaaaggagctactgttgcattttgtaatttcacagaaaacagaattacttttttggttattatactcatcttaatttgctacatctcatcatggggaaagagggttctcaattttatttgtaataagaatggaattatgcagtctttgtaatttgtagcacctgatcatcaacttttcagaatttatttttggcgcgcgctgacgcataac

SEQ ID NO: 6136 - DNA, 1026 bp, Glycine max
  misc_feature (9)..(9): n is a, c, g, or t
  misc_feature (20)..(21): n is a, c, g, or t
  misc_feature (23)..(24): n is a, c, g, or t
  misc_feature (29)..(29): n is a, c, g, or t
  misc_feature (32)..(32): n is a, c, g, or t
  misc_feature (34)..(35): n is a, c, g, or t
  misc_feature (37)..(38): n is a, c, g, or t
  misc_feature (41)..(41): n is a, c, g, or t
  misc_feature (50)..(50): n is a, c, g, or t
  misc_feature (56)..(59): n is a, c, g, or t
  misc_feature (69)..(69): n is a, c, g, or t
  misc_feature (75)..(76): n is a, c, g, or t
attaaaaanaccaaaaaacnnanntcccnccncnntnnccncccctctanatttannnnatcccccggnctccannaactcccgcgaagccatttcggtagaccccgtaattgaaaaaggaaaatcaatcaccgacctctcacgcacgcaagccttttcccccattctccggcggcggcagctatggcggcggtggcggcaaggtccgggctccgacggatgttctccatcgccgacttcgcgacgccgaacacgcgcatgttctccatctcggccttcgcgccgccgagcccgcccacgcctcccccgaaggccgacccctcccccaacctcttcgtctccgggctaagcaagcgtacaacaactgatggacttagagaagcttttgcaaagtttggggaagttgaacacgctcgagttgtcacagatcgtgtcactggtttttctaaggggtttggctttgtaaggtatgtttcggttgaagatgcaactaaaggaatagaaggaatggatggaaaatttctggatggatgggttatttttgccgaatatgctagacccagaccaccgccgcagatgggaggggcaactccgcagccacaacaatcatggggcactccttctggttcctggggctcacagtagatgaagggacaatcattctacctggctgtgcgtctgacagcgtatcagtcagccatcgcagtctacatttagatcatagctaccatggtgttgtcccaggtgtgaacacccttgcctgatccaatattcttgtcgtgttggactggtcgtttacggcctccacatggagaagcactaggggaaccttatatggaccgagcaggtattactgtcagcatgcaacagcttcggaccattgctaataatgtcttcttgtcccttttatttgaattgtcgtaagccttatcagctgctgatggcatgtgctgctcttgtactactggataatgactcgtagctcggaataagaacacgtttgcaagcggaaaaaaaaaaaaaaaa

SEQ ID NO: 6137 - DNA, 859 bp, Glycine max
ttttttttttttttttactaaaaatgatattcataactggattgcaagcatggtctcaagttgcaaaatactgaaacaagaatgaactggttctgaatactcatcgacacaagactctgacatctaaagcagtatgattctggtacccaaaaaagtgaagattgaccgataacagcaaatgtgacaagggtgccgaaaactccacggcttaaaccttgaagcccctgctgttcctccttcctcttgccttctcgaatttcctgcccttggagtggacatatggcttggtgtggctgtgtggcactcctggagccttgccaaagtgcctaacagcctccctggcgttcttgggacccctcaggagaagcgtgttctgtccaagcggagcacggagggcgagctggtcaaaggtaaggcactcgccaccagcattgacaatcctggccctcgccgtctcggtgaacctgagcgcggccaccttcattgccggtatctcgtagaccctctggtcatcggtgatggtgcccacgatcacagcgatcttgtcctccttcccctccatgaacctgacgaggcggcgcatcgagagcggcgggcggttggtcttgctcatgaagaggcgcttcaggatcacggcgttgaactggctcttggtcctccgcaccaggaagcggtagagcttgacgagcagcttgaggtacacatcgtccgatttgggcgccgtgcgcttggtcctcttgttgcggccgccggcgacgaggtcgatacccatggttgcgcggtggtggctgctgcagcggcgagggtcagggcggcagcggcagcggcggcggcgggacgggtgctaggttttttaaac

SEQ ID NO: 6138 - DNA, 638 bp, Glycine max
aatcactcatcattccacacacatctcattttgcaaacaaaaaaaatctaagagagaaatatggctggtctaatgaagttggcatgcttgatcttcgcctgcatgatcgtggccggtccaatcacatcgaacgcggctctgagttgtggcaccgttagcggctacgtggcaccttgcattggctacctggcccagaatgcgccggccgttcccacagcgtgctgcagcggcgttactagtctaaacaacatggcccgtacaaccccagaccgtcagcaagcttgccgttgccttgtaggagccgctaacgccttgcctactatcaacgttgcccgtgcagctggacttcctaaggcatgtggagtcaacattccttacaagatcagcaaaaccaccaactgcaacagtgtgaaatgagcggcggtcggatgaagctaatgcagacgttcaagtattatgtaatggatgagcgaatactaaaataagatgctccaatggttgttgtttttagagtttttcaatttcctgtcttttatgttgcgacgttcctattactttggtcgtttgtactatggtcacaatcaacgttatatgaatttcagatctaaaaaacataaaaaaaaagcttatcgataccg

SEQ ID NO: 6139 - DNA, 1346 bp, Glycine max
ccacgcgtccgaacgaaatgcaggtttcttatcaccctttggatattcagctgccacaattgcagcagcagttgatgctgtgtgctcaatggagtggtattggcttctggctttgaaaaatcagaaaaataatcacggaatacactcaacacggatatggaaatggaaaggatttcttatccagtattcagttgctggtgaagatggtcctgctattcttcttgtgcatggttttggtgccttttgggagcattaccgtgacaacatacatggtttagctgaatctggaaatcgagtttgggccattactattttaggatttggcaaatcagaaaagccaaatgttgtatatactgaactcttgtgggctgaactattgagagattttattgttgacattgtgggtgaaccagttcaccttgttggcaactcaattggcggttatcttgttgctattgttgctcgtgtttggagtgatttgatcaaatccattgtcttgatcaacagtgcaggcaatgtcatcccaagatattcattcataccattgtctacaattcaggatagacaaacttcaggggcttcctggttgggttctcgcattcttgtattctacttgaggctaagaactcaagaattacttaagaaatgttatccaactagggttgaaagagcagatgattttctcataagtgagatgctaagagcatcatatgatcctggcgtgcttgtggtgttggaaagcatcttcagctttaatctttccatacctcttaactttcttcttgaagatgtcaaggaaaaggtcctaattatacaggggatgaaagatccaatttctgactccaattcgaaggtggccatgctaaaagaacattgtgatggagttatgattaaggagttagatgctggtcattgtccacacgatgaggtgccagaacgagtgaatactatcatttgtgagtggatacttggtgtggaaagtaacaacattttggcagagtgtgcagtgtaaattttattggtatgtagcaactgccaacatggtaattgtccagcgcatattaatacaccagtactacgctttgttggcagttaattggtaactggattcagcacaaagttaatccaacagctgacaagactgcaaagaagacatgtacatgttgcgctgtaaatttgtagagttagcattcctgcattttgttatgtaatcctcccatttatttatttatttttggttctgttccctttctgtgttattagtatgttgttataatgggtgtgaatatccagactaaccatgcagtgtaagtcttcgcacacaaagcctagacacttaaacctat

SEQ ID NO: 6140 - DNA, 1580 bp, Glycine max
aaaaaagtaaatagtaagcgatttcggaaaacgagaagagagagagaaagacaaatagaagaagctgcatttgcagagacgccctgagagagagaattggaaggttgcgacgagtgatgatatacacatattgtgacggtagtgaaatcgaggaaaaagaggtagcaatttgcgagttgcaatgagtaacgaaaaggctccttcatcagcttcttcgagtagctacgagttgagcaaaggcatcaatggcctcgacaaggttattcttcgcgacgcacgtggtagctccgctgaggtgtacttgtacggtgctcacgtgacttcatggaagaatgaccatgccgaggaattgctttttctcagtagtaaggctatctttaagcctccaaagccaattcgtggagggattccaatatgttttcctcaattttcaaacctcggtcctctcgactcacatggatttgctagaaaccaattctggacaattgatgattcccctcctccttttccaacaagtacttcgaataaagcctttgttgatttgattcttaaaccctcagaagacgacatcaagatttggcctcacagttttgaatttcgtcttagggtagctcttggacctggaggagatctgttgatgacatctcggatcaggaacactaacattgatgggaagccattttcattcacatttgcttatcatacatatttctctgtgtcagatataagtgaagtgcgggttgaaggattagagacattggattatcttgacaacttgcagaaaagggaacgctttactgaacagggggatgctttaacatttgaatcagaatttgacaggatatatctcagcactcctacaaagattgcaattcttgatcatgagaaaaagagaacaattgtattgcgtaaagatggtcttcctgatgctgtggtgtggaatccttgggataagaaagcaaaggctatatctgatttcggtgatgatgagtataagtacatgctttgtgtagaggctgctgctattgaaaagcctatcactttgaaacctggtgaggaatggaagggaagactagaactttcaactgtttcttctagttattgtagtggacagcttgatcccaaaagagttattcaaggaagctgaaagatcatcgttgtgttttgtgtcctgtacaggtagcttgttgccaccacgatgaacgttgaaaggaaagtgtctccaacaatttccccccttcatgttccacttaaaccttcttcatgttggacggatgaactcatgtatagagttttgttaaataatattttcctgtaacggatgactagttcggtcataattgacgtataagtagaatagccttcagttgtttatggaaaatcaaactaaaatctcaaattttatttgattttcacgttgggttctcgtactcatatgaaatgtttattatcacatatcataggcaatgaatgcatgtatttgacaggatcgttttacaacactacaatttggcctgtatgtcgtaagttgttgccgctatctacattttcaagtaatgaatataattattaaatatata

SEQ ID NO: 6141 - DNA, 1061 bp, Glycine max
ggatgggcccgggcaacccacgcggccgtcccgaaaggaggagagagaaagacaaatagaagaagctgcatttgcagagacgcattcgcgtttgtctgagagagagaattggaaggttgcgacgagtgatgatatacatattgtggcggtagtgaaatcgaggaaaaagaggtagcaatcgtgagttgcaatgagtagcgaaaagtctccttcatcagcttctgcttcagcttcttcttcgagtagctacgagttgagcaaaggcatcaatggcctcgacaaggttattcttcgcgacccacgtggtagctccgctgaggtgtacttgtacggtgctcacgtgacttcatggaagaatgaacaggccgaggaattgctttttctcagtagtaaggctatatttaagcctccaaagccaattcgtggagggatcccaatatgttttcctcaattttcaaacctcggtcctctcgactcgcatggatttgctagaaatcggttctggaccattgatgattctcctcctccttttctgacaaatactccgagtaaagcctttgttgatttgattcttaaaccctcagaagacgacatcaagatttggcctcacagttttgaatttcgtcttagggtagctcttggatctggaggagatctgatgatgacatctcggatcaggaacactaacattgatgggaagccattttcattcacatttgctaatcatacatatttctctgtgtcagatataagtgaagtgcgggttgaaggattagagacattggattatcttgacaacttgcagaaaagggaacgctttactgaacagggggatgctttaacattggaatcggaatttgacaggatatatctaagcactcctacaaagattgcaagtcttgatcatgagaagaagagaacaattggattacgtacagatggtcttcctgatgctggggggtggaatccttgggacaagaaagcataggctatgttctgtttttgggggtgatgagtataagtacatgcttggtgtcgaggctgctgctatagaaaaaccc

SEQ ID NO: 6142 - DNA, 2033 bp, Glycine max
aattcggctcgagtcggtgtcggcacaagccccagaatccccatcactctacaacaccttccttcaatgcctcaccaacaacactcgtcatagaattcacaaccgacaatggcgacaaaacctcgtttggcttatctctcttccacttttcttcttcttcttgttgtaactgtctttacttcggtgtcggcacaagccccagaatccccatcactctacaacaccttccttcaatgcctcaccaaatacacaaataacccctccaacatagtcttcgccaacaccaaccccaagttccccactatcctccaaaactacatccgaaacgcgcgtttcaacacctcctcgacgcgaaaaccattactcatcgtcactccccagcaagaatcacacgtccagggcacagtaatctgcgccaaaagcgttgaaattcaactcaaaatcagaagcggaggccatgattacgagggcatctcgtacatctccgaggaacccttcgtcatcctcgacatgttcaactatcgcagaatcaccgtggacgtaaaaaacgaggttgcagtggtcgaagctggagcaacacttggagaagtttattacagaatctgggagaagagtaaagttcttggctttccagcaggggtgtgtcccactgttggcgtcggtggccatttcagcggcggagggtacggcaacatgttgagaaaatatggcttatccgttgataacgtcatcgacgcgcaaattgttgatgtgaaaggaaatcttctaaacagaaaaacaatgggggaagatctgttctgggctattagaggaggtggtggagcgagttttggtgtcattttgtcgtttactattaaactcgttccggtgccggaaacggttaccgttttccgcgttgagaagactcttgaaacgaatgtcactgccactgaccttgtcgtgcagtggcagcaggtggcgccaaatactgatgatagacttttcatgaggttactgttgcagcctgtgagttcgaaggttgtgaagggaacaagaaccgttagagcctcggttgtggctttgttcctcggaggggctaatgaggttgtgtcgattttggcgaaggagtttcctcttcttgggttaaagaaggagaattgcactgaggtgagttggattgactctgttctgtggtggaacgatgacaatagtttgaagaatggtgacaaacctgaaaccttattggatcggaatttaaacaatgcaggttttctcaaaagaaaatctgattacgtccagaatgctatttccagagatgggttggagtggctatttaaaaggatgattgagttgggaaaaacggggcttgttttcaatccttatggagggaaaatggctgagattccttctgatgcgacgccgtttccgcaccgtaaagggaacttgtataagatccagtactctgtgaactgggatgatccttcacccggtgctgctctgaatttcacgaaccaggctaagaggttgttcagttacatgaccccttttgtgtccaagaatcccagaagtgcgtttttgaattatagggatcttgatattggggttaacagctttggtgagaatagctttcaggaagggttggtttatgggaccaaatacttcaatgataattttcagaggcttgtgaagattaagaccacggttgatcctgaaaactttttcaggaatgaacagagtatccctgttcttcatggcgaagcatagggaatcatacagatacagtgaagaatattgcttagtttttttttttttttccttgtttgacagtaaagaatattgcttagtgctcctgttagttgtggcattttcttttgttcctatagttctatatgaatagttggcccataggccgtgatgtttgtcaattgatttgattattattatatcattgaattttaaagttgaggtaaaaaaaaagaaaaaaaaaaaaaaaaaaaaaaaaaaaaaaaaaaaaaaaaaaaaaaaaaaaaaaaaaaaaaaaaaaaaaaaaaaaa

SEQ ID NO: 6143 - DNA, 826 bp, Glycine max
ccacgcgaaaaagctacgcgaaattagggttgatcgaggaagaagaagaagatgtcgtacctgttgcctcacttgcactctgggtgggcggttgatcaagcaatcctggcagaagaggagcgtctggtcgtgatccgtttcgggcacgactgggacgaaacctgcatgcagatggacgaggtgttggcgtcggtggcggagacgataaagaactttgcggtgatatacctggttgacataacggaggtgccggatttcaacaccatgtacgagctctacgacccttccacggtgatgttcttcttcaggaacaagcacatcatgattgatctgggaaccggtaacaacaacaagatcaactgggctctcaaggacaagcaggagttcatcgacattgttgagaccgtctaccgtggagccaggaagggacgtggtctcgtcatcgctcccaaagattactccaccaagtaccgttactagtttcattcatctgtaacatacaacaaactaaatattatctcttttcttacttctctggtgtggtgctggttgtggttgtatgatcattctgatttctgcttattcacaactctgttacatgaattgcttttgtcatatgctaaagtgttgttagaataattccttagttttgcaactttgctttagtagtttaggatcgttggtgaagcaaacacaatttgattttttcaataaagttgacattttttctttgactcctgtagcgaaagtctacctcgtatggttctgcgtgtttgtttggatttacactattaagaatctcatttcttaaaaaaaaaaaaaaaaa

SEQ ID NO: 6144 - DNA, 805 bp, Glycine max
  misc_feature (1)..(1): n is a, c, g, or t
  misc_feature (3)..(3): n is a, c, g, or t
  misc_feature (5)..(5): n is a, c, g, or t
ngnanttaccaaaaaaaaaaaaaaaaaaaaaaaaaaatttacaaaaaaaaaaaaaaaaaaaaaacatttttttttccgggaattgtgtgttgttgagtgggaaacgtgaaattagggttcatcgaggaggaagaagaagaagaagatgtcgtacctgttgcctcacttgcactctggatgggccgtcgatcaagcaatcctcgccgaagaggagcgtctcgtcgtcatccgtttcggccacgactgggacgaaacctgcatgcagatggacgaggtgttggcgtcagtggcggagacgataaagaactttgcggtgatatacctggtggacataacggaggtgccggatttcaacaccatgtacgagctctacgacccttccacggtgatgttcttcttcaggaacaagcacatcatgattgatctcggaaccggtaacaacaacaagatcaactgggctctcaaggacaagcaggagttcatcgacattgttgagaccgtctatcgtggagccaggaagggacggggtctcgtcatcgctcccaaagattactccaccaagtaccgttactagtttgattccttcaagtcatgtactcacccacccacccacccctatggatcggatctgtaacatacagcaaacaaaattttatctgttttcttacttctgtggtggtggtggttgtatgatcattctgatttctgcttattcacagaccttaaactccaactctgtgaaatgaattgcttttgtcatatgccaaaaaaaagatagaataaaacaagacgagttctcaaagcg

SEQ ID NO: 6145 - DNA, 752 bp, Glycine max
gcaacccctttttctcaaacggtcacttaatcttgcttccaccattttcatcatatacttcttcccacacacctacattcattcccattgaacttgtagtttccatcaacacattaattttccttgttccgtggtggcacacaccataatctcatggaaaaggaaaacatgctcaaaacgcctccaaaagttccaattcaagatcgaacacccgaacctgaatgcaaaacaccaactccagttcaacaacaagaccccaatgatcataactcctcaaatgaattgcgcaagcctgttaccccagatcgtcttagagtccccaaggcattcaaatacccagaaagatatacaagcccaacagatttgatgatgtcaccagtaaccaaaggccttcttgctagaactagaaggggtggtggtgcggtgttaccacctgggggtaaaaatcgaccaaagattctagacatgcccttgaaggatgtcggtcctatccagaacaagcttccaatgcttattgatgagaagatcaactcagcttgaaggattcaaaggacttttgttcaacatgataattcatttgacagtggttcaaagggagtttaaagatgatgatgtaataacaataacatcacacagagagagaaagagagagtttatctccttgttcccatgttaaacaactctgttctgagattataagcttatgaagtttgtgatgctcaattttcttctcaaaatagcctttctagcaa

SEQ ID NO: 6146 - DNA, 581 bp, Glycine max
gagtacggctgcgagaagacgacagaaggggggtggtggaggtgtaaaggaatagcctttttgttgccacctttacttttatttaaacacttggtttctccgtctttcttggagacacacaacacactctctctcatgactccaaccaacttacccaccaactaatctttttaattccaaaccaaaccatgcctctttttttcacttcacaactttcatttcagtttgagttctccaatggcagttcctgcaccattctctctttcttctgatccctttgcttccaaatctgccacatcaacgatccttggtcctgccgtgctgaaaatagggaactttgagcaaactcatttcggattgttcacggcattaaggagaaatcaaggtttcactttaaaggcctcaatggggcctccgggatttacagagaaacttaacaacaacaggctaaagactttagctgatgctgaagatgggtgtgatatatttaatgacctgaaagataggtttttaagttttaaaaagaataaatacatgaaaaatattgaacagtttgaaaatcttgcaaaggttcaaacacc

SEQ ID NO: 6147 - DNA, 1212 bp, Glycine max
  misc_feature (1153)..(1153): n is a, c, g, or t
ggaagaatgggtgggaatttatttaaggcccttgaaagttagggttttaagttttaaaaaggaataaattcctgaaaaattattgaacattttggaaaatcttgcaagggttcaaacaccaaaagtccatggttattgctggtgcagattctagggtatgcccttctaatgttttgggatttcacccaggagaagcattcatgattcgcaatgttgctaatttggttcctacctttgagagtggacccacagaaacgaatgcggctcttgaatttgcggtgaactcccttctggttgagaacatcttagtcattggccacagctgctgtggtggtatacgtgccctgatgggtatgcaagatgatgatgttgaaaaaagttttataaaaagttgggtcattgctgggaagaatgcaagaaaaaaagccaaggctgctgcttctaacctcagctttgatgagcagtgcaagcattgtgagaaggaatcaattaaccattccttgttaaatctacttacttacccctggatagaagaaaaggtggcaaatggagaactctctattcatggtggttactacgactttaccgattgttcatttgagaagtggacattggattaccggggaaccaaattggaggaaaatggcaaaattgctgccaaaaacaaaatattttggtgttgaagtttgtacttatattttcctgtgttcatcgtgttgtttttttcaaaaattcgtaggactttaaaagcataggctgagttatgtatttttgtaggatctataagatgtttaaatcgatcgagttgaataaccccctatcatttcaggtgtatgttgtattattgctttgtgaaaaaacgttaaggtcataatgtactccgggctttgatggtttttttttttttttcattcatttatacactgctgatgcagcaggtaggattttcccccctcctttttgttggaaatggagctatctatgtcttttttatgatttccactcaaatgttgtccatactttttcaccccataatcaacacgactttttcccacgcatcccccttttttatttgagggcgtggtttaagaattggactggaccggctggtccaattgggaattccgtgatcatattggttcggttcatggtnacttggtaaggattgcaaatacatcaaaatcggtgtgatctgggttgaaataggaaatg

SEQ ID NO: 6148 - DNA, 904 bp, Glycine max
tacggctgcgagaagaccaccgacgggggccccccccccaattatgtgaagtcacaaagtcaaaagcacagtttgacagtatcatgtcatgggcaactggtggtggaggttcaaaggaataacctttttgttgccacctttatttttatttaagcaccttggtttctccgtctttcttggagacacacacacgctctctcatgactctaaccaacttacccaccaactaataatctttttaattccaaaaaaccaaacaatgcctctttttctcacttcacaacttttatttgtgtttgagttctccaatggcagctcctgcaccattctctctttcttctgatcccttcgcttccaaatctgccacatcaacgatctttggtcctgccgcgctgaaaaaagggaactttgagcaaacccatttcggaattttcacggctttaaggagaaatcaaggtttcactttaaaggcttcaatggggcctccgggatttacagagaaacttaataacaacaagctaaagactttagctgatgctgaagatgggtgtgatatatttaatgacctgaaagataggtttttaagttttaaaaagaataaatacctgaaaaatattgaacattttgaaaatcttgcaaaggttcaaacaccaaagttcatggttattgcttgtgcagattctagggtatgcccttctaatgttttgggatttcaaccaggagaagcattcatgattcgcaatgttgctaatttggttcctatctttgagagtggacccacagaaacgaatgccgctcttgaattggcggcgaacccccttctggttgagaacatcttagtcattggccccagctgctgggggggcatcccggccctgaggggtagccaaaatgatgaagttaa

SEQ ID NO: 6149 - DNA, 1234 bp, Glycine max
tcgagtcagctacgtagggccccccccacaaaaaactccaaactcaagtaggctatactaaggtgaaaaaggagagatggcagctgcaacatctagtgctgtgttaaacgggtttggatctcacttcttgtgtggaggaaagaggagccatgcccttcttgctgctagcattggagggaaagttggtgcttctgttagtcctaaaagagttattgtggcagttgctgctgcaccaaagaagtcatggatccccgctgtaaaaggtggtgggagtttcatagacccagaatggcttgatggctcgctaccaggtgactatggttttgacccactaggactaggaaaggacccggcattcctgaaatggtatagagaagctgaactcattcatgggaggtgggcaatggctgcagttgtaggcatcttcattgggcaggcatggagtggagttccatggtttgaggctggagcagatcctaatgcaattgctcctttctcatttggctctctcttaggtacccagttgctcctaatggggtgggttgagagcaagagatgggtggacttcttcaacccagattctcagtcagtggagtgggccactccatggtcaaaaactgctgagaactttggcaactctactggtgaacaaggctaccctggaggaaaattctttgaccctttgggatttgctggagctatcaaggatggcgtttacattccggatgccgacaagctagagagactgaaattggctgagattaagcatgctaggattgctatgttggctatgctgattttctactttgaggctggccagggcaagacaccccttggtgctcttggcttgtaagcaaaataatgtacactagggagacaacttgaatcattgtcctgtacagccagatttctcccttgagaagtttcaaattttatgctctaatcttggatgcattcaccttgtatctgcattatacatttataatatcgacaactcgtataaatacttgcatctatatttcatttccaaaaccagatggagtgaaagggacagtgatagttgaaaattgcaagttgggccctgttaattgtaatttcacacaaaatatctgttagctttatcatacccacgttgcaacatggaaaaacacacatgcaaaggtagcttggactgccataaataattattttgcaagaaaaaaaaaaaaaaaaaaaaaaaaaaaaaaaaaaaaaa

SEQ ID NO: 6150 - DNA, 2102 bp, Glycine max
ggctcgtgctgttttccgctgcttgtttgtgcctgcgtagttacaaagtaaaaagagggaggactaggacaaaagttgttggcagtcatcatgtcgagcgcttcgttgaaggagatgaggaacggtggtgaggattatagcaatggtcatggtggtggtggtgtgagggacttgtatggagaggattgtgccactgaggaccagcttatcactccatggactttctctgtggccagtggatgcagtttactgagagatccacgctacaacaaagggctggcctttaccgagggagagagagatgctcattacttgcgtggccttttgcctccagctatcttcaatcaagaacttcaggaaaagaggttgatgcacaatcttcgccagtatgaggttcctctgcataggtacatggcaatgatggatcttcaggagagaaatgaaaggctgttttacaagcttctgatcaataatgttgaggaactgcttcctgttgtttacactccaacggttggagaagcatgccagaaatacggaagcatttttaggcgtcctcagggtctatatataagtttgaaggagaaaggcaagatccttgaagtactgaaaaactggccagaaaagagtattcaagttattgttgtgactgatggtgagcgcatattaggacttggagatcttggttgccagggaatgggaattcctgttgggaaactttctctttatacagctttaggaggtgtccgcccgtcatcttgcttgccaataaccattgatgttggcacaaacaatgagaagttgctgaatgatgagttctacattgggcttaaacaaaagcgggcaactgggcaggaatatgcagagcttctagaggagttcatgcgcgcagttaagcagaactatggggagaaagttctcgtacagtttgaggatttcgccaatcataatgcatttgatctgctggaaaaatacagctcatctcatcttgttttcaacgatgatatacagggtacagcatctgtggtattagcaggattgcttgcatccctgaaattagttggtggaaccttagttgaccataccttcttattcctgggtgctggagaggctggaactggtatagctgagctgatagctcttgagatttcaaagcagactaaagctccagtggaagagacccgcaagaagatctggctcgtggactcaaagggacttattgttagctctcgtttggaatcacttcagcagttcaaaaagccttgggcccatgagcatgaacctgttaagagtcttctggatgctgtcaaggcaatcaagccaaccgttttgattggatcatctggagcagggaagacatttactaaggaggtggttgaaaccatggcatccttgaatgagaaaccacttattcttgctctctccaacccaacttcacaatctgagtgcacagctgaagaagcttatacatggagcaagggtaaagcaatctttgctagtggaagcccatttgatcctgttgaatatgaaggaaaactttttgttcctggacaggctaacaatgcttacatatttcctggttttggcttgggtttgatcatctctggtgcaattcgtgtgcgtgatgagatgctcttggcagcctctgaagctttggctgcacaagtatcacaggaaaactatgataagggactgatttaccctccattctcaaacatcagaaagatatcagcccacattgctgctaaagtcgcggctaaggcatatgatcttggtctggcttctcatctgcctcgacctaaggatcttgtcaaatatgcagaaagttgcatgtacagcccaggctaccgaagctaccgttgagttttttgaatattgtgaggtctacaccctacagtgatacacaatgagattcttcttaggagcagatttattttattgcttgttagctttgttgtataaggccaatatgaactttgaaaagttgcttattctttcaaggtttttatttgtattaaggaggaatattattatttatatttaaattccaatttattctgaacgaaatatgatttttgtagtagcctgagcttgtcataaaaaaa

SEQ ID NO: 6151 - DNA, 2251 bp, Glycine max
gtacaatgctatctttgtcaaactgactccaaataaacaacatgcaatatcatcagcaggagaaaatggagaactttgcttaggctcaattataatgggctgcttgcatcactgactgataaaactgttcaattagttggcttattcataagattatatatatatatatatgctctctttccgctgttattactgatatcataggttgattgattgctgtttgaggcctttagggtttgcaggtattcaggaacttgcttgttttggtttccccccctctctttttattgtttttttgagaatattttttttccagtatctttttgtgcattttaatttattattattcatttgactcaacaaccgttgctcaaagaacattatagtttaaatattatttgggccatgcattgcaggtggaggcttcaccaactacagggtccctccgtaagctccaacaaacaatgcatggttctatggcctctgctgcatttccagtaaccactgcctgcttcgataccaatactgttgatgacagaaaatcaagtttctttgagttcaaaccactcagcagatctaatatggttcctgcagacttcaacaaccatgtaagtaaacaatctactcaagtagaaggtccaggaaaaactcaatcatttgcttcctcaccattagtggaaagtgagatagcagttccttctaatgaattaagcctatcatcacctgtacaaaaggttagttctagtgctagtgctcctgttgatgttgacttggatgacattaaccacaaaggcaacacagctactgggcttcaagcatcacatgttgaggttagaggcagtggactttcagttgcagctgagaaaacatctgatgatggatacaattggcgaaaatacgggcaaaagcttgttaaaggaagtgaatttcctcgcagttattacaaatgtacacatcccaactgtgaagtgaaaaaactttttgagcgctctcatgatggtcaaatcactgagatagtttacaagggaacacatgatcatcctaaacctcaaccaagctgccgatactctaccggtactgttatgtctattcaaggagagagatctgataaggcttctatggctggccgagatgacaaagcaactgctatgtatggtcaggtgtctcatgctgctgagcccaacagtactccagagtcatcacctgttgcaacaaatgatgatggtttagagggtgttgccgggtttgtgtcaaataggactaatgaagaggttgataatgacgatcccttctcaaagcgaagaaaaatggaacttggaaatgttgacatcactccagtagttaagcctatccgggaaccacgggttgtcgtacaaactttgagtgaggttgacatattggatgatgggtaccgctggcgtaagtatggccaaaaggttgtgagaggcaatcctaacccaaggagctattacaaatgcacaaatgctggttgccctgtcagaaaacatgtggagagggcatctcatgatccaaaagcagtgataaccacatatgagggtaaacacaatcatgatgtaccagctgcaaggaatagcagccatgacatggcagtaccagcagctgcagcaggtggacagacaagaactaagttagaagaaagtgataccattagccttgaccttggaatgggaattagctcagctgctgaacataggtcaaatgggcaagggaaaatgctgcattcagagtttggggacacacaaactcatactagcagttccaacttcaagtttgttcatactacctcagctccagtatactttggtgttctacataacagctcaaatccctttggttctagagacaataggagtgatggtccatctttaaaccgttcctcatatccatgcccacagagcatgggaagaatactaatgggtccatgaagttgattacaccacagatattaaataaaaaactatgagtaacaatttgctttcttttttcttatttttggcgggtatagcttcaaaggtgtaacatctcattttctgtaagaaaatgcagataagttcttttatgtttatatcactattccatagttgctgtttagtagagttggtagcagctccatcttgacttttaaatctaattgccgtttgtaattgtataattataaattataattatatccaaattcttctgtataaatatgaagctgataacctccacaaaaaaaaaaaaaaaaaaa

SEQ ID NO: 6152 - DNA, 1964 bp, Glycine max
  misc_feature (31)..(31): n is a, c, g, or t
tgaaaaaacccatgcacgttcgtacgtaagnctctctaattggcggctcgaggaaaacctagcttctttgagtttaaaccacacaatagatcaaatatggttcccgcagactttgacaaccatgcaagtgaaaaatctactcaaatagatggtcaaggaaaagctcaagcttttgattcatcaccattagtaaaaaatgagtcagcatccccttcaaatgaattaagtctatcatcacctgttcaaatggattgctcaggaggtagtgcccgtgttgaaggtgatttggatgaattgaaccctagaagcaacataacaactgggcttcaagcatcacaagttgacaatagaggtagtggactttccgttgcagctgatagagtatctgatgatggatacaactggagaaaatatgggcaaaaacatgttaaaggaagtgaatttccacgcagttattacaaatgtacacatcctaattgtgaagtcaagaaactatttgaacgctctcatgatgggcagatcactgagataatttacaagggaacacatgatcatcctaaacctcaaccaaaccgccgttactctgctggaactattatgtctgtgcaagaagagagatctgataaagtttctttgaccagccgagatggcaatggatcctatatgtgtggccaggggtctcacctggctgagcctgacagtcaaccagagctatcgcctgtagcaacaaatgatggtgatctagatggtttgggggttttgtcaaaccggaataatgatgaggttgatgatgatgatcccttctcaaagcgaagaaaaatggaccttggaattgctgacatcactcctgtagttaagcctatccgggagccacgggttgttgtacaaactctgagtgaggttgatatcttggatgatggctaccgctggcgcaagtatgggcagaaggtggtgagaggcaatcctaaccctaggagttattacaaatgcacgaacactggttgccctgttagaaaacatgtggagagggcatctcatgatccaaaagctgtgattaccacatatgaggggaagcacaatcatgatgttccaactgcaaggaatagttgccatgacatggcaggaccagcaagtgcaagtggacagacaagaattaggcccgaagaaagtgataccatcagccttgaccttgggatgggaattagcccagctgctgaaaacacaccaaacagtcaagggagaatgatgctttctgaatttggggatagtcaaactcacaccagcaattccaatttcaattttgttcatactacgacagtgccggggtactttggtgtgctaaataacaactctaacccatatggttctagagaaaatccaagtgatggtccatctttaaaccattctgcttatccttgccctcagaacatagggagaatactaatgggtccttaaaattgtttgtacaacaaaaaactaaataaaatgaaattctgagttccattttgctttttcttttttggcgggtaaagctttaaaagcatagctcctcattttctctttggaaatgctgatagttcttttatgttcatatccttatatgatgagagctgctctttagcagaattagctgtagctgtgccccttcaggttgactcttaattctaattgctgtttgtataattatatacagattcttctgtacaaatatgaagcttataccaaagttgcttcaacaaaaaaccttgtaaaagtgtttggtggattcaactatttataagtagtttctagcctgttctcgaactcttggattttattccataggattactgtaaattcatggtagccagagttgctcagcccttgttaaaaggtcatatataccccgcatgactaaaaaaaaaaaaaaaaaaaaaaaaaaaaaaaaaaaaaaaaaaaaaaaaaaaaaaaaaaaaaaaaaaaaa

SEQ ID NO: 6153 - DNA, 932 bp, Glycine max
agatagatatccttcacaacacaaccttatcctttggaagttggaactcactcttaatcctatgtcttaactcttacaatcctaattcacacccctttcttctcaaaacaaaacatgtctcacaccccaccctacaaatcctgaaccatcaacacaacatcataatggttgcaactgccgctacattgttcaatccacaacatcttcacacgcatggtagggttaacatatgggcaccaagaaggattagctacctaagcggaaatgtgaagtctaagttcccttttcatagatcagaaattcatcatcaggttcattacttttcacacattgcacccctaggtgcaacctttaaggaacccaaggggtttggacctaccccaaggaaaatgaagaagagcaagaagatgaaaaaggactatggagaagatgaagatgaagaagaagaagaagaagatgaagaagaagagccagacaggggagttattcctgaagtagtgaccaacagaatgatgaacaggatggcagtgtctgtagggattccactgggtgttgggcttttgtttttcccattattttactatctcaaggttgggttgaagattgatgtgcccacttgggtgccattcattgtgtcattctttttctttgggtctgctctgttgggtgtgagttatgggattgtgtcctccagctgggacccactgagagagggttccttttggggttggactgaagcccaaaagaattggcctgtgttttggcagtcctttagaggtggtggtggatcaaggaagaattagcccattctttctttagcctttaaatggttttttgttttcatgtatattgtatcttgccagcatttagagcttgtttggcattagttataaaacatctctaaaattctctccaaaaaaaaaaaaaaaaaa

SEQ ID NO: 6154 - DNA, 1876 bp, Glycine max
tcagctacgtaggccccccccccgagttttttctgcctcctagaataacacacattcatgaacaaaagactttgttgggatccatattggcaataatgaaacagcatttccagagtcttcatattgcttctggtgtagaacctgaggatggttcaattgaaattattgaagcaacaatcgaaagagttcatacgaggcttgaatctattcctattgcttcatctattaaatcaccacctagacctgatacctcaccaaacatgggggaggaagtgccacaggatccatcagaacaacaaatattgatgtactgtaatgacatcaataatggagggagtcttggtgaaaatgcagccagaaacattgatcacatgccctccttagagactaaaaacataaataaacccttagagaggaaacgtggaaaaactgagaaatcaattagtcttgaagtcttgcaacgttattttgctgggagtctaaaagatgctgcaaagagccttggtggcagcatgggatatcccgttggccatctagaaagatcaacaaggttaaccgttccctgtcgaagctcaagcgtgttattgaatctgtccaaggtgctgaaggggcatttggtttgaattctctgagcaaaagtccacttcccattgctgttggttcctttcctgagccttctactccaaacaagttcagcctgccagcctcattaagtattaatccatcagagcctcagatcaaagagaatgaattgaatgcctccaaagcattagaaacaaacagtcaggctgtaatggaagaagatcgattgctaggaggcaggacaccacatcttgagaaagtaattaacgataaaggtaggcatactcgagaggttgggaaagaaccaaagaggactagaactgggagtggctcaagtgaggatagcacaaatcctacttctcatggttcatgccatgacagtcccccaaatgaaagttcaccggtgaagaatatattcattacttccaataatgatcaatgtgctgggctaaagagatcaccagagtcaacattgcagctaactactaatacgccaaaccggccagctgcttaccctatgcccgactttgtggccgcagaacttcaagagccatttggtgggatgctaatagaggatgctggtagttctaaagacttaagaaatttgtgtccttcagtagctgagaccattttggaggatatggttccagaagcttgtgggactaatattccaggtccagatttgtctcctaagcaaagcatgggtactcctaacaaagcagtgacaccttttgtagctatgaaagaaatgaagacagtgacaatcaaggcaacatacagagaagatatcataagatttcgggtctcgttgacctgtggcattgttgaactgaaagaagaagttgccaaaagattgaaactagaggtgggtacatttgaaatcaagtacctggatgatgatcacgaatgggttttgatagcctgtgatgcagacctacaggagtgcatggatgtttcaagatcatcaggaagcaaaataatcagggttttggtgcatgacataacttcaaatcttggaagctcatgcgagagctcgggggagtgagaactggctgtatataggttgagtctctactctaattatataggttcttgtggtgtttaggacaataggaaaaagaaaataggttttggttatgatctgctctaattgtaagaaacttgagaagttgagatcagataaaaggagtttgaatctttggtatcactcaaaagtaagttcctgattcatcatgaggattctttggtgacacataatgtggtcagcttttaaaataaaatcatgttgacattc

SEQ ID NO: 6155 - DNA, 1119 bp, Glycine max
  misc_feature (38)..(38): n is a, c, g, or t
ttattttttttttttttttttttttttttttttttttnttttttgggaaaataaatgcaattttcatttcattatcatgtccagtaaaaccattccaacaaaccaaatgctaccgtaatgacttttacaacatctttaattcaagtgcgtaggtgactcaccagcactcagacatatactaaattggccttatgtgacccgacaactatgtaaattgtaaaccactgcacccgaagatactattttaaccaagagattaaaatctatttaggcatttactttaaattattgcagtttttaatcccccctcccttctctctcttcgaactatacatgacttccttacacggtgccgacgcccatttatcacgggacaagaatatcacctgctacagttataatattacatggggattcaacgaaaagtgcattgctcttcacaaaaaccagtgctatgatttaggaagtctgaatatatccatgagaccaagcctcttcccatattctatagctaaccaggccacaaaagataagtatgccaaaagaaaacaagcgcgcctgatgagaacagcattgacacgccaagaaaatatccatgttgtgaaagattgatatagcgaaggcagaagtagttgaaggaacctaataaaggttatggagatcaatgaagttaagaacccagttacaactccagctaaagtttcccacctccaatgcttggtccttcctctactcgaaaaccaggaaattaccatctccattgccatggtagaatactgtctactcttctcaagagtagactgctcgtgggcatcacagccaaaaagattatcttgatgtaaatgaactttggaattgccagatgtgtaccagcaatcataactctcgttgaccttaaatttatattgtgtcaaccatgcagcaccaaaattaggcctgcaataaagaggaagggcctcattgggagcctcagcaaatgcaacttgtgtctgaccagaaaagtgatctttatattccaccttgaatactgaagcccaatagtaatcataacggcagcgaaatttgcttctttcaaaatgatggaacacctcgagccgaattccgagcttacgtacgcgt

SEQ ID NO: 6156 - DNA, 1061 bp, Glycine max
aaaagaaaaaaaataaattaaaaagtggctttctttctttgctaccgcatccaattaaacccaaactggacacaagaaaggagcgagatagcgaggaaatttggttcttacttcttacccgcagacagaggaaggaagggaaatagatggaagctgtgtgtggaagtggaagcagtgtttgggtcacatcctcccttacacgctcacccaagatcacactccctctattccgcgccagttaccagcacctaacagcatttccttcacaatcccttcttttctcctatcacccttctcgctatgctaatgctagaaccctccgcgccagaacctcctccaaacccattttccttccccacttaattgcttctctggaacaagttgaccagacttacattatggtgaagcccgacggcgtccaacgtggcctcgtgggagaaattatttctaggtttgagaagaaggggtttaagttaactggcttgaagctcttccagtgctcaaaggaattggccgaggagcattacaaggacctaaaacaaaagtcatttttccctaagctgattgactatattacttcaggtcctgttgtgtgtatggcttgggagggtgttggagtagtggcatcggcacgcaagcttataggggctacagatcctcttcaagctgaaccaggcacaataagaggagaccttgctgttcaaacaggaaggaatgttgttcatggcagtgacagccctgagaatggcaagcgtgaaatagctctatggttcaaggaaggcgaagtatgcgattggaccccagtccaatcaccatggctgagagaataataaaccacagatgcccaattagaatgattcttgccgtttctaggttcaataactgcattaatcgagtttaaacagtaactcaaattttgtaaaattttgctttttgactcggattctccaagcctattcctggcattacattttctgtttctatcagatttgaatgggtcatgcgatgttttgttttttttttttaaaaaaaaaaaaaaaaaagggggcggccgcaaaaaa

SEQ ID NO: 6157 - DNA, 1437 bp, Glycine max
gggctgcaaaggctgctgaaaaaggtgaaggaagtaaggcatctggaactgcggcttcaacgaatccaaaaccagctaaagctgtaaagcctgcacagaaagttgataatgcagcaattgcagcctctgaaaagaagggaggtgagattccaccagaaaaggatagaaagaaagatgctcctcaaccacgcttgcagtatgacgacaagagccgagtggagaaagctaaacgtccggctctgctgcgacaggcccccccccggaatagagttgagttgttcaggcatttgccacaatatgagcatgggagtcagcttccagatctcgaggcaaagtttttccatctttctccagtgcacccttctgtttataaggtgggtttgcaatatctaactggagatatagctggtggcaatgctcgttgtattgcaatgcttcaagcattccaagaggccatcaaagactacaaggttccacatgagaagactcttgtgagagacttgacagcaaaaattagtagttatgtatcatttcttattgaatgtcggcctctgtcaatcagcatgggaaatgcaattcggtttctcaaaagtcggatagccaagctacctttgaccttgtctgaatcagaagcaaaagcttctctccagtcagatattgagcgttttataagtgaaaagattatacttgccaacaaggtgatagtgaagcatgctgtcaccaaaataagagatggtgatgttcttctaacttttgggtcttcatctgctgttgaaatgatactattgcatgcacatgagttgggaagacagtttcgtgttgtggtagttgactctcgtccgaagcttagagggcaacttttacttcgccggcttgtggagaacggtcttagctgtacatacactcatataaatgctgtttcctacataatgcacgaagttactcgagtttttctgggtgcatcagcagttttgtctaatggaacagtatattcaagagtggggactgcatgtgttgcaatggttgctcatgcattccgtgtacctgtcatagtatgttgtgaggcctataaatttcatgaacgggtacagttggattcaatatgctcaaatgaacttggcaatccagatgtcatttcaaatgtactgggtagagaggatgtcaaacacttggatggctgggccaatattgaaaatctgcaacttttaaatctggtttatgatgcaacaccttcagattatgtttcaatgattgtcacagattatggcatgctaacagatcagtggacataaattgaaccaccacaccagatgtaagtttgtggctctgaaaataaatattttttttgtacgttttgtgatgaaactttagatttgcctccaaaggtgttaatattagtcattaaataaaactcccatcagattaaaataatttcat

SEQ ID NO: 6158 - DNA, 578 bp, Glycine max
tacggctgcgagaagacgacagaagggatagtaagagtttgtaatattattgtattgtagtagtagccatggggactttcaatcactatgtgattgttaagttcaaggatggtgtggctgttgatgaactcattcaagggttggagaagatggtctcggggattgaccatgtcaagtccttcgaatggggaaaggacattgaaagtcatgatatgctaagacaaggtttcactcatgttttcttgatggcattcaatgggaaggaggagttcaacgcatttcagactcacccaaatcaccttgagtttactggagtattttcacctgctattgagaagattgtggtgctggatttcccatctaaccttgtgaaagcaccagcaagatcctcaacttattcaagcaaataaaattttccatttttaaagtgcatgcatgtgtgtgcatctgctatttgtagtctgttatggttgttcctagctagttcctaaaagctcttatgcaatttcaacttgataaataagctcttttttttcctaatttaatggaaaggtcttgcattgggatttgttaatact

SEQ ID NO: 6159 - DNA, 2561 bp, Glycine max
gtacgacctgcggttcagctacgtaggcccccccccccccttttgagtcggtgtgcagcagggagctctgccgcctccaacaaaacagagttcagaacacaaaccctcgaaccgaacgtttttgagggttgatagagcacgatggttcagtacaattttaagaagattaccgtggtgccaaatgggaaggatgtggtcgacattatcctctctcgcacccagcgtcagacaccaaccgttgtgcacaaaggatatgcgatttcacggctgcgccaattctacatgcgcaaagtgaagtatactcagcagaattttcacgacaagctctccaccataatcgacgagttcccccggcttgacgacattcatccattctacggtgatctcctccatgtgctctacaacaaggaccattacaagcttgctcttggccaaatcaacactgccaggaatctcattggtaagattgccaaagactatgtcaagttattgaagtacggtgactcgctttaccggtgcaagtgtcttaaggttgctgctcttggccgcatgtgcactgtgatcaagagggttggcccgagtttggcttatttagaacaggtcagacagcacatggctaggcttccctctattgatccaaatacgaggactgttttgatctgtggatatcctaatgttggtaagagctcgttcattaacaagattaccagagctgatgtggatgtgcagccctatgctttcactaccaagtctctctttgtgggtcatactgattataaatacctgaggtaccaagtaattgatacgccagggattttggacaggccttttgaagatcgtaatattattgagatgtgcagtatcactgctctagcacatttgagagctgcaatcttgtttttcttggacgtctctggatcttgtggttacagtattgctcagcaggcagcgctgtttcacagcattaagtctttgtttatgaacaagccgttgattatagtctgcaacaagactgacttgcagccactggaggggatatcagaggaagacatgaagttggtcaatgagatgaaagctgaagccttgaagactctagttggtcaaggaggtgagcctacagacaataacagtgtattgttgaccatgagcactttgacagaagaaggggtaattgctgtaaaaaatgcagcatgtgagaggttattggatcagagggtggagataaagatgaagtcaaagaaaattaacgactgcttgaataggtttcatgttgcagtaccaaagcctcgtgaccagaaggaaaggcctccatgtattcctcaagcagttttagaagctaaagctaagcaagctgctgagaaggaaaagagaaaaactgaaaaggatctggaggatgagaatggtggggcgggtgtatactcaatgaacttgaggaagaattacattttagccgatgatgaatggaaagaggatgtgctgccagaaattttggatggacacaatgtgtatgatttcattgatcctgatattctgcatagggttgaagagttggaaagagaagaagggatgagacaggaagaagctgaggatgatgattttgagattgatggaactgaattgacacccgagcagcaagcagctttagctgagatcaggaaaaagaaaagcttgctcatccagcagcataggatcaaaaagagcaatgcagagaatcggccaactgttccaaggaagtttgataaggacaagcagttcacatcagaaagaatgggaaggcaactgtcatctttggggcttgatcccagtttggcaattaagagaatgcacagcagatctgtctctagaggtcggaaaagggatagatcgcctgaaacaagaagtgctgatggtatggatactgatggtgacacacctagcaaaaaacagcgtctgagtagatcactgtcacggtccaggtcagtgtcacgcccaccacatgaagttgtgcctggagaaggcttcaaggattctgctcaaaaggtcaaggcaatcaaacttgcaaagaaatctgtcaagaagagaaacaaggatgcccgtcgtggagaagctgatagagtcatacctaatctgaagcccaagcacttgttttctgggaagcgttccaatggaaaaactgagagacgctaggacaggggatgctgtttaatgcattttagaggacacctgttggcatttttcagggctgccaaaaaaaattgttatttaatgtaagtgttttgttggagtttaaggttctgtgctggcaacatagtttacttatacatctctgcattttattattgttatcaaacttgtcattctataagttgcaactttacagctttctttgaatcaaggaagctgctgtttgaattttatgactcaacattgagtgctgttattggaacttggaagttagttccttctagcttgattgctctttcaaaaaaactcccacatgtggttgactttgttctagtatattgttcaaactggtttaaatattgtatgcaatatacaataaaaggctcacgatataggat

SEQ ID NO: 6160 - DNA, 870 bp, Glycine max
aaatataaataaatgaatggtcagcatgaccacagcataagtgtagagagagagagagagagaaatggcttgcaggcaattgtgggcttcaagagctgcctcttacctgaggatctctgtgtttcacagaggcttttctaatgttattaaagatttcaagtatgttgattctcatgagtgggtgaaagttgatggaaattacgcaaccatcggcataactgatcatgcccaagatcatttgggtgatgttgtatatgttgaattgccagaagtgggagcagctgtgacacaaggaggtagttttggtgcagttgaaagtgtgaaggctactagtgatattaactctcctatttcaggaaaagttgttgaagtcaatgaagcgcttaacagctctcctgctttggtcaattcaagcccttataaagatggatggataattaaagttgaaataaatgacagtggtgaactaaacaacttgatggattcagaacaatactccaagttctgtgaagaagaagattccaagcactgatggtcttgccaagatctttcagcactctccaatctccatggtgtagatcatgtttttattgggaaagctgctaaattacttattcctttttctccttgtgtcatggtttgaccactgctctatttttatttttcataagcttctgaaccagtgggatgatatttttcactctttgcaatggaaaaatgaaattgataaagaggtaaaatgatgatgatgataacaataataacttctagttttctttcaaagttatgctatttttgttagatgatgtctataatggtttgataaataagatggaccgtagttatcaagaattgagatttcagtttccc

SEQ ID NO: 6161 - DNA, 1306 bp, Glycine max
tacggctcagctacgtaggcccccccccccccaaaaacacaacaaaaatttacaagcaactatggcttcaagcaatggccgaaaagcaactgagatcttccaaggacaagctatcttatacagatgcatgtttgccttcctagattccatgtgtctcaaatcgattattgagcttggcataccagacataatccacaagcatggccaacccattactctttctgagttggtgtcaattctgaatgttccaccagctagagttggtcacgtgcaaagtctcatgcgctaccttgcacaccatggattctttgaaagactaagaatccatcttgaaaaagaatcttatgctctcactgctgcttcagagctacttgtcaaaagcagtgagctttgtttaactccaatggttgagaaagtgcttgacccaactctctcagcttcattccatcaaatgaagaagtgggtttatgaggaagatctctcagtgtttgatatctccttaggctgtagtttgtgggattttcttaacaaaaacccttcatacaatgagttattcaatgaggcaatgactagagattctcaagtgagtaacttggcattgagagattgcaagttggtgtttgagggactggaatccattgtggacgttggtggtggaactggagccactgccaagatgatctgtgaggcatttcctgacttgaaatgcgttgttcttgaccgtcctcgggttgtggagaacttgtcaggaaacaacaatttgacatatgttgctgggtacatgttcaaaactattcctaaggctgatgctgttctgcttaagtggattcttcatgattgggctgataaagattgcagaaagatattagagaattgtaaagaagctatttcttcaaataatggcaaaagaggaaaaataattgtcatagatatggtcattaacgaaaaacaagatgagcaaaaaattactgaactaaagctcctttgggatgtaagcatggcatgtgcattcaatggaaaagagagaaatgaagaagaatggaacaaactcttcatggaagcagggctccaagactacaaaatatctcccttgaccgggtatttgtctcttattgagatctatccttagacaattatgtgttgatttatttaattattagtttcatgttatgaactgaatgatgttgtagtaatatgtatttgatattagttttaaaacttatgaatatggaagaactagtgtggagcaaaggcataggataataaaatctgttggggtttctctctcaaaaaaaaaaaaaaaaaa

SEQ ID NO: 6162 - DNA, 658 bp, Glycine max
cctctttgcatgatcatggttgctgctttgggctccccttatattaggagaactgctccatcccggaagtatcattggagcgcattgtgttcccagtggggctttactcggttgtgtggggcaaagccaaagattattcagaacccaaattcccatcaccagatgcagaagacacagaatcactgccaattactgcaacttccaaaattgatattatttctgggaatttggaaaaacaaccatcaactgatcagaaattagaggagaccaacaaagtgggggaagaaaaagagttgaatgttgtgaaggtttaattgactaatcaacgattccttgtccacccacaatgttcggagaaagtgaagtctcacgtgtgcactaccagaaatgcattgcctcaagtcaaatatcaatgtttacaaagaatgagtctaggcaacttaattcctaagattaggccatatagctaccaatagtattcctctctctctctctctctctctctctctctgttgtaattagttttgaacaagcaattacctacgttctgtttgttagagtagataatgtatttcattacttctgtaacctatgtatgattaaggcatgcagtgagaattagtatgaatgtttgctctttaaaaaaaaaaaaaaaaaa

SEQ ID NO: 6163 - DNA, 2051 bp, Glycine max
gttccatataaaagcaaggctagaacacttgcaagttcgaaagagccatttttatttatcagtcaccgaaacaactatggatacaatcaagtccttcaagggctacggcaaagttgacgagttggagcagcaagcctatcagaagaagacacgtaagcgcctcataataatcacagtctcttcaatcgttctaattgcggtgatcatcgccgctatcgcaggggttgtcatacacaagcgcaacacctcatcatctccctcatccgactcgcccccgcaaactgagttaaccccggccgcgtcactcaaagcggtttgcgacgtgactcagtaccctaactcgtgcttctccgcaatctcctcgttaccggattccaacactactgatccggagctcctcttcaagctctctctccgcgtcgccattgacgaattatccaagctctcgagctttccttcgaagctccgcgctaatgcggaacacgacgcacgtctccagaaggcgatcgatgtctgcgggaacatttttggcgacgcgctggaccggctcaacgactccatctccgcgctcggaagcagcggcggcgccgggaagattatctccccggcgagtgttagcgacgtggagacgtggatcagcgccgcgctcacggaccaggacacgtgcctcgacgcgctcggagagctgaactccaccgccgcgagcggcgcgttgcgcgagatcgaaaccgccatgaggaactccacggagttcgcgagcaacagtttggcgattgtcacgaagatcctagggttgctgtcgcagttcgcggcgccgattcaccaccggcggctgctaggatttccggagtggctcggggcggcggagcggaggttgcttcaggtgaacagcagcgaaacaacgctggacgctgtggtggcgcaggacggtagcggacagttcaggacgatcggtgaggcgctgaaattagtgaagaagaagagcgagaagaggttcgtggtgcacgtgaaggaagggcgttacttagagaacattgatttggataagaatacgtggaatgtgtttatcttcggtgacggcaaggacaaaaccgtcgtcgtcggtagccggaacttcatggacggcacgccgactttcgaaaccgccaccttcgctgtgaaaggcaagggattcattgccaaagacataggttttgtgaacaatgcaggtgcatctaagcaccaggctgtggcatttagatctggttcggaccgttctgtgttctttagatgctcattcaatggcttccaggataccctctatgcccattccaatcgccagttctaccgtgactgtgacattacaggcaccatagacttcatattcggaaatgcagctgcagtgttccaaaactgcaaaataatgcctagacagcctctaccaaaccagttcaacaccatcacagctcagggcaagaaggaccgaaaccagaacactggaatcataatccagaaatcaaaattcactcccttggaaaacaatctcacagctcccacataccttggtaggccatggaaagatttctccaccactgtgatcatgcaatctgatattgggtcattcttgaagcctgtggggtggatgagttgggtccccaatgtggaacctgtaagtaccatcttctatgctgaataccagaatactgggcctggagctgacgtgtcacagagggtcaaatgggctgggtataagcccactctcacggacggggaggcagggaagttcactgtgcagtcctttatccaaggccctgagtggttgcccaatgctgctgtgcagtttgattccaccttgtgatttttaatactaccggcctcatagaaagatatcaactgctaatcatatttttacatgtcttttaatcacactcttgtaacatgtattacactctatacgcatttttttgacctacttttgaatggtttgtaacattcttctagaaaatctcttcagaaagatatgtcaaaatttcaaatgaaaaaaaaaacattaaatagatttttttattcgt

SEQ ID NO: 6164 - DNA, 1761 bp, Glycine max
atcttcatcttcaacttgctatcttcactaacatgtcctctttaacgttcacaacggaggtagcatccagcttcctcggcctcgcttatcacaatcccaaacccttcactctctcactccaaaccactcttctccctcttctacgcagaacaaccactcattcccgatcgctaacatttcctctccgaccctctcgccgcttcttcgttacctccgccaccactgcacctcctcaatccgaggattccgacgtttccaccgtcattcctcccgacaatcgcataccggcaaccatcatcaccggctttctcggctccggcaagacgacactgctgaaccatattctgaccgcggaacatggaaagaaaattgcggttattgagaatgagtttggtgaaattgatatagatggttctttggttgctgcgaaaactgctggtgccgaagatattatgatgttgaacaatggctgcctttgctgcactgtcaggggtgaccttgtcagaatgatttccgaattagtcgcaaagaagaaaggaaaatttgaccatattgttattgagactacaggtttggcaaatcctgcaccaataatccagaccttttatgcagaggaaaatatttttaatgatgtcaaattggatggtgttgttactctggttgatgcgaagcatgctggttttcatcttgatgaggttaagccaaaaggtgtggtcaatgaggctgtggaacagattgcatatgcggatcgtataattgtaaataagactgacctagttggtgaatcagacattgcttctttggtccagcggataaggaaaataaacagcttggctaacttaaagcggacagagtatggaaaagttaacttggattatgttcttggcattgggggctttgatttggagaggattgagaatgccattaatgatgaaggtgcaaaagaagatcatgaccacagccatgaccatgagcatgagcaccatgaccatgatcatcaccaccatgaccatgatcattcccatgaccacaagcatgaacaccatgatcaccactctcatgatcatagtcacgatcctggtgtttcatctgtcagcatagtttgtgaaggaagcttagaccttgagaaggctaacatgtggcttggtaccttgttgctggatcgtagcgaagacatttataggatgaagggacttctgtctgttcaaggaatgaatgaaagatttgtctttcagggagttcatgacatgtttcaaggttcacctgaaaggttgtgggggccagatgaaccaaggataaacaaaattgtattcatagggaaaaaattggatgctaaggaattggaaaagggattcaaggcctgtttactatgatactaagaagttcactgcagtgctttaattatctctctttcggccaaatgatacacgttgaagatagagtgtgcctatataccatgtagaactctgtactactgacggatccaatattatagtgaaaaatgttccatttctagaataccttcagtctttgatgtggcttcaaatgtgattgcattagttttaacgatttttcttggttgtttcaaacagtcaagtgttgttttaagagcttgaactatgttaagaaaattcaaccgagaacatcgaacatcgaacatgtacaaatcaaaggaccctatacttttcgatgtcatgactataaaagttcccttctaattatctagtcttctacttttaaacaccatgcaaaatttcgtac

SEQ ID NO: 6165 - DNA, 670 bp, Glycine max
gcagtaagttggatacttttaataatattttataatcaaaactatataagtcacatgaagggtatcagttttaaagtttcaacatacaaagagagttttcaacataaagaccggaaggtttttttttttttgtgctctaaaagaactctaaaatttaaagtttaatatttaaattatcaaagtttcaaaaagatgcatatgacctctatttatatcgtaagtataagattgcataaaggggtaaggggttgatcaattgagagaaaagtgcaagtttgaatccttagtcctatctttctcctctttgttcgggtgttaagccttcctttccgcagctgggacagctctttagcccaaatccttggcaatcaaaacatttccaccgttcaaatatatttccgttctttttattctttcccgtccccttacatccaggacattcaattgccccctttcctccgcaacttttacaacttttcagtaacgagttaagtgaaaatcctcctccagactttgaagcaaaagtaatgactagagtgtttcgtctttggtgaagcggaggaggaggaggaggtagaggagtcaagcccttgcagcaaacacagatatgatgcatttcttcctcaagtggataggaataggatggataacaatataacaactaacgtgc

SEQ ID NO: 6166 - DNA, 2699 bp, Glycine max
aattcggctcgaggtagatctatgctacacagtggtagtgcccttattttctttgtcctaatctttaagatcctcagatgtcaaacaaaaaaaaaccaacaacctcttcctttgtgtttgtgagctcaagttgaagtttttagttcgaagacttttactctcttcactgttgttgtgttgtgcttcttctgggaaggttctggggttcaacggattcccccccccccccccaagacaagaccaacaagtttctaaatttagatagtgtcgagagatatcattgggattggataagtttctagaaatggaaagttccaagaacaatagagtggagaagagagggtacgagctagttgaggagggtgatgatgcacaacaccatcttacacaatcaaagaaaccaaaactacccggtttagccagtgtgattgtggaagctttaaaggtggatagtatgcagagactttgctcatctttggaacctcttctcaggaaaattgtcagtgaagaagtggagcgtgctttggcaaaattgggccatgcaaaactgactgaaagatctccaccaccaagattagaaggaccagcggcaaagaatctgcagcttcagttcagaacaagaatgccacctcatttgttcactggtggaaaggttgagggagaacaaggatcagcaatccacgttatgttgatggatcctaacacaggcagtgtcgttcaagttggaccagaatctgttgctaaattgaatgtggtggtacttgaaggtgactttaatgaggaagtagacgatgattggacaaaagaacactttgaaagccatgaagtaaaggaacgtgaggggaaaaggccacttctaactggagatttgcaggttagcctaaaggaaggggtaggaacctttggtgatcttactttcaccgacaattctagctggataagaagcagaaaattccggcttggtgttaaggtggctcctggttattgtgaggagattcgtattcgtgagggaaagactgaagccttcgctgttaaagatcatagaggagaattgtacaagaaacactacccacctgctttgcatgatgaagtttggagattggatcggatagctaaggatggtgcacttcacaaaaaattgattcaggcaaaaatagtaactgtagaagatttcctacgtcttcttgttcgtgagccacaaaagttaagaagtatacttggtagtggaatgtccaatagaatgtgggagaatactgtggagcatgccaagacatgtgtcttgggtggcaagctctttgtatactacactgatgaaaccaatagtgctggcattgtgttcaacaatatatacgagctgagaggcctcatttctgatggccaatttttctctttggaatcacttgctccaaatcagaagatgtctgtagattccttggtgaagaaagcatatgaaaattgggatcaagttgtagaatatgatggaaaagttttaaattctcttgctaattcgaaaaagggatcaagagctgtggccactcaaataatgcaccataacagtttccaagagcagcagtatgcctcagcaaagaacaaggtgtcatatgtctcctctgaaccaaatcaacatttgcaaataacaaataactactcatccggtcccggtttgaccgattatccatttgggagatccgacaatcagatggtaggaacgtctttaactgactctcaaatagcattgcctggcagcatgaattacatgtctggtgaaaatcatgaaattggtagtacttatttttccggagattggtcccggccaagaaatggacaagggttggatgacattgtcgcagaagaacttcgtcttaggagttcagagatgttggagagtgatgatatgcagaggttactcaagacaattaatgcagaagtgaacaggtcggctaatcttggtcattctaacgagggttgttacacctatagccttcagtatgagcctcagatgtatcagacattcaacgaggatcagggaaagtcttcagggaaggctgttgttgggtggcttaagctcaaagctgctttaaggtggggcatatttatcaggaaaaaagctgcagaaaggagagcactgctcactgagttgaattgagttaaaaggcttgaaagtgggacattttcaacttatttcaagctaataggaaatagcttgctgatattgcttttggaatctaaccaaaagaaatccattacattgcatagaagaagtctttgagaaagaaaaaaaaagtgaaaaaagttgtgaagatgtgacatttcaaggtttcaacagttggttgaaggtggaactaatgcataatgtgtcaacaaattcagaaactgcaacctatgacatgcttacagccttaatagaccacacagcttgtgagattaaacatcaggcagcactatcttgtaacaggctctcttgctcttattgtggcattatttccattattattgcgtaatttaattatgaattaatttcatttcttactttttaaattactgatcagaggtttgtatctaatgtttcttttttttttgttattgttttttttatactgtatcatgacatatttgtgagcacttacctcatgtaataaaataatctatagtgaagaatattagacttatgttcataggacaaaaaaaaaaaaaaaaaa

SEQ ID NO: 6167 - DNA, 1453 bp, Glycine max
  misc_feature (1448)..(1448): n is a, c, g, or t
tggcattgatttttgtttcttcttcctccctcgccttcgtgcagatctgtccgtgtcaagcaatttttctacagtggttagttttgagctactgaatttgaaccatgagctttgtggtgcatagtttgatttttaggctttctactgtagtactaggctcactcttaatctgtgtttctctttaggtgaagaacccggcggaatcttcaataccaaatctttctttttcaataccttcagtcttctcaacgcctacagcagatcctttgcctaatcacaattatcaccatcttcccaactctactccaacaagatgggcacatcgatctccagcacaccctctgttgagacagatttctgatagtcgaatcatgggtctgaaatcgccagacaactcaatttctgaaggtaggccatcatttgtactctcaacttgcagcaatgaaatggcagctggatccatatgcggatcatctgatggctggtcaatgcgcaccttttctgagctggttgcatcatcacaaagggaaaggtggtcctttgatagtgagtgttttggatctggccgtcacaagataagtggatccagtagcaggttctcgtattctccctccatggaactacaatcttgtggggcttgctcaaagctattgaccgagagatcaacatggagcaaccagaagtttattgccaacagtgacctctcagttgttgctgtactagtctgtggtcattcatatcatgcagaatgtttagaggctatgacatcagaggcagataggtatgatccagcatgtccaatttgtatggttggagataagaacttgtcaaagttgttgtccagaaaaggtcttcgggctgaatcagagatgaaggccaagaaccacaagatatccagaaaccgtgtagttgatagctaccttgatggtggttttgatgtttttgatcgtcaaaaagatatagatttgagaggaaaagtgtcaaaaatggaacctagctgcagtgcaaggagctcatttggaaagcctttcttgaggagacacttttcacttggatcaaagtggagccgatccctgtccgagaatgattctgccaggaagaaaggcttttgggcaagatatcgttaagatttagttccatttgctgtaagagtcaatcattctctaattatagttgtaataacaccatcaatttagaatgaatattttctatgtagcctaactttactgataactttgaatgctttaaaataattaatttttacttttgaccagaaaaaagaaaaaaaaaaaaaacataattaagtgggtcggtctatgtatatgcccctttcttcttgaatgtacgttttcttcttataaaaacatctggggggggggccgtatacaaacttactcttatatgagtatattattccccgctctacttgccgtggtgttaccactacngaagg

SEQ ID NO: 6168 - DNA, 2543 bp, Glycine max
gaagacgacagatgggggaagcatttagtgagagtgagagcgatagcaaaaacagcaatatcttcttccttccctaagcctaaaaataaaatatcttgtcattcaattccactcacattcgccatatcgtcttctcccatggccgccaccgatgaatccctccgcaaatccctcgccgagaagcacgccgcagtggaagcccaaggcaacgccgtccgcgccctcaaggccgccaaagccgccaaacccgaaatcgacgccgcaatcgaagccctaaacgcgctgaagctcgaaaaaagctccatcgagcactccctcctcggcggctccgacagccgcgaggccttccgtcagtccgtggtgaacacccttgaacggcgcctcttctacatcccctccttcaagatctaccgcggcgtcgccggcctcttcgactacggccctcccggctgctccgtcaagtccaacgtgctctcgttctggcgccaacacttcgtcctggaagagaacatgctcgaagtcgattgcccctgcgtcactcccgaaatcgttctcaaggcctctgggcacgtggacaaattcaccgatctcatggtcaaagacgagaagaccggcacgtgctaccgcgccgatcacctgctcaaggacttctgcaacgacaagctccagcgtgaccttgcgttgtcttctgataaggttgcggagcttaagcacgtgcttgccatgctggatgatttctctgctgaagagcttggtgccaagattaaggactatgggattgtttctcctgagactaagaactctctctctgatccctaccctttcaatttgatgtttcagacttccattggtccctccggcttcagccctggctttatgagacccgagactgcccagggcattttcgtcaattttaaggatttgtattattacaatggcaacaagcttcctttcgctgctgcgcagattggccaagcgtttaggaatgagatatctccacgacaggggcttctgagagtgcgggagttcacgttggcggagattgagcactttgttgaccctctagataagtctcatcccaagtaccctgaggtagctgacttggagttcttgatgttcccgagggaggagcaaatgtcgggtcagtctgccaagaggattcctcttcgtgatgctgtttccaagggaattgtcaacaatgagacacttggttacttcatcgggagagtgtatctattcttgacgcgtcttggtatagacaaggaccgattgaggtttaggcaacatctcgccaatgagatggcccactatgctgctgactgttgggatgccgagattgagtgctcctatggttggattgagtgtgttggcattgccgatagatctgcatatgatttgcgtgctcactcggataaaagtggtgttccgttagtggctcatgaaaaatttgcagaacctaaggaagtggagaaattggttataactccagtaaagaaagagctgggtctggcattcaaggggaaccagaggatggtggttgaagcacttgaggcaatggctgagaaagaagctttggatatgaaggctgctctggagtcaaaaggggaggtggagtttcaagtgtgtacacttgggaaaaatgtgactattaagaagagtatgctgaccattcaaaaggagataaagaaagagcaccagcgagtttttacaccatctgtgattgaaccatcatttggaattggacgtataatctattgcctctttgagcacacattctacacgaggccaagcaaagctggggatgaacagttaaatgtatttcgtttcccttcacttgtagcccctattaagtgtacagttttcccactggttcagaatcagaagtatgaggaggttgccaaactcatttccaagtcattgactgctgttggaatttcacacaagattgacactacaggtacatcaataggaaaacgatatgcaagaacagatgaacttggcgtgccctttgctatcactgtagattcaacatcatcagtgactattcgggagagggacagcaaggatcaagtgcgtgttgatgtggataaagctgcctctgttgttagggaggtgactgaaggccagaggacatgggaagatgtgtggtcaacttttcctcatcattcctctacatctgcagatgaatgattgagttttattagtcaccatctaggttgacccatcatagttttctgttgcaaaattgtgttttttgagtagcgaatcaaactacagggatattaccagttgtcaactattagatacccatttcttttgtgcaacatatgcagttgtttgtagtcatagatatgttattttgagaaatttctggtttgccaattgcttctccaggttttcctcgtgggggttgggtcttactgtctatcctagctgatatcagggggaatccgaagattatttaataaataatgtcttttttgctgtggattttaggctacgtggcttaaccaaaagatgtttggtttgggttaaaaaaaaaa

SEQ ID NO: 6169 - DNA, 1225 bp, Glycine max
tcagctacgtaggccccccccccgagtaaaaaaagaagaagaaaatccaggttatctaatcatctgcagtaaagcaagtgaagtcgtgcacttccccaacactcacaccatggatttgctctcaatctctccctctcaccctttaccttcttccattcgcaccctttcctcaaaccctaagtcccccatttcctcctccttcttcacccccaaaccccattcacgcttctccaaaccctccaaaacccccgcaaggtgtgtcttcacggcctcgccaatcccctccaaaatcccaaactttgggtctcaatctcggaacccgggcctcactttcgagctctccgcgccccagacgccttcgacggcggcgagaggcgcggagggcgacgtgatggggctgttgctgagggagaggattgtgttcctcgggagcagcatcgacgactttgtggctgatgctatcatgagccagttgctgctgttggatgccctagaccccactaaggatatcaggctctttattaattccactggtggctctctcagtgctacaatggctatctatgacgctgtacagcttgtgagggccgatgtttccacagttgcactcggcattgcagcatcaacagcttctgttatacttggtggtgggaccaaaggcaagcgctttgctatgccaaatacacgaattatggttcatcaacctcttggaggtgctagtgggcaagctatagatgtagaaattcaggctaaagaagttatgcacaacaagaataatatcacaagaattatatcaagtttcactggacgctcatttgaacaagtgcagaaagatattgatagggataaatatatgtctccaattgaagcagtggaatacggaattattgatggtgtaatcgatagagatagcattattcctctcatgccagtgccagaaagagtgaaatcaacactaaactatgaagaaataagtaaagaccccaggaaattcctaaccccagatattcctgatgatgagatatactagctttaaatggttgataatgttatatccttgaattttatgttacggtgataacagaattcaacatttttgggtaaagcttgaggatgctggaacaaaccctgaaagatgtaggattgtcttaaaaaaaaaaaaaaaaaattaattgggcggccaccgaatagtgagcacgtaaacccggaaattaaaaacgaaccg

SEQ ID NO: 6170 - DNA, 1203 bp, Glycine max
catgttatctacaataataaaccaagtgaagtcgtgcaagttccttcttcactttcacgacactcactcacacaccatggatttgctctcaatctctccctctcaccctttaccttcttccattcgaaccctttcctcaaaccctaagccacccatttcctcctccttcttcttcatccccaaaccccattcacgcttctccaaaaccccaccaaggtgcgtcttcacgccggcctcgccaatcccctccaaaaacacaaactttgggtcccagtttcggaaccctacgagcctcaccttcgagctctcctcgccccagactccctcgacggcggcgagaggcgcggagggcgacgtgatggggctgttgctgagagagaggattgtgttcctcgggagcagcatcgatgactttgtggccgatgctatcatgagccagttgctgctgttggatgcccaagaccccactaaggatatcaggctcttcattaattccactggtggctctctcagtgctacaatggctatctatgatgccgtacagcttgtgagggccgatgtttccacagttgcactcggcattgcagcatcaacagcttctgttatccttggtggtggcaccaaaggcaagcgctttgctatgccaaatacacgaattatgattcatcaacctctaggaggtgctagtggacaagctatagatgtagaaattcaggctaaagaagttatgcacaacaagaataatatcacaagaattatatcaagtttcactggacgctcatttgaacaagtgcaaaaagatattgatagggataaatatatgtctccaattgaagcagtggaatacggaattattgatggtgtaatcgatagagatagcattattcctctcatgccagtgccagaaagggtgaaatcaaccctaaactatgaagaaataagtaaagatcccaggaaattcctaaccccagatattcctgatgatgagatatactagctttaaatggttgatagggttataattaaccttgaatttaatgttacggtgataacagaacattttgggtaaagcttgaggatgctgtaacaaaccctgaaagatttaagattgtcttatatttttgtcttgcaattttaattttatttcgtgtgggtgagtgaaaaattatggttcagctattgagaattttgttggttatcatt

SEQ ID NO: 6171 - DNA, 1690 bp, Glycine max
ggtccctcgctagacaaacaacagagtttatttctttttggttccttggttcacgctggctgcaaggcttgtgtttggtgggagcagcttctcaccgtgacgctgctctacgaagacgacgacaacctcgtgtgacaacatcaaataatgggaaaaggaaacatggaactcgagacaaacaaggtctatgactacgaggatgcacgaggggacgttgaagtcccagataccgctcatcagataagcactgattcatggtttcaagtggcttttatcctcacaaccggaatcaacagtgcctttgttcttggatatccagggaccgtcatggttcccctgggttggatcgggggtgtgattggtctaattcttgctaccatggtgtcactctatgcaaatgctctaattgcttatctccatgaattaggaggccaaaggcacattaggtatagagatcttgctggatttatatacggtaagaaagcgtataatctcacatgggttctgcagtatatcaatcttttcatgataaatactggctacatcattttggccggttcagccttgaaagctacttatgttctattcagggatgatgggctgctgaaacttccatattgtattgccataggtggatttgtgtgtgcaatgtttgccatctgcattcctcatctttcagctctgggaatttggctaggattttcaacagtcttcagcctggcatatattgttatatcatttgtgttgtcgcttaaagatggattacaatcaccgcctcgagattacgagattccaggagatggtgtaagcaaaatctttacaataattggggcatctgctaacctcgtgtttgcatttaataccggcatgcttcctgagatacaagcaacgattaggcaaccagttgtcaagaacatgatgaaagccttgtactttcagtttaccgttggagttctaccattgtacctggttgcctttacaggatactgggcttatggatcttccacagaagtgtatttgctgaatagtgtgaatggtccagtttgggtgaaggcttctgccaacatcacagcctttcttcaatcagtcattgcattgcatatttttgcaagtccaatgtacgagtttttggatactaaatatgggatcaaaggaagtgcactgaatgctaaaaacttgtcattccgagtcgtggtaagaggtggctacctagcctttaacacatttgtggcggctttcctgccattccttggagatttcatgagcctcacaggggcgatcagcacatttccccttacgtttattcttgcaaaccacatgtaccttaaggcaaagaaggacaaactaaacagctcacaaaagctctggcaccggttcaatattggtttctttgccattatgtctctggcagcaacaatttcagccatacggctcatttctgtagactccaaaacataccatgtttttgctgatttgtgattaaattcattgtattctttcagcaattgtagcaccagaggctttagtgtttcagatgctttcattttaaaataaaaattagtatagaatttcctagaagaacattgtgtcgtgttgtatcaatgcattaatgtatcctgttgcgtaaaccttgcacttttggtcaacaatggtttttcagatcagtaaatacacatatttggtactagtt

SEQ ID NO: 6172 - DNA, 1736 bp, Glycine max
tcagctacgtaggccccccccccgtagaatttgcaggtgaagcaacagtgttacgaagcaagtagtagcaattagcaatggcgtacatgagcatgggggaagctcataggaggataacagagtatctgaatcgcttttccgacgcgatttcttgccaagacggagctacgttcaagtctctcttcgctctctcttctaattccccattccttctctctctgggcgacgcgctcaacctcttccaagacgccaacagactcatcaagcaatccgacaaccattcccagttcacagacatcctcgtccctctcttccgatccctccaaaattaccgccagaacaacttgctcgaagcctataacgctttcgaaaaaaccgccaatgcgtttatccaggagtttcgtaattgggaatccgcgtgggctatggaggctttgtacgtcattgtttacgatattagggttcttgccgagaaggctgataaagaattggtttccaatgggaaatcccctgagaagttgaaaggcgccggttccgtccttatgaaagtttttggcacccttgcgggaaaaggctctaagcgtgttggagcattatatgtaacttgtcagctattcaagatttactttaagcttggcacagttcacctttgccgtagtgtaataagaagcattgaaactgcacgcatatttgattttgaggaatttcccaaaagagacaaggtcacttacatgtactatactggtcgtcttgaagttttcaatgaaaattttcctgctgctgattataaattatcgtatgccctgaagcattgcaatcctcaaagtgaagccaatataaggtttggttcaggatgattcttaaacatctaattccagtgaagctttcgattggcatattacctaaaaacagtctcttggagaagtacaatctacttgagtatagtaaaattgtacaagctctaagaaggggcgatcttcggcttcttcggtgtgcactgcaagatcatgaggaccggttcttgagatcaggtgtatatcttgtcctagagaagttagaacttcaagtataccagagattagtaaagaagatttacatcattcaaaagcagagggacccaagcagagctcatcaggtgaagttagaagttattgttaaagcattgaaatggcttgtaattgatatggacgtggatgaggtagagtgtatagtggccatactgatatataagaatcttatgaaaggttactttgcccacaaaagcaaagttgttgtattgagcaagcaagaccccttccctaaattaaatggaaaacctgtcaattcttagggacattcattcatgacactgaaattcagaggggctaggaagcatggtaatgacagggtgactttgagacagttttttcagccattagttattgtattgaatgtttgagaattctcccaaacacgtggtcatcaaaatatcacagtgctgctccggttttaaagcaagctaatcttgtttagatgatgctagctcttgcaaattggattgtagtttaggttccacttgtgttgtatgctgcaaatatgctaccaatggaaataaactgttaaaagatactgatctcattgcaataacctgaatttttggctgcggctatgaaaaaaaaaaaaaaaaaaatacaaaattgtgatgtatcttgtgtttttgctctctgcttaattacattgacaacattcttagatag

SEQ ID NO: 6173 - DNA, 1508 bp, Glycine max
tgcttttctcacccttcctcactctcactttcttcctcctcttctcttcttccgttgctgagataccgcagcgacagaatctccataacggacttcggtggtgtcggcgacggccgcacgctgaacacgaaagcgttcagagcggccgtgtaccgcattcagcacctgagaaggcgcggcggcacggtgctttacgtgcctccgggggtttacttaacggagagcttcaacctcactagccacatgacgctttatctggctgctggtgcctgttatcaaagccacgcaggagttggggaattggcctttaattgcacccttaccatcttatggaagaggaagggagctccctggaggaaggtataatgagttttatccatggagatggacttagtgatgtggtaatcacaggtgagaatgggacaattgatgggcaaggagccctcgcgtgcgccctggcgtcccagagaacacttcaatttacaagaccaaaccttgtagaatttgtgaattcgcaagatattattatttcaaatgtgattttcaagaattctcccttctggaatatacacccagtttattgtagcaatgttgtggttcgatatgtcacaattttggctcctcgtgactctcctaatactgatggaattgatccagattcaagttcaaatgtctgcatagaggactcatacatatctaccggagatgatcttgtggctgtaaagagtgggtgggatgagtatggtattgcgtacggtcgccctagctacggtatcaccatccggcgtgtaacagggtcatctccatttgccggtattgcaattggcagtgaaacctctggaggggtggagaatgtgctagcagaacacatcaacctcttcaacatgggagttggtatccacatcaagaccaacagtggcaggggagggcttatcaagaacataacagtggctcatgtgtatgtggagaatgcaaggcagggaataaaaattgcaggtgatgtaggggggcacccagatgaaaaatttaacccgaatgctctccctgttgtgaagggcatcacaattaagaatgtttggggagtgaaggttaaccaggcaggtttgatacatggattgagaaattcccccttcactgatgtttgtctgtctgatatcaattttcatggcatggaaggaccaagatctccctcttggaagtgttctgatgtgtttggatttgctcatcaggttagcccttggccatgttctcagctgagcagccaagagcctggatcatgtgctatttagatattttcactctcttcaagtattgtagtaattgagtgcttctttcattgatttcttatacttaaagccattgaatcaccactttagaattgtatgatatcatgtgaaattaaatttagtcaaacatgttgaggatcatgtgtcaaacatacattgtgagagccaatttatataaacaatttaattaagtacttatttaataagttctcttgtcaaaaa

SEQ ID NO: 6174 - DNA, 1403 bp, Glycine max
  misc_feature (1)..(1): n is a, c, g, or t
ncgattgggtaccgggccccccctcgagtcagcgctacgtaggcccccccccccaagaacgataacaaaattgaaatcgaattgggtgcgaagtgaaatgttgcaaaccctaggaggcgtaatccctcgcttcgtgagtcgctcatggctccgaaacctgacggtgcgtgcaatggcattctcttcctcctcctccgattatggagaccagtcacgtggtggccttccccgcttctactccgaaactcttcctccttccaagggtagtgttatacgcgtgcaaggtgatgaattctggcatatgacaaaagttttgaggttaaccaccaatgatagggtacagctcttcaatgggaaaggaagtctggtagaaggatgcatacagagcattgatcgaactggacttgattttgttgcattgaatgatttgatatcaatccctccacaaaatacacaattgcatgtatttgctggttttggtactctgaagggtggccgtgctgactggcttgtagagaaatgcacagaatttggagccaatagtgttactcctctattgactgaacattctccgtcaatctcagaaaatcgggtggacagattgaaacgtgtcattttagcagcatccaaacaaagtcaacgactgcatgaaatggtcttgaaacatcctatagagattgatgaccttttgcaccttattgcgcaatcaaagctatctcttgttgcaactgcgaaggcaactcctgttcttagtgcattggcatcgttggaaaaggaaactagtggcttaatcataattggaccagaaggagatttcactgagaaagaagtgagtatgatgatggaagcaggtgctacagctgttagtcttggacctcatcgtcttcgggttgaaactgccacgatagcacttttggcaactgtcatgttatggtctgactcacagcaaatttcagtctgttgattcctcagtgtagctgagagagtacgtggatgacacagaggagtgggaggactacataatcattgccctggattgagaaacaaaaccgtctcctgcaagtgggagtgaagctttgcacagcaagtgtgcttttgaatgccttaatttgtgtgactggtgtatttgccatgaatattcatattaagctatttgatacagggatgcctcagttcctcgggactatttttggaggcattgctgcttgcatattcttgtatttggttaccgttttttggtatatggtggactagctgcccaccaaattgtgttccaaatataaatgtaatttgatttgaaagttagttttctatgtaggtgctagaaattttttcactacaagacaactacgggaagtcagtaacaatttctttctaatatattcaaaaaaaaaaaaaaaaaa

SEQ ID NO: 6175 - DNA, 1402 bp, Glycine max
  misc_feature (1385)..(1393): n is a, c, g, or t
  misc_feature (1397)..(1399): n is a, c, g, or t
atatacaagttttttccctctaaaaactcggtcagctacgtaggcccccccgaagtagttttaggcacatagggtttggactttggaaaggcttattctccgctctcgtctgaaacctgaaaccctttgttcttcgtcggcggaagcatgtcatcgtcatcatcaagcaacgcctacgacgtgccatgggtagaaaagtaccgtcccagcaaggtcgccgacatcgtcggcaacgaggacgccgtctccaggctccaagtcatcgctcgcgacggcaacatgcccaatctcattttatccggtcctcccggaaccggcaaaaccactagcattctcgccctcgcgcacgagcttctcggaggaccaaattgcaaggaagctgttctcgaactaaacgcttcggatgatagaggaattgatgttgtgaggaacaagatcaagatgtttgctcagaagaaagtcacactgaccccggggaggcacaagatagtgatactggatgaagctgatagcatgaccacaggggcacaacaagcattgagaaggacgatggagatatattcaaacaccactcggtttgcccttgcttgcaatacctcagctaagattattgagcccattcagagtagatgtgccattgtgcgattttcacggttgtctgatcaagagatacttggtcgtctcatggttgtggttcaagctgagaaggttccctatgttcctgaaggacttgaagccatcattttcacagctgacggtgatatgagacaggcattgaataacttgcaagcaacatacagtgggttccaatttgttaaccaagcaaatgttttcaaggtttgtgaccagccacatccactgcatgtgaagaatatggtgcgtaatgtgattgaagggaattttgatgaagcttgttcaggcctcaagcaactgtatgacttgggatattcccccacagatatcatcacgacactctttcgtataataaaaaattatgatatggccgagtacctgaaattggaattcatgaaggaaactggttttgctcatatgagaatttgtgatggagttggttcttatcttcagttgtgtggtctattggctaagctttctctagttcgtgagacagctaaagctgtatgagctggtcctaagtgcaactgagatgtcattatttttaagttttccgatagtgaaatgttctgctgatgtagccttatattttttatgtccagatgctaactgatacatcaatatttcggcttctataaatatgttgtgttttagcttggatcaataactcccacttttgaaaataaaaaaaaaaaaaaaaaagttatgatctcaatgttcaaatctatgatgaatcaagcataactcattgnnnnnnnnntttnnnaac

SEQ ID NO: 6176 - DNA, 933 bp, Glycine max
tccatgctcgaggaaaaaaagcattttgcaactgctcgcagcttaacgctgcaatttctttccaagttgatcgagcgacttcaggattgccttgcatacttttggtgtttgaagagctaatctgtctaccaaaatgaagggacgtgtaaggtgggatgaggctaatattggagaaattgaggcaaacaaacctgtgaggcagaaaattactgagcctaagactccatatcatcctatgattgatgatgacagttctctatctcctgtacgaggaagttttgatgcatgtattgataatgaaaatcgtgctgaagcaatatggagtgctctgaatgatgtagcctccagtagcagaagaggcactggacaatctggtggttggacatcatctgaggatgagccagaagcaatggagcaagatgatgatgattctgaaacagataggaacttgagttttaaagagcacagaaaggcccactatgatgaatttcttaaagtcaaagagctgcaagagacgggttctcttgaggatgaaagtgacgaggatcataattctcaacccagtaaggcggagaaatgtgagtcgtcttcactgagtcatagtgtaaaagagatggtcattgagggtaagaagtcttcaacgcctccagctaatggttcttagacagtgatcaacaaataaaatccactgtcttttcattagtttcattttgtgtattgaagaaaactaaatgattcactgtattgtatcatttgtatgtaaatagtttctttcttcatcatgcttattatgatccgttcacactttggttgtattctggcaaattggtttatgttcggcatcttcgaggagtttgcttgtggcttttataagtaattaaggttggatgcttaaagggacccaatatatcccaaacatggaactatttttcc

SEQ ID NO: 6177 - DNA, 992 bp, Glycine max
cgaaaaaaagaaggcattttgcgactgctcgcagcttaactctgcaattcctttccaagttgatcaagcgacttcaggattgccttgcatactttggtgtttgaagagctaatctgtctaccaaaatgaagggacgtgtaaggtgggatgaggctaatattggagaaattgaggcaaacaaacctgtgaggcagaaaattactgagcctaagactccatatcatcctatgattgatgatgacagttctctatcccctgtacgaggaagttttgatgcatgtattgatgatcaaaatcacacgatgcatgctgaagcaatatggagtgctctgaatgatgtagcctccagtagcagaagaggcactggacaatctggtggttggacgtcatctgaggatgagccagaagcaatggagcaagatgatgatgattctgaaacagataggaacttgagttttaaagagcacagaaaggcccactatgatgaatttcttaaagtcaaagagctgcaacagaggggttctcttgaggatgaaagtgacgaagataataattctgaacccagtaaggtggagaaatgtgagtcgtcttcactgagtgatagtgtaaaagagatggacatcgagggaaagaagtcttcaactcctcaagctaatggttcttagacagtgatcgatgaaataaaatccactgtctagtttcattttgtggattcaagaaaactaaatgaatcactgtttttgtatcatttgtatgtatgtagttcctttcttcatcatgattattatgatccgttcacacttttgtactctggtaaattggtttgttttcggcatctttgaggaatttgcttgtggcttttataaggaattaaggttggatgcttaaagggaggaaatatcccaaactgaaactatatttcatttcttaattccctgtgatttttatgtgatttgtgtggggagtattatgccccaatttttaatactatc

SEQ ID NO: 6178 - DNA, 2462 bp, Glycine max
tcagctacgtaggcccccccccccagtagtgtcctttgtgtttcgatacgaacaaggcttccttctcagaacctccgccaaacttagcggcgatttttccaacttccatttcccccctcaccttcttcttatacccctcacactctcttcttcctcatccaccccatttctctctctttctaacaatggctcaggtcgtggcttcacgatccattcaaagcaccccattgtgccccacttctggatctgcacgtgacagaacccaaaacctgttaaagcctccatcttttgcttccaaggtgttccctttgggagagaacaataacaaacgctccaaactcaggctcagaagccttcagatcagtgcaaggaaatctgccccttctgaagtcatccccatgtcacccgaagatgatccaaaaattgaggagcatttgcaacatttacgtggggtgcagccatttggtgagaactctgttggaatgtggtctaagccaacgtttaggcgcaagacgaagatagtgtgcaccattggaccttctaccaatacgagggaaatgatttggaagctggctgaggctggcatgaatgttgctcggttgaatatgtctcatggggaccatgcttctcatcagaaagttattgacttggttaaggagtataatgcttctcatgaagacaatgtgattgcaatcatgcttgacacaaagggtcctgaagttaggagtggggatttgccacaaccaattacattaatgcctgggcaggaattcacttttactattcagagaggtgttggaactgctgattgtgttagtgtgaactacgatgattttgtgaatgatgtggaaatgggggacatgcttcttgtcgatggtggtatgatgtctatggttgttaagtctaagacagaggattctgtgaaatgtgaagttgttgatggaggagagctcaagtcaaggcgacatttgaacgttagaggaaaaagtgcaacactaccttcaatcactgggaaggattgggatgatatcaagtttggagtggataacaaagttgacttctatgctgtttcctttgttaaggatgctgaagttgttcatgaactgaagaattatttgaagagctgcggtgctgatatacatgtcatcgtaaaaattgaaagtgcagactctataccaaatttgcattcaattatcactgcatctgatggggcaatggttgccagaggagatcttggcgctgagctccctattgaagaggttccacttttgcaggaagagataatcaacttgtgtcgtagcatgggaaaggctgttattgtggcaacaaatatgctagaaagcatgattgttcacccaactccaaccagagcagaggtatcagatatagcaattgcagttcgtgaaggttctgatggaataatgttgtctggagaaacagctcatggaaagttcccactaaaagctgtgcaagtaatgcacacagtagcattgcggacagaagccactataccaggtggtaaaatgccacctaacattggtcaagtgttgaagaaccacatgagtgagatgtttgcataccatgcaaccatgatgtctaacacccttggaacctcaactgttgtcttcactagaacgggtttcatggctgtccttctgagtcactatcgtccttctgggaccatatttgcttttacagatgagaagagggtacaacagaggctggctttgtatcaaggagtctgtcccatatacatggaattctgtgatgattctgaggcaactttcagaagagccttggacttgctgcagaagcaagcaatggtgaaggaaggagaagaagtagcacttgtacaaagtggtaggcaacccatatggaggttccaatccacgcacaatatccaggttaggaaagtgtaaaccagaagaatggagagtggccacgaataatgtttcaagacacagtacgtttagcttcacaagagcatcatcttagtgttgcctcttagttggttgatgctagtcttttttttcttggcttgtttaggttccttgttctcttctaaatattttgtcacgtaaatgttattgaaattttggttaagaaattgagatcagaaatatgctttcagcatcgaggaatgacttgtttgtcgcgctaagtatggagtatggataaatgacttaataatagtttgatggctcggctcggcgagctctgatgcaaaaaaaaaaatgtgccttgatgactaaaaaaaaaaaaaaaaaaaaaaaaaaagggcggacaaataaaaatctaacagacagcagtgggtcgacccggaaaattccgaaccggaacctgaacgcgtaccaactattacctataaaggggcggcctttagctttcaataggaccgggggttcctcccggattttcgaaaccgttctctggtggcttcccacttttccttttagggggaa

SEQ ID NO: 6179 - DNA, 1563 bp, Glycine max
cctaatcgaaaaacgtcctatcactctcaattctcaaacttgttacagataaaaaccctttcttgaaacctttctccaaaatttctcacaacccacttctactctactcattccacacccaacttacaaaaacccattcttttgctcactcattttcttaacgtagattaatcattatgtgtggcggtgccatcatcgctgacttcataccccgccgtggaggccgccgcctcacggcctccgagctctggccaaactccttcgccaaagacgatgactttgacttggattactcccacatcgctacccaacaaccctccactctcaaaaggtcccaacctcccaaagttagcgagcaggttgagaataagccggtgaagaggcagaggaagaatctctacagagggattcggcagcgtccgtggggcaaatgggccgcggagattcgcgatcctagaaaaggggttcgtgtctggttgggcacctttaacaccgcagaagaagccgcgagagcctacgatcgtgaagctcgaaaaatccgaggcaaaaaggctaaggtgaatttccccaacgaggacgacgaatattccattcaagctcgtaatccaattccaccccttcctttcgctccacaacaccctcccctgtaccagcaacagtaccgttgcgatctcaacaatgcccctaaaaatctcaactttgagttcggttacgacctgaaccacgcggaggcgttcccatcccgcgtggacgccgtcaacgctgactcggtggttgtctccgttgatgaaaattcggggtcagcgtcgggttcagagggtgcttattcgacaacggagttcatggggtccgttcagaacgggaacggttatttgggtggcacggtaatggagaagaaggagaaagagacagaggttattgaagctgaagaagaaaagaacaaagtgctggagctttctgaggagctgatggcgtacgaaaattacatgaagttttatcagattccgtactatgatggacaatccacgacgaataatgttcaggaaagcttggttggggatctctggagtttcgattagcgaggaatatatcaaggatgttcttttcatgcatgtgttttgtttcttcgtcaatgctgtgaaagcttttgctttctccctccattctgctgactaaactaacatctctggcgttttggcagggatgcacaggaatttaaattgagtgcttcggtagaaatggtctcattagttagtgctatgctatcatctggttttgttgaattgtaattttttgttttggtggtatgttgaacagtaattttactggatatattcaagtctatttgaattccaattccaattattctttcggtgaattttatctattaattcataccacttgttgtttatgttaggctcgtctccatccctaattcgaggatggagaacagtcaagagcatgactcgggcaagcattaccgcgtgaggtcctacaatgggaataatattccaagcatttttggttacgcgccggaaaaaacatttaatatactgtctcgac

SEQ ID NO: 6180 - DNA, 1419 bp, Glycine max
taggctccgagtgcccgcagcggccgacgtcctatcactctcacacttgtgttacaaacaaaaacccttcttcaaaaccttttctctaaaatttctcacaacccatttctactctctactcattccacacccaactcacaaaaaacccattctttcttttgctcactcattttcttaatcatgtgtggcggtgccatcatagccgacttcattccccgccgtggaggccgccgcctcacggcctccgagctctggcctaactccttcggcaaagacggtgactttgacttcgattactcccacatcgccgatcaacaacgttccactctcaaaatgtccccacctcccaaagctagcgagcaagtggagaataagccggtgaagaggcagaggaagaatctctacagagggattcggcaacgtccgtggggaaaatgggccgcggagattcgcgatccaagaaaaggggttcgtgtctggttgggcaccttcaacactgcagaagaagccgcaagagcctatgatcgtgaagctcgaaaaatccgcggcaaaaaggccaaggtgaatttccccaacgaggacgacgaatattccattcaagcacgtcatccgattccaccccttcctttcacaccacaaacacaaaaccctcccctgtaccagcaacagtaccgttgcgatctcaacattgcccctaaaaatctcaactttgagttcgggtacgacctgaaccacgcgggggcatttccgtcccacgtggacgccgtcaacgctgactcggtggttgtctccggcgatgaaaattcagggttagcgtcgggttcagagggtgcttattcgacaacggagtttatgggatccagtcaaaacgggaacgggtatctgggtgttaccgcaatggagaagaatgagaaagagacagaggttattgaagctcaagaagaaaagaacaaagtgcaggagctttctgaggagctgatggcgtacgagaattacatgaagttttatcagattccgtactatgatggacaatccacggctccaccgaataatgttcaggaaagcttggtcggggatctctggagttttgattaacgaggaatatatcaaaggatgttcttttcatgcatgtgtttgtttcttcgtcaatgctgtgaaagcttctgctgactaatatctttgcgttttagcagggatggacaaaaatgtaaattgggtgcttcggtagaaatggtctcatgattttccgactttttttttttttttttaccaatttatttaatattaatttatttgtttctagaacttagggctatcatctggttttgttgaattgtaatttttcttttggtggtatgtcgaactgtaattttactagatatattcaaccgtgtttgaattccaatttttctttcaaaa

SEQ ID NO: 6181 - DNA, 826 bp, Glycine max
attcgtggccgcgagagagagagaaagaacctgtttggccgatgttcctttcttgtgatccgaggagaacgaagagtcgttcctgagaagctcgtcgctatgggttctctccctgtgcccgcatttccatccaaacactgccttgacgagagcagccacattgacgaagccaccctctcggcgctattcaagtcgcagcagagccacctgaacttcttcttcgaccacatcgaccactcccaaaccctagccttcacgcgcgcgctcctcaatgccgccggcaccgtcttcttcaccggcgtcggaaaatccggcttcgtcgcgcacaagatctcgcagacgctcgtctctctgggcgttcgctccgcgttcctctcgccggtggacgctctccacggcgacattggaatcctcaccaatcgcgatgtgctcatcctcctcagcaagtccggcgccaccgaggagctcctccgccttgtgccgtgtgcgagggccaaaggcgcgctcctcatcgcgctcacctccgttgaaggcaacgcgctcgccgcggcgtgcgacatgtccgtgcatttgccgctccagagagagctctgtccgttcaacctcgcgccggtgacatccaccgctattcagatggtgtgcggcgacaccgtcgccatcgcgctcatggaggcgaggaatctcaccaaggaggagtacgccgcgaaccatcccgccggccaagatcgggaagagcctcatcttcaaggtgaaggatgtgatgaagaaacaggacgagcttccaatttgcagagaatcggatttgattatggatcagctcgtggaa

SEQ ID NO: 6182 - DNA, 1250 bp, Glycine max
atgttttccaatacataaattgtgaagatggaaagatgtctggtcctcctggggatgttgcaaattccctcatggacggctattccaagggtaataatgaagtgagacgaaggtctagattcttacgtagaagaggaagagtccgtcgattgaagtacacctggaaatctgctgcttatcattcaattgctgcgagaagacgacagaagggggatcaaccctgccgacagtataatccatgtggttgccaaacggcttgtggaaagcagtgtccttgtcttcaaaatggaacctgctgtgagaagtactgtggacgccccaagagctgcaagaatcgatttcgtggctgtcattgtgctaagagtcaatgcagaagccgtcaatgtccatgttttgctgcagatagggaatgtgatccagatgtttgtaggaattgttgggtcagttgtggcgatggtacacttgggattcctagccaaagaggggacaattatgaatgtagaaacatgaagcttcttctcaaacaacagcaaagggttcttcttggaaggtctgatgtatccggctggggagccttcttaaagaatagtgttggtaagcatgaataccttggagagtatactggagagttgatttctcatcgggaagcagataagcgaggaaagatatatgaccgtgaaaattcatcttttctctttaatttgaatgatcagtttgttcttgatgcttaccgaaagggtgataaattgaagtttgcgaaccattctcctgacccaaattgttatgcaaaggttattatggttgctggagatcatagggtaggcatttttgccaaggaacggatttgtgccggggaggagctgttctatgattatcgttatgagccagatagggctcctgcgtgggctcggaagccagaggcatctggatcaaaaaaagaggatggggctccttcaagtggtcgtgcaaagaagcttgcttaatgggtgtttgttcttcaaaaatcaattcttttaagttattctttaacacgtaggggaagcaatctcattggtagcggaaagaagtattgttttaagttttttgttcgtagcaaggccgtgcaattgttgctgcataggtaactaactacatttaaacaattcattttaatattaatcgactgtatattcaccattccaaacggaaaatacaagcttaatcaaaattccatgcaattctttcccggagggaaatgggcaaatgcaaat

SEQ ID NO: 6183 - DNA, 1797 bp, Glycine max
cactttctctcttcatgcgtgagtgcttgatcgcgctactttaccagagaaaattagaagtgagaaaaagctatgggccacaacatctaaacaaaacaaacaaacacatctgaattattcctttgattttcaaattctgcttcggtttatttctttataattgatagcgggtgctttggagattttatttttccctttctttttggttgagtatgggttcggtggactgttatccgtctcgtgtggacgatgcggccgtggtgtctctagattcgctgccgttagggttccgattccgacctaccgacgaggaactcgtcaattactacctgcgacagaagatcaacggtaatggtcgcgaggtttgggttatccgagaaattgatgtctgcaaatgggagccttgggacatgcccggtttgtcggtggtacagactaaggatccggagtggttcttcttctgtccacaggaccgaaagtatccaaatgggcatcgattgaacagagcgacgaataatgggtattggaaggcgacggggaaggatcgtaaaatcaagtctgggacgattttgattggaatgaagaagactttggtgttctacactggtcgagcacccaaggggaataggaccaattgggttatgcatgagtatcgccccactttgaaggagcttgatggtaccaatcctggacagaatccatatgtcctttgtcgcttgtttaagaaacatgatgagagccttgaagtttcacactgtgatgaagcagagccgactgcttccactcctgtggctgcctattactccacagaggaaatacaatctgatctggctgttgttgcaggatcgccgtcacaagttacagaagatgataagcatcagtcaatgatccctgcacactctgaggaagcaatatccaatgttgtaaccccggttgatcgctgtactgatggatatgatgcttgtgatgcacaaaatcaaattgagttaccaactgcggaggagtttcaaccattgaactttgatatatattatgacccaagaagcgagctactggatggcaaattattctcccctgtacttgcacatattcaaccagaatttcattatcaagcaaacatcgaatcagatggtcgatatgggcttcaatatggtacaaatgagacaaacatgtcagactttttgaattcagttgttaactgggatcaagtaccctttgaggatcccaattgtcaacagcagagctaccccttgtttaatgttaaggataacatattaaacagcgacttagattctgaacttgccaatatgacatgtatgcaagctggttatgcagagggggcaattgacggaaggattcctttgttgataacttcagaattttgcagcaccactggcatccccgttgactgtgttggtgacgagcagaaaagcaatgttgggttatttcaaaacaattcccagagagcttttactgatgttaatatgggtcaagtatacaatgtagtcgatgattatgagcaacaaagaatctgtagtgcagttgctagtggcaatactggaatcataaggaggcatcgtgaggtacgaaatgaacagctaagcataaactcaacacaaggtactgcacagaggagaattcgtttgtcaatggctacacatggctcaaataagacggtgaaaagtgaaagttgtgcacaagaagagctttatgcaaaaccagtcattgctgtgggggagaaagggtcagaatatcatgcttctgatgaaagtgctactcttactaatgatgggaatg

SEQ ID NO: 6184 - DNA, 2918 bp, Glycine max
tcgagtcagctacgtaggcccttccccccgatttagttattgaatcgaattgccaacaacctctgctaccttacattccatggactctgaaattggaatgcttcacctgatgaggaagaaccagaacttctgtctgagaatcaagtttatgaagcacagatggtaactcaactgaaaatatcagatgtaccacagccagcaatgataagatccccaatttctcaaggatggcctatcagtgaagagagagtatcagaatggctttggaccttgcataggatagttgttgatgttgtgaggactgatagtcatcttgaattctacgaggacacgagaaatttagctaggatgtcagatattcttgctgtctatgcatgggttgatccttcaacagggtattgccaaggtatgagtgatttgctgtctccctttgttgtaatctttgaggataatgcagatgcattttggtgttttgagatgcttttaaggagaatgagagaaaattttcaaatggaaggcccaactagagtgatgaatcagttgcgagcattatggcatattcttgaactgttagacaaagaaatgtttgcccacctgtcaaaaattggtgctgaaagccttcattttgcatttcgtatgttgctagttctctttcgaagagagttgtctttcaatgaggctctttcaatgtgggagatgatgtgggcagctgactttgatgaatccatggcttatgatttagaagagaactgtctggaagcattggagttacaacttcctagagactcaagcaatgatatgagagaagaaattgcagatagtgatggtggtagtgtgaagagtggttcacggtcaaatcataatgaaaatgacaacacaaaagccagcccacagtcaaatcatgaaagagctgatcactcagtatatgacagcaaattgaagtcgctctcatcccataccttttgtggcttggcaaggaatatctggcctagaaatcatcaagttcaaatgagcagtatttccttaacaaggaaaggaaataatgagttggccatattttgtgttgcagcaattcttgttttaaaccgtcagaagatcattcgagaaactcattcctttgatgatatgataaaggcgttcaaggtaatcaagaaaatgaactatgttgcagagaaaggggactaaggtaatatcattgccattatacttgagacagaagcactgagtatcacttatatggctctgcatttccaaattggagtttgggtgttaagactttagtcattacttatccactttggatgggagactttgcagcttaaagtggttttgctttcagaggttcatccagctgctgtatgtccattgtcttcattactcttttttacgagtgaaaagattgacaaggggatttttcatcactctggttgctcccaggtttgatcaatttgcagtcttggatacctggcacaggttacgcaaacaattctctttctttgaacttttggttcagctcatttctggagaaagtcgtacaaaatttatttctacccagaggatttggagttcggaaaaagcacacgcatacaagtagaaatagagggtgaatatgtcacgggattgttgtaagatatggaaacaatgtagtcaatttttgtgggtgtttgaattgactgaggataggatttatgttttatacatacatactacatcaagaagattttttagtgacttgaattgctggaactcataaattacaaaggataaagagggtattattcataattcatgtaaaaaaaaaaaaaaaaaaaatacaaacaaatctgtttaaattgggcatatcagattccactctaaacatccgatttcgcctcctactaatttgggttgcccttatttgtgtatcggcaatatcggcgtatctctccttggtttcctgttagaaccctgtaattccccatcttgtacattgatgtagcaaaagatttccgaaaatcttcaaatccaacggcgaactcctcggagatctgtttagtgtcatcactatatagtaattgttgatcaactcccaggacagcttcgtgggataggacccttccgtagtatgattctgtgaagttgtaacttgaccctgattctgggtttaggtgtaccagagggtctgcttgtcccattctttcttggcgggcaaagttttctcaacgactctagtgaagtaacactcatgcttgggtcgggttttccggaaccattgtagttgtagagccgatcaacaataaagctacaatgtgttctgcccattgtgtgtgctcctaaaagtgtggtcatgtctagttcattcaagttcctggatttgaaatattccaggactttctgcagcgagacggatggtgatggcaggtctactgatgcagcatctgatttcatgccatcctttctacctgttaaaactgggtaacctgctccacctgccagtttaacagcatccctggtggcgaggtggagtatatcagcacaagacacagttccagggcatcgtgattccagaacagcttttatcttgtcaatgaccgcaaatcctccaagcccccggttttgtgctgcttttttctctggatttgctccttcgtcaagcagaattgatgcatcacatccagtgacaaaacagtcagcataaaccaagcggagaagctttgctgtaatgcttctgtcattcttccaaaacaggttcacttggtgccggacatactcctctgcgtcgtgacatctattcgtcaccttataataatgccaccgcaaatttggtgttttcacctctgcatctgccaatccataacacatgctcaccactacgagagctaccagtggaaaacccacacacataactctccccatttaggtgtttttgtttgtttcac

SEQ ID NO: 6185 - DNA, 745 bp, Glycine max
  misc_feature (741)..(741): n is a, c, g, or t
taccgctgcgagaagacacagaagggtacggctgcgagaagacaacagaagggtacggctgcgcggcctcaccgcccccacatctttcactcgttctctgaaattttaattgacttttctcccctcataaaaaaaacctaccaatggctcccgcaaaggcagagaagaagcccgcggagaagaagccggcagagaaggccccagcggagaagaagccgaaggcggagaagaagatatcgaaggaaggaggaagcgagaagaagaagaagagaacaaagaagagcgttgagacctacaagatctacatcttcaaggtgttgaagcaagtgcaccccgacatcgggatctccagcaaggctatggggatcatgaacagtttcataaacgacatcttcgagaagctcgcccaggagtcatcgcgtctcgctaggtacaacaagaagcccaccattacttccagggagatccaaacggcggtgcgtttggtcctccctggggagttggccaagcatgccgtttctgaaggcaccaaggccgtcaccaaattcaccagctcttgattggtttcgtgtgtttatgtcagggttttctgttagcccgatttaattagggtttcttttcctttttatttctttgagtatgtagatgtaaaattaaagccttttatttttaaataatataattgccgttttgttaaaaaaaaaaaaaaaaaaaaaaaaactcgctgggaaaaaaaaaaanaaaa

SEQ ID NO: 6186 - DNA, 820 bp, Glycine max
  misc_feature (13)..(14): n is a, c, g, or t
  misc_feature (35)..(36): n is a, c, g, or t
tcgagggccggcnncgggccgggtacaaaaaaaannaaaaaaaaaaaaaaaacggctgcgagaagacgacagacactcgttctatctaattcagtttttttctcccatcataaaaaaccgaccctctcctttccctcttcaccaaccaatggctcccccaaaggccgagaagaagcccgcggagaaaaagcccgcagagaaggctccggcggagaagaagcccaaggccgagaagaagatatcgaaggaaggaggaagcgagaagaagaagaagagaacaaagaagagcgtggagacctacaagatttacatcttcaaggtgctgaagcaggttcaccccgacatcggaatctcaagcaaggccatggggatcatgaacagtttcataaacgacatcttcgagaagctcgcccaggagtcgtcgcgattggctaggtataacaagaagcctaccattacttccagggagatccaaacggcggtgcgtttggtcctccctggggagttggccaaacacgctgtctctgaaggtaccaaggccgtcaccaagttcaccagctcttgattcgttttgtttcctgtgtttcgattagggttttctgttgaccccgatttgattcgcatttttaaattagggttttattttcctttttgttgcttttgagggtgtagatgtaaaattaaagctttatttttaaataatataaatgccgttttttaaaaaaaaaaaaaaaaaaaagcgaaccgatcgaaacgtctttttgcgtcttctttggttttctggtttctgattgtggaaatcgaattggctgtttgaccc

SEQ ID NO: 6187 - DNA, 1742 bp, Glycine max
  misc_feature (1717)..(1718): n is a, c, g, or t
catccatgctgaaggtggtctaaatcagcagagaattgcgattcgcgctgcgctgcctgcgccccccccattaaatgccactcttattttgcctgttttgaagcaggaccagatttggaaggaccaaacgaaatttgaagacatttttgatgtggatcacttcattgactacctgaagtatgatgttcgtattgtccgtgatatcccagaatggtttaccgataaatcagagctatttactagcataagacggactgtaaaaaacattcccaaatatgcaccagcacaattttacatcgataatgttctgccccgagtcaaggagaagaagattatggctctgaaaccctttgttgacaggctgggatatgacaatgttcctcctgaaatcaacaagttgagatgcagagttaattatcatgcactgaaatttcttcctgatatagagcagatggctaattcacttgcatcaagaatgagaaaccgaactggcagttcaaatccttacatggctctgcatcttagatttgagaaaggaatggtgggactatcattctgtgattttgtggggacaagagaggagaaagccaaaatggcggagtatagaaaaaaggagtggcctcgacggtacaagaatggttcccatctgtggcaattagctctgcagaagcgaaaggaaggacggtgtcctctagagcctggagaagtggctgttattcttcgggccatgggctatccaaaggaaactcaaatttacgtagcttctggacaggtgtatggtggacagaaccggatggctccgctaaggaatatgttccctaatctggttaccaaggaggagttggcaactaaagaggagttagatggtttcagaaagcatgtgacaagcctggcagctcttgacttcttggtgtgcttgaagtcagatgtattcgtgatgacccatggaggcaactttgctaagctgatcattggagcacgtagatacatgggtcaccgtctaaaatcaattaagcctgacaaagggctaatgtccaagtcttttggggatccatatatgggttgggctccttttgtagaagatgttgttgttactcaccagacacggacgggattgccagaagagactttccctaactacgacctctgggagaaccctctgacaccctgcatgtgtagagcctgattacagcaattttatcgataacaatgggactttactcaagatgcatttgggagaaatatgccatctaagttatgaattctatctatctacagggtaaacgacggaatctgggctcctgccaatgcaagctttgaggtaggaggggcagtaaatagaaatttgaagcagtgatattggcttgaagggaatgagattggactgttggttatcactttaatgaacagatttcctattctgagtattctctttgccgagaccaggtggattttgtcttttcgtctaacttgtagcaattccccgccctcttttcttcttccaggaaaaaaaattgatcaattttttgtaccaagaaagatgtgcaaatcattaatgaatttcatgttgctattataggaggatttggctccttaaaagtgcagagtgtaattgaagatgcattagaaattgtgataaaacagatgcccatgtaaaataagttataaaattattaatattttaacttttgattttccaaaaaaaaaaaaaaaaaannaaaaaaaaaaaaaaaaaaaaaaaa

SEQ ID NO: 6188 - DNA, 890 bp, Glycine max
agagtaatgaattgcgcaaacaagtggatctgaattcacattcacaacaacaaaacgttgctttcccctctctgctattaggagagacagacaactcactccttcgccaatcggagcatggcggagctccggcactcttcctccctcggcagccgagcctccaattctccgatgaagcgcgacgccgtcgccgtcggtagcgattcctcccctctcattcccgacaaccacctcgcccacgacgacgacgagcacgatcgacactcgtccaaggaccgcgaccggcaactctgctccttcttcaccgacgaccctagggtttcgcctcacaactccaggatctctatctttttcacattacttcttcttctcgttggtttagtttccctattcagcatctttcataatctcaatgcgccttacttgtgtaaaaaagatgggattgttcttcactgcccgcatgttaaagaatcaccatcactttgggaaaatcctttctcttccacaacatcttggaagccctgtgctgagcgccaggatggtgttttaccagaacttcctcctgaaaatgaaacaaatggctatatattcatccatgctgaaggtggtctaaatcagcaaagaattgcgatatgcaatgcagtggctgtggcaaaaatattaaatgccactcttattttgcctgttttgaagcaggaccagatttggaaagaccaaacgaaatttgaagacatttttgatgtggatcacttcattgactacctgaagtatgatgttcgtattgtccgtgatatcccagaatggtttaccgataaatcagagctatttactagcataagacggactgtaaaaaacattcccaaattatgacaatgttcctcctgaaatca

SEQ ID NO: 6189 - DNA, 3137 bp, Glycine max
ggtctgggccgcgactcccctacgtagccccccccccgagataagccagcgactgaatccgatggcgaatgagggaagcgacattgacgaagtgaactatgcgttggatggcgtgggagaagaagaagaggacgaaaatgcagcacaggaggaggatgacaatgacatggaagaagatgaagaggaatatactttcaggttcaaaaccgggatgaatcctttggactttgttgatgataatgatgattctggcattcaaccctaccagcggttcgtgcgtcttgaacgggaagcccttgctgataaaaagcgaaaagcacctgaacaatgccatagtgaagaaccaccttctaagatggccagggaaggtgatatttctggggcaaagatagctgagataatggaagcaatggattattatggtatgcgcaagagatcgagaaagcctaaaaaaagaggcaggcgaaaaggatcaaagaatagagttgaccctaagctaacacagatgcagggtgatgccacgtttcactatgcatgtggcgattatgaccgggctaaagctgtgttgtgtgaagttattaggctggcaccaaatttgcatgagtcgtatcacacccttggacttgtctatacttcactccaggattataaaagagctatggccttatacttgattgctgctcatttggatccaaaagagtcacctctttggaaaacgatttttacctggtccatagaacaaggttatgttgatcaagccggttattgtcttttaaaagcaataaaagcagatcccaaagatgttactcttagatttcatcttgcaaggctttatgctgaacttggacattatcaaaaagctgctgtgacatatgagcaagtgcataaactctgttgtgagaatattgatgcactgaaagcagcagctaagttctacaaaaaatgtggtcaagttgaatactccattcaaattcttgaagactatattaagagtcaacctgttggagcaaatgtaagtgtagttgatctgctgggtaccgtattgatggaaactaaggcacatgatagagctctgcagcatattgaacatgctcaaacagtaaatgcgaggaaagaattacctttgaatttgaaaattaaggccggaatttgccatgctcatcttggaaacatggagagggctcaggctctctttaatgatttgaaaccagagaatgcaagcaagcatattgacttggttactaaggttgcagactcattaatgggtcttgaacattataatcctgcattgaattattatttgatgttggaaggaaatattgaaaaagaaaatggtcttctatatctgaaaattgctaggtgttatatgtccctgaaagaaaggtcacaagcaattctcttttattccaaagctcttgaaacactacaggatgatgttgatgcacgcataactctagcttcgcttctgcttgaagaggcaaaagaagatgaagcaatttccttgctgtctcctccaaaggattctgattttggtgaagcaccttctgaaaagtcaaatagatggtgggctgatataagaataaaattgaagctctgcaacatttattggaatagagggacgcttgatgattttgtggatacaattttccctttggttcgtgaatcattgtatgttgcaactcttcgacagaagggtaaatcaaaaaagcgactctccaaaagagatctggttgaaagggttagggtcctggatggtccggaaaaggataatgtatttcgaggatttagaccagtagctgcaccatctgacctgttgaaagcttccagggcaaaaaagttgctccagaagaaggcaatggaaaaggagaaaagaaaagctgaggcactggcctctggaattgactggctaagtgatgattcagatgatgagcctcagaaagaaaacagagaacctcccttgtgtaatcttctcaaaggatgaagaacatcaccagctaataatagatttgtgcaaggcattagcatccttgcaaaggtattgggaagcactggagattattaatctctctctaagattggcccatacatctctgtctactgaaaaaaaagaggagcttcgatctcttggagctcaaatggcatacaacaccacggatcctaaacatgggtttgattgtgtaaaatacattgttcagcaacatccacacggtgttgctgcttggaattgctactacaaggttatctcaagattggaaaaccgagatacaagacattacaaatttgtacgtggtatgcaaggaaagtttgtggattgtgtgcctcctatcctcatttctggacatcagtttaccatatgtagccatcatcaagacgcagcaaggaaataccttgaagcttataaactattgccagagaatcctttggttaatctttgtgttggaacagccttgatcaacttagcattgggtttcagacttcaaaataagcatcaatgtgttgtacaaggtttagcattcctctacaataatatgagaatctgcgagaacagccaggaatccttgtacaacatagctcgggcattccatcatgttggacttgtaactctggcggctttttattatgagaaagttattgctatttgtgagaaagactatccaattccaaaacttcccaatgaaaatcccgatagcatcgaaactcacaaacctggttactgtgaccttcgcagagaggcagcttacaatttgcatttaatctacaaaaaaagtggtgctcttgatcttgctaggcaagttctcaaagatcattgtaccttgtgagtttacatgtaccttaatatgtacaaaattttagaagcatttgcattgcaatataatttattaggttttcatatatgataatggtattcattaattaagttactacagataccgagcaatagtgatttaaagacctactgcagtgcttatgtattttatttgattttttcttgaaactttgctttctgtatatattgagatgtctcttgggcgtcaaacatgagtcagactagcttgggtaagctgtctatattgtttgacaatacagaacacgtttttccactcaaaaaagagaaaaacaaaaaaaaggggaaaaag

SEQ ID NO: 6190 - DNA, 1366 bp, Glycine max
cccttgtcgaccacccgtccgacccacctgggcatatcccttatggacagcacaagaagcatatcgcaatagcaatgatagaatgtccagatcaactgccgaggctattgaccaggcaatgacccatgcggctgacacaaaagtcaaatttgttagtgtaaatctttctgtggaagcacaattacatgattggccagagaggactgaagcagatctatgtggtggatatcggcatcctgcttcaacttacagagatggtatacaagaagtggcaaggtcaggacatgacagtgatattgagtgggtgcaggtagtgttgaaagctgatcctggggttagaatggaagatatcgaggatcaagcaccaagacggcggaaggaacatcgtcgtgttccaagtacagtggcaatagaggaagtaaagatatgctaggctgcggcagcaaagggagaagcaccccttggactcccattgaaaggtgctggtcaagattcatcagatgcaccaccaagggctaatggaattatccccaaagctagtgatgccttgtctggtgaactttttgaggtgaagaaagagaggatacgtaaggcttctatccatgggaatttacctggttgggacttgcgatctgttattgtaaagagtggggatgattgtaggcaggagcatctggcagttcaacttatttcacacttctacgatattttccaagaagctggcctacctctctggctgcgcccatatgaagtgttatgtacttcttcttacactgctcttattgaaacaattcctgatacggcttctgtacattctatcaagagtcgatatcccaacatctcaagtttacgtgaatttttcattgccaaataccaagaaaattctccgagttttaaacttgcccagaggaacttcgttgaaagtatggccggatattccctggtttgctacctcctgcaggtgaaggataggcataatgggaacctcttaatggatgaagaaggccatattatacatattgattttggcttcatgctttctaattcacccggtggtgttaattttgaaagtgcacctttcaaattaacccgagaacttcttgaggtcatggattctgatgctgagggcattccgagcgagttctttgattatttcaaggttttatgcattcaaggcttccttacttgccgtaaacatgctgagcgtattattcttcttgttgagatgttgcaggactctggtttcccctgtttcaaaggtggtccacggacaatacagaacctacgaaagcgtttccatctcaatttaactgaagagcaatgtggatctttggtgctttccctcatttacagtagcctggatgca

SEQ ID NO: 6191 - DNA, 1459 bp, Glycine max
ggctcgagcaacatcttcattttgcttttcaaatgaccacctgttgacttccaattcaaggtcactctctgctggacagtcagagtttataactgaaatttctgagcatggcttaactcagggaatggtggctactagttcagtatctgtaaatcctaatttgatggataaccctcccacttcatctggaaggaagtcttctcctggttccccactgtcgtcctcaccccgttttatagaggcttgtgaaaagccagtgatgttggatgtttactcaccagatcggttggctggggaactgtttttcctggattcttccctagcattcactgcagaggaattatctcgagctccagctgaagttcttggcagaagtagccatggcactttatacaaagcaactctggacagtggtcatatgttgactgtaaaatggttacgggtgggattggtcaaacataaaaaggaatttgctagagaagttaaaaggatcggttctatgaggcatccaaacattgtcccattactagcatactattgggggcctagggaacaagagaggcttcttttagctgaccatatacatggggacaacttggctcttcatctctatgagagcacacccaggaggtactccccattatcattcagccagagaataagagttgctgttgatgttgctcgatgtcttctataccttcatgatcgaggacttccccatggaaatctaaagccaacaaatatagtgttagcaggccctgatttcaatgctcgtcttactgactacggtctgcaccggctgatgacgccggctggaattgcagagcagatactaaatctcggagcccttggataccgtgctccagaacttgctactgcatccaaaccagttccatcctttaaggctgatgtctatgcacttggtgtgatcctaatggaattgttaacaagaaaaagtgcaggtgatatcatttcagggcaatcaggtgctgttgatcttacagattgggttaggctgtgcgagcgagaaggaagggtaatggactgtattgacagagacattgcaggtggggaagaatcctccaaagagatggatgaactgcttgcaatatctctcaggtgtattctccctgtaaatgagaggcctaacatcagacaagtttttgacgatctgtgttcaatatcggtttgaaatttttgtaaatgcgtctgggaattagtttttttatttttggttcctcgacccattgtcattttctcattctttgtgtacccctcttgtctctcctccttaattgttttctggccttattttggggctaatcatcctattcttttcttctatttttctcttttattagaaaaagaaaaaacagtatttcttgtaaagcgaccatcattgattattcgacagtgtttgtgttttgatttgaaacgtagatgtctcagttattgtctt

SEQ ID NO: 6192 - DNA, 1488 bp, Glycine max
aaagtagagagaagagaagcaattaccccttttcataaaaccctagcaagtaaaaaccgtcccttttcgtttctgttctctgtgcttcgaaaaccctaactaaactcgcgtggtagctccaatgggaggaaagaggaagaagagcgatgatgatgatgacgtggaagcagaagcagaagcttcaggttggaagaagaaaacgagaacgacgtcggagagagagaaggagaagaaggagccattgcgtccttcgatgataaagaacaaggagaagcgatcggagctgcacgcgaaactgaagcaccagaagaagctcgagaagcgcgccaaggccaaggctcgggacgctgctctcaagaaagctctcgagctcggcgaggagcctccagagaagaaggtccctcgcactatcgagaacacgagggaactcgacgagaccgtttgcaagcccgatgacgaagagttatttgctggaaatgatgctgatgaatttggtccaattttgaatcagcaacaaactcccaagatattaatcaccacttgccgcttccattctactaggggacctgcttttatatcagagttgctttcagttataccaaatgcacattacttcaagagaggaacatatgatctgaaaaagattgtagaatatgcaaagaagaaggacttcacttctattatagttgttcacaccaatcgtagggaaccagatgctcttttaatcataggtgtacctgatgggcctactgctcatttcaagctctcgaaacttgttttgcgcaaggatatcaagaatcatggaaatccaaccggtcacaagcccgagcttgtattgaataacttcacaacacgtctagggcatcgagttggaaggttgatacagtcacttttcccacaagatccagaatttaaaggccggcgagtagtcactttccacaaccagagagacttcatattcttccggcatcatcggtatatttttgaaaccaaagaagttaaaaaagcagagtccaagggtaaaaaggacaaagatggcgagagtgagaatgttcctgaacagaaaacaattgcccgacttcaggagtgtggtcctcgtttcacattaaaattgattagcctgcagcatggaacatttgacaccaagggtggggaatatgagtgggttcacaagccggaaatggacacaagccgaaggaggttcttcctatgacttgtttgggaaggttgcattttggacatcttttttgctggaaataggttttatccggtgaagagggttaattatcttgaggttgttgggatctttcaacttaattctggtgtatcatttttttaaaattttttttatttttattttattgggggctaaagtcctatcatctctgtaagccgtgagcaattttgaccttacatctattggtggttgaggaagagataacaaaggtttcttataagcaaatatataagcaattttgtattatggtc

SEQ ID NO: 6193 - DNA, 1559 bp, Glycine max
  misc_feature (6)..(6): n is a, c, g, or t
  misc_feature (1521)..(1526): n is a, c, g, or t
cccggntcgacccagcgtccggtggaaggcgagggtttgaggtgcgcaagcaaacaaagatgaaagaagcggatgagcaactatgcgaggcggccattaaaggtgacacgaagaaagtgaggtctcttatatactccggcgctgacgtcacccactttgacggcgatggcctcaatcctctgatgcacgccgcaaagcacggccatgcacccgtcctcaccctcctcctctccgtcggcgctccctggaacgctctttctccctccaacctctccgccggtgactacgccatgcaagaaggccacaacgaaaccttcgagcttctcctcaacgccgggatccaatctgaactgatactgggaacaattgcgaggaaggcaaacaagaacggcgattccggtcacgattatttggaagatagggtgagttttagcgaagacaagcttatggactctgaaagcaaggctgtgatgatggcatgggagaatccgttgatggaggctcatgctaaggcggtttgttccggtggtggccacgtactcaatattgggtttggtatggggctcgtggattcggccattcagcgatatgcacctgcttcacacaccattgttgaggctcatcctgaggtttatgaacgcatgcttcgctccggttggggccagaaggaaaatgtcaagattgtttttggacgatggcaagatgttctgcctcagcttgaaacatatgatggaatattcttcgacacctatggggagtactacgaagatctgagggagttccatcagcatctcccggcattgttgaagactggtggtatctactcattcttcaatggcctttgtggcagtaatgcatttttccatgttgtttactgccatttggtatctcttgagcttgagaatttggggtattccacacaattgattccattgccggttaaggattgtttgggagaacaagtttgggaaggtgtgaaacaaagatattggcagctcgatacgtactatcttcctgtctgtcaggccatagagaaccctgagtgaggcaggaaatggatctcctgcagcttagaaagaactgcaccctgtgcagttacaaatttcaccatccatgcaagtttttttctctcctttatatattaaaattaaaggaatggttgaaatctcatgcagttttatttttaactgtagaggatcttaatcccagtgatgtatggtttgattttaataacatcgtcaattattctaacacgccatgtgtttttgcttgtgtaacgtatcaaatggaattgtaagaatacagttagagtcatattgaacttttgagctttatttgtaaatttcattacattggttgtcttttgaatttagaagtcattggctaaccaacttggttcaagaaaatgcattatacacgaaggatttcatgttaaagtgtacacttaagaacttcagttttattttcacgtttaaggctacagctcgtctctctttccaataagccaaatcaaatttcccnnnnnnccaatgttaagcttttctatatgaagttaggct

SEQ ID NO: 6194 - DNA, 1387 bp, Glycine max
  misc_feature (8)..(8): n is a, c, g, or t
  misc_feature (18)..(18): n is a, c, g, or t
  misc_feature (23)..(23): n is a, c, g, or t
  misc_feature (26)..(27): n is a, c, g, or t
  misc_feature (461)..(461): n is a, c, g, or t
ctgcaggntaccccggtnccggnaannttcccgggtcgacccacgcgtccggtggtctatgttcttcttctacccttcgcgaatggattctttctctccctttttcgcgcattcgatccgtgtatttcacgccttgtgtttagcctctcaccccaaagcacttcatcacaatgcaaatcaccaaatcttcgtgtttttttttattcctctattgtcatgaatttctctagaggtgtgggcattcggcgccaagtatggccacccaaagatgttaaatctcatgatacagcacccctggatcaggacaacaggtttcaagcctcaagattcaccccattattcgtatcttatcctatactgcacaatcacctaaacggtctaattgggcctcattacttacctgcaatgctgcttcaagacaaaacaatgccctagattaccgcgaaaaagagagagagaanaaaagtaaactcgaaaatgcttaagtcaaagccaatagatgtgaatgggaaatggcgataggggcttcactggcataaggagcgtaacgctcactcccttctctcgtggccctcttctcttctctcaaaggactgaacgaaaacctttagggttcctctgttcttcttcgccccaaaaaaaattctcaggctcagaaaaattcaaccgttctcgccattgcccaagctccagcccctcgcatttccaattctccgcccaaacccttttgttggaaacagagtatccgagagacccttcacaacatggcaaaaacgaggccaggcagaaaagacgtggattcctacaccatcagaggcaccaacaagatcgtaagagctggggactgtgtgctgatgcgcccctctgataccagcaagccaccgtacgtggcgcgcgtggagaagatcgaacaggataataggaacaacgtgaaggtgcgtgtgaggtggtattataggcctgaagagtctattggaggacgcaggcagttccatggagcaaaggagctgtttttgtctgaccattatgatgttcagagtgctcacacaattgaagggaagtgtgttgtgcactctttcaagaactataccaagcttgagaatgtaggtgctgaggattactattggtggtttgggttcaaagctgccactggggctttcacgcctgaccgtgttgctgtgtattgcaagtgcgagatgccttataacccagatgacctcatggggcagtgtgaagggtgcaaggattggaaaaccagtatattctgcttttttttgtttactgtattacatttggggagaggggtttttgtgctgtctctaattttagattaaaaaccgtgtgcttttgatgaaggaaattggtcctgagagccgctaaaggctgc

SEQ ID NO: 6195 - DNA, 1185 bp, Glycine max
  misc_feature (1169)..(1169): n is a, c, g, or t
  misc_feature (1178)..(1178): n is a, c, g, or t
ggtgcccctcttctaattcttctctcaaaaggactgaacgaaaaaaccttagggttcctctgttcttcttcgccccccaaaaaattttctggctcagagaaattcaaccgttctcgccattgccgaagctccaactcctcgcatttccaactcttcacccaaaaccctttttgttggaacagagtttcagagagagacccttcacaacatggcaaaaacgaggccaggcagaaaagacttggattcctacaccatcagaggcaccaacaagatcgtaagagctggggactgtgtgctgatgcgcccctctgatacgagcaagccaccgtacgtggcgcgcgtggagaagatcgaacaggatagtaggaacaacgtgaaggtgcgtgtgaggtggtattataggcctgaagagtctattggaggacgcaggcagttccatggagcaaaggaactgtttttgtctgaccattatgatgttcagagtgctcacacaattgaagggaagtgtattgtgcactctttcaagaattataccaagcttgagaatgtaggtgctgaggattactattgtaggtttgagtacaaagctgccactggggctttcacgcctgaccgtgttgctgtgtattgcaagtgcgagatgccttataacccagatgacctcatggtgcagtgtgaggggtgcaaggattggtaccatcctgcttgcgtgggcatgactattgaagaagcaaagaaattggaacattttgtttgttcagaatgttcatctgatgatgacatgaagaaaccccatgctacattttctgtatcaccaggatctgatgtcaaggttgagccaaagcggcggaagagatgaccatcacgaagaattaactcatcttgcgaatgcaactcttgctgaatttcgcgggctatgtggtagctgttgtgtgtgtattgtacagcttctaccagaggctataaaaacatcattttatgtatttgactcaggctatgtatgtattggtcttagatttatgacagacattgatctgtttcccttgtgtccagaaagagtaactcctgtcagtgttaatgtttgagaaaacatcaggccttgaatactggagtaaaaagaaatgatcaattttctgaaatttgaaaaaaaaaaaaaaaaaaaaaaaaanaaaaaaaanaaaaaaa

SEQ ID NO: 6196 - DNA, 1584 bp, Glycine max
tcgagtcagctacgtaggccccccccccccacacacaaaagctatgatcacaaatttggtaagtagttgttgaattcaaatcgagcttcgctttctcttccctgcactttgcactttgcactttgcactctgcacagcgcaatggcgtgtttgttgagagcgagaaacccctgttactctctgatgaggcgcattcgaatccggtgcatgagcaacgttcccgagaacacggtgtattcggggcccacctcgcagagctcgaccaagcgcgtcacgctgagccagttgcgccagaagcaccgcgcctcccagcccatcaccatggtcaccgcctacgactaccccgccgcggtgcacctcgacaccgccggcgtcgacatctgtctcgtcggcgactctgcggcgatggtggtccacggccatgacaccactctccccatcacgctcgaggagatgctcgtccactgccgcgccgtggcgcgtggagccaagacgccgcttctcgttggggacttggcttttgggacctacgagtccagctccaatcaggcggtggatactgcggttcgtatgttgaaagaagggggaatggatgccataaaactggagggagggtcgccttcgagaattgttgcagcaaaggctattgttgaggctggaattgctgtcatgggccatgtaggccttactccccaggccattagtgttttaggggggtttagacctcaaggaaagaatgttgctagtgctgtcaaggttgtagagacagcgttggctttacaagaagcagggtgcttttccgttgttctagagtgtgtgcctgcaccggttgcggctgcaaccacggcaacccttcaaattcctacaattggaattggggctggacccttttgcagtggacaagtgctagtttaccatgatctgcttggtatgctacaacaccctcaccatgcaaaggttactccaaaattttgtaagcagtatgcacgtgtaggagatgtcatcaataaagccttactggagtataaggaagacgtgataaatggttcatttcctgatgctcaccatagtccatacaaaatcagcaaaacagatgcagatgttttctcaactgagttgcaaaggttaggtctagacaaggcagcatctgcagcatctgaagcagttcagaagatggatacaaccaaatcaactagtgaagggaaacaaacaaaataataatatagtatagctagagattcacccttttttcgctcgtaggtcccaatgtgataatttagcatgctacaaaatgaagttacataattaaatagaagttgagcagttgactaatggatagatagacaccattttcgtagggaaggccacttcaatttcaattgtttttcctcttatccttttgatcatcaatgccaatgcaaaaaaattcttaatgttacagaaacagcatctttgatgtccaacattatgcatggaattttcaaaacaaccctgttttgaagcattgtaaaggagcaaaatgtgcgaaactagttgattttattgttattattatttatgcaattcaatactgatgtaagccca

SEQ ID NO: 6197 - DNA, 615 bp, Glycine max
acaattgtaagcatccattgaagtggttagagggagggtgaggatgcagggaattaaattagggtttacaataatgttggtggttgctggcattgtagcagtgccacgcatctcgggtcaagtatgcaatggtaatttgggtactattcaagaggaatgcgaggagtactataaacccggagggccaactattccgccatctacagaatgctgcaacgctctgagaaatgttgatgtgccctgcatgtgccgacttgctaacaattttcagtcatacttcagcgggggaaaagttgtctataccctcaggcagtgtggaaaagatgttcctcccggaaccacctgcggaggttaccgtgctccccctgcttctactcaggtgtgaacgtcagcattgaagacgtatgcatacaacttcccttacctcgggatccataaataactaaataagccaaacatggcctgcatgcgtcattgcgtcctacatattgtgtttttctttttctgtttatgataaataaatatatttcactggtttatctatgacaccgacttcaatgttaattcagcagcagtgatatatatatcatcccattatatttaaaaaaaaaaaaa

SEQ ID NO: 6198 - DNA, 2506 bp, Glycine max
  misc_feature (511)..(516): n is a, c, g, or t
  misc_feature (1544)..(1549): n is a, c, g, or t
  misc_feature (1679)..(1683): n is a, c, g, or t
  misc_feature (1760)..(1764): n is a, c, g, or t
ctcctaaaaaactacccattaacttatgttagtcacacaacacactaaaagttcagtttcttataacccattaactagttagctcatagccgaatttaaatattttcttctgcagaaaacaatgcagctttttgttttcaatttctatggaaccacctttcttgttatttacggtacggtttttattatggggattgtattggaattaggagccgcccctgctcctgcacctgcaccattgctgcctccatcggaagcaaatgctatactcaacagtggatggtggaatctatcacagttagattcacacaatatctgttcatggaatgatatagattgcaacgtcgctggaagtataactggcatcagatgtccatttgatacaccggggattcgattagcaacactaaacctctctgttttcaagaatttagagtggctagacctttctcacgacaaatttcaagacaacaaatttcaaggccccattcctggtgagttgttgtttctnnnnnntcttagttggttagatttgtcctataattcacttgatggtgagatacctcctgcactggcaaatcttacccagttagagagcctagaccttccaacccgcgccgttcaaggccccattcctggtgagttgttgtttctacaaaatcttacttggttagatttgtcctataactcacttgatggtgagatacctcctgcactgacaaatcttacccaattagagagcctaatcatatctcacaacaacattcaaggttcaattccgcagaatttggttttcttgaaaagtcttactttgttagatctatcagccaacaaaatcagtgggaccttgcccttcgcgtcagctacgtaggccccccccccattacttgacatttccgacaatctactttctggttccttaaaacccttgtcagtaggaaaccatgcacagctaactactatttacctcagaaacaactcaattagtggaaaaattccaccagagcttggatatttgcctgtcttaagtactctggatctaagatacaataatcttaccggaacagttcctctatctttgaaaaatttccatagcgtgaacctttcattcaataatttgaagggtcccattccatatggtttaagtgagattcagctaatagggaacaaggatgtatgtagcgatgattcctattacatagataaatatcaattcaagcgttgttctgcccaagacaacaaagtaaagcacaggcacaatcagctggtcatagttctccctatcctcttttttctaatcatggccttcctacgactcgtgcggctaaggcatattcgcattgcaactaagaacaaacatgcaaagacaactgcagccactaagaatggggacttgttctgtatatggaattatgatggaaacatagcctatgaagacatcattacagcaacccaggactttgacatgagatattgtattggaacaggtgcctatgggagcgtttatagggcacaattaccaagcggcaagattgttcccgtgnnnnnnctccacggatttgaagcagaggtgccagcttttgatgagagtttcagaaatgaggtcaaagtattatcagaaataaagcatcgacatattgtgaagctccatggattctgcttgcacagaagaatcatgnnnnngatatatgagtacatggagagaggcagcttgttttcagtgttgtttgatgatgtggaagccatggaattggattggnnnnngagggttaacattgtgaaaggcactgcacatgctctgtcctatcttcatcatgacttcactcctccaattgtgcatagagacatatcagccagcaatgtcttgcttaactcagactgggagcccagtgtttcagactttggcacagcccgattccttagctttgattcatcccatcgaactatagttgctggaaccattgggtacatagccccagagcttgcatatagtatggttgtgagtgaaaggtgtgatgtgtacagctttggagtggtggcactcgaaactttggtgggatcgcatcctaaggaaatactctcatcacttcaatcagcatctactgagaatggcatcacattatgtgaaatattggaccaacgcctcccacagccaacaatgtcagttttaatggaaatagttagtgttgccatagttgcatttgcgtgcttaaatgccaatccttgctctcgcccaacaatgaaatcggtctctcaatgttttcttactcagcttacaccattagacattcctttgcgtgagatttcattgcagcagctcatgagtcaagaactcaggcattatttaaatttgtgaactcctgaaagtgaaacttctagttgaaattagatgtgtcagcattcaataaacttgcaacatatacccttaaaaaaaaaaaaaaaaaaggttgaattagttctcgtgatatgttgtttgtatggattacaaaacttgtttagtttgtaa

SEQ ID NO: 6199 - DNA, 1101 bp, Glycine max
tctttcatttgataaggctgtttcaatattgtgtagttccatgttcaaatcagagatttgtttttttttggcatttaaagaattctccagcgcgctatttaagtcaaaattatcactattcttagtttcagtctcttcatttgccgtttgcaactgatttcggagaacccccttctctctttctaaactaagaagcattgattgtgcacgttccacttcatccatcagaagattgacctctgattgcttagatgccctctcttcctcagattgggcgcagagttcaaacaactggttttgtgcgagttcatgcaatttctgcatagtagaaacactgtctttggcatgctgcaactgatcttgcagtgcctgttccctttctttcaaaacttccattgttttctgattctcttctgccagactgcgttgcttaatctccacaatttctttcactttctcttccatctgttgctctaattgcctgtttctctcttcaagtcgtcgtattgtagcctgctgattcttcaagtgagttgcctctgtcctgaactcctcaagctcaactttcattttccggttttcagattcaagctcagatatcttgagatcttgctcagcaattgacgcaagagctggataaggatctggagcttcatagagcttttgatagatgttgagaaaagcattttctccaaactttgctctcttcgtaagattgtcaacctcttcctgatagcccttaagcaaggaattgaacaaacttaacttatcctcaggcgaagcctttttgaagtctctagtgttctcggcaagcttgcggcgatttttctgactgctttcctggttctcagcaattcgaagcccttgctcatccagtatagatttctccttctccaactcaaaatctttccagaaggcggagacgacggagatcggagaagaggagggagcggtggatttgtctcgctcgggtccggatccggatccaccttgtggagcctccatttctggtgcagtgtctgaattggttgaaggaattgtattttctttctctgtctctgtttcgggttttgtttttggggggggggcctacgtagctga

SEQ ID NO: 6200 - DNA, 1251 bp, Glycine max
  misc_feature (2)..(2): n is a, c, g, or t
  misc_feature (5)..(5): n is a, c, g, or t
  misc_feature (19)..(19): n is a, c, g, or t
  misc_feature (29)..(30): n is a, c, g, or t
  misc_feature (46)..(46): n is a, c, g, or t
  misc_feature (48)..(48): n is a, c, g, or t
  misc_feature (64)..(64): n is a, c, g, or t
  misc_feature (68)..(68): n is a, c, g, or t
  misc_feature (73)..(73): n is a, c, g, or t
  misc_feature (78)..(78): n is a, c, g, or t
  misc_feature (98)..(98): n is a, c, g, or t
  misc_feature (102)..(102): n is a, c, g, or t
  misc_feature (105)..(105): n is a, c, g, or t
  misc_feature (107)..(107): n is a, c, g, or t
  misc_feature (113)..(113): n is a, c, g, or t
  misc_feature (117)..(118): n is a, c, g, or t
  misc_feature (128)..(128): n is a, c, g, or t
  misc_feature (141)..(141): n is a, c, g, or t
  misc_feature (1200)..(1200): n is a, c, g, or t
  misc_feature (1244)..(1244): n is a, c, g, or t
antgnttcgacccaggaantcattggaannaagtaaaatagtgaancntaggtccacgggaggncaangtttnttcancaggaatcttggccatggtnaganacngngacagncatnngtaagcaggngagaccagatatncatccaatggtataaaagaatgcgaaggtccgggcatacttgttgccaaggagaaaacgtccactgctaagtgtaattctgtccctgaatcccaactccttgtatctttgatccctttccttttttgagaatgcagcaaaaggatttatatcatcctcatatatcttcttgtatttagattcaacatctgacgcgaaaccactttcaagatcttcagcatactttttagaacccctagaaatcactttctcatgattatagtcttgtacataacgaatcttcccatatagtttgacattatcagctttgctcttttccagttccactgttaataccccaatcttctccttcaactgccttatttcctcttctgtctctcgcaagcgggtcctaaatcgatctctttgattacaaatcactttaagcattgagctctgatcttggtctaaggatacttgcctttggtctgtattctcagaaacctcacccccaccagcttctgaaagatcccaatcatcaaggaagttccctttacggtcttttgaattcgaactatatccctttaaaatatcatcttccaacttctgtaccaatttttgttgttcattaacctttgctgtaagctctgctatcttctgttcagctgtttccagtaaggatgttttctcagaaagtgtgaccttcaactgtgttagttcatgttccattttacggttcttatcaagaagaaggggggggggagccctccgcccctccccacttgtagccacttcccagtcttcagcctcgattgaattataacccactgcctgcaaaattttcactttcttgcgcagatcatcaaccattttttctgttggccttgctttaagttctttcttcatctcctcaagggcagcctccttttcattgagcattgcagtaagtttcttgacttcattaatgtgttgatctctttcatttgataaggctgtttcaatattgtgtagctccatgttcaattcagagatttgcttttctttggcatttaaagaattctcaagtgcactatttgagtcnaaattatcactattcttagtttcagtctcttcatttgccgtttngggggtg

SEQ ID NO: 6201 - DNA, 2015 bp, Glycine max
ggctcgagctcgagccgactttttcacttcgccttgttctttcttctcttaggtttccgcaagatctgcaaaccatggcttccaggaaattcgacaaccctcactccggcgacggcgccagtccaggcaaaatcttcatcggagggttagccaaagacaccaccctagagacgttcgtgaagtactttgagaagtacggggagataacggactccgttataatgaaagaccgtcacacgggtcggccaaggggattcggcttcatcacctacgccgatccctccgtcgttgaccaagtcattcaggagaaccacgtcgtcaacggcaagcaggtcgagattaagaggaccattcccaagggctcttcgcaggctaatgacttcaaaaccaagaagattttcgtcggcggcattccaacttctgtgtctgaagatgagctcaagaacttcttctccaagtatgggaaagtggtggagcatgagataatacgggaccacaccacgaagcgatcccggggttttggctttatagtttttgacagtgaaaaggttgtggataatattttggcagatgggaacatgattgatatgggtggtactcaggttgagatcaagaaggctgaaccaaagaaatcctcaaacccagcttctcttcctccatttgctagtgactctagggcacgttcttacaatgatggttttggtggttttggcgattcttatggaagttttggtggtagcgggtatggtcctggttcttataggtcacttggaggttttgggggtaggcttggtgattatggtgggtatggggctggagatgaatttggtggtagttttgggggttatggtggtgctggtgctggtggctatgctggttttcgaggagaatcatcgtttggctactctagtcgctatggatcgtacatgggtggccttggtgctggttatggtggcagcgggttaggcgcatatggacggggtggtggggcttatggaacctatggtggtccaagcgctggtgggggttatgaatcaggtcccggtgctggttatggaggagcaggaggtggaatgtatcccagtaggggaagctatggtggcagtagtcgttaccatccttatgcaagatagttttattactaagctttgcagtagaatttgtatgcaggtttaagcattttctagacacaaggcacttactgcaggtggccactttctagaagtcagaagaaccactagcatgtctgttttatctattgcttagacaaccgaaggtagaaacatcatcagtctagagctttctgagcatcatcaatctagagcttcccatcagttatcagcctatatggattttagataggcacattctgctttaatgtgatattcagatgtttgcattagactgtcgctattctggattcgatatttagttagaaacatggtggagttgtgttaatgtgtattattgtaggtcatacttgctagaaatttgcttgaaatagtacttgttctccatctttcctttagttatgtttggttagcctatgttgaagatgttgacataaccttttcaggttaaactagttactacagttctgtgatttagttacatgcctagttagatcatatccatgcgatagatctgaattagtctcaacaggtttctgaagtcacttttcttcctaaagggctgttttgacggcatataatgtttagcagtggccagttggatcatgtagaaaggcagattattgatctgaactcttattctaagacttccttagattttggtgtttagcattcgaatggtagatattttctccatgcttagggtttttgtggaggagttaaattcagaaactaaatggtgatgccaattagacattttatatcctgtggtaaaaaaaaaaaaaaaagacagtgtctagggagcgatgtttcatgaaattatatttaggtgctgtccgccaagcatctttaaatctaagtcatacaaacagcttgtttgtattt

SEQ ID NO: 6202 - DNA, 1330 bp, Glycine max
gcacaaaaattccacgcggttccacctccgcttcctcttttccttaacccgcaagttacaacgcattctcaaaaatctcgataaataaattattttctcttctccaaaattcaactcaataatcccttccctggttcccatcatggacgaattagaagaaaccctactcacccaaatcgactgggaatcgttcctcgacgacatacctgaacttaacgtcgatgattttttgcaggacgacaacgccgttcctgttgttaccgacaatcattcctccccgaacgacgaccccgttttgtccgagatcgagaacatgctcatgacgcaggccgaaaacgacgctgtcgttttgcccgagacgccgtcttcggaggccgggtattacaagctcttcgaggagattctggtggaggagcccaaggaaggacccgtgagcccgccttcaaaaatagagtccgaggaaggctccgacaaagacaagaccgatgatgctgcttccgatgaacccatgtcgaagaaattaaagaggcagttgaggaacagggatgctgctgtgaggtcaagggagaggaagaagttgtatgtgaaaaaccttgagatgaagagtaggtacctagaaggggaatgcagaagactggggcatttgctccagtgctgctatgctgagaacaacgctttgcggctttgcttgcaattgcgtggtacatatggtgcttcaatgaccatgcaggagtctgctgtgctcttgttggaacctctgctgttgggttccctgctgtggtgcatgggcatcatatgccatctcagtctgcctctaatgctgtgggttgcagcagtacttccaagagaaaacatcgagcagaagggcctaagaagggtaactcaaaaaggatcagaaagtaagatctctgagtgtttccagatgcaatcatttttaaagagtagaaaaagccgagcttcaagaacaaagatgaaattcaattttatagtgttctaatgttctataacttctgaagtgggggctctaaggttttctattcatctcttctttctttcgttcgttttctcttttgttttattggatttataaatacggtcgaacttgttagaggttctgtgatatgcttttttaggtgctgttcttgtaacttatattgggaccataacatgttgcgttcttatctttaacatagacgtcgttttgagtttttggcagttcaatgaaacttattgtttgcaccaaaaaaaaaaaaaaaaaaaaaaaaaaaaaaaaaaaaaaaaaaaaaaaaaaaaaaaaaaaaaaaaaaaaaaaaaaaaaaaaaaaaaaagg

SEQ ID NO: 6203 - DNA, 660 bp, Glycine max
gcgctctagcaagtttgtggctttgtcttatcattggttaccatttgttgtcatctctgattccaccgtccacgtcatcaccgccaccgccaccgccaccgccatctactgattcgttttttgctccttcctcaggaaaatgggattgtggaccttacttgaggggttcctgcttcttgcaaacgcactagcaatactaaatgaggaccgctttctcacacctagaggatggggcttatcagatttttcagctggccagacaaaatcttttaaaggccagcttataggtctcatttatgcaactcagtacctaagatttcctcttatacttctcaactctgtcttcattatcgtgaagttagtttctggatgatgcctgaaaaggttccaagagttatcatcaggttatttcaatttgttttaaggtaggaaaatttgacagtagttatctaccaaaaaaatgatcaaagtattgtagaaatattcattaaaagtattttttttgagatattgaatcattgtcctaaaatcatgtttgccattgtgacataactagtcagaaaatgagattcattgtgattgtgatattagttgtgcgggtgttgtattcattttttaagaattaattacgtctgctgatgttcctattgtagattctca

SEQ ID NO: 6204 - DNA, 1257 bp, Glycine max
tcgagtctcagctacgtagtgccccccccccccggtggaccgcattcactttctcctacctcgtccttctaacccaacctcaacctgtttctccgagaatcacatccaacgcttctgtcatggaggaagttaacgttgtggaaactaaggatggaactgtctcagtagctgctgcgtttgctggtcatcaggaagccgtgcaggatagagaccacaaatttttaagaaaagctgttgaagaagcatataaaggggtagattgcaaagatggaggcccttttggtgctgttatagttcataatgatgaaatagttgctagttgtcacaacatggttctgtgtaacacagacccaactgctcatgctgaggtgacagcaataagagaggcttgtaagaagcttaagcagatagaacttgcagattgtgaaatatatgcttcttgtgaaccttgccccatgtgctttggtgcaatccacctttctcgaattaagaggttggtttatggagcgaaggctgaggcagcaattgctattgggtttgatgatttcattgcagatgcactgcgaggtactggattctatcagaaagcaacactggaaattaagagagctgatggtaatgaggccatcattgctgaagaggtttttgagaaaacaaaggaaaaattccaaatgtattagatatgtcattcttttcagaattgctttcatttaaattattgaaactgttgatagtggattgaactcatttgagtacaacaaattctacgatacaagttggatttgcctcagataatgactatctcattgttaaccaattctaatatacatcctcacacaggaggatatttgataccctgcttttctcatttatcatgtcattgctgctgatgttgacatcaaacttttagatttcctgaagctacgttctcatgtgcgaacaaaccttaataccattggagtaaaaataaagtgggtggtttgtgaatttctaattccaaattctaatattgccattggagttctacttccaacaacagtatttttgggagtccatgcgatacgtaaccacattgttagtagaataatttagagagttagtaacttggaagcaaggataattagaaaaataaggcatgttgcttataaataagaaaaaagactgagagggtgatcgtgtgatttaagaggaatttaggttgctgtgggagagtccaaacctaccaaaactcctgaaaatgatttgttctctctatga

SEQ ID NO: 6205 - DNA, 1523 bp, Glycine max
tctccttgggtcatcaactgatcattgttttcgttcatagtttttacatatatttatgcacgatgaatcgtttcaagaatatcgggaagccctatatgagggctcttttaagacacgggaacaatttgaatgttcataaaatattcaggaggtgaaattagtaaaagaaaaaaaagttgggcccaaatcttgcgggttttttttatttgtttcccctttcagtttgagccccacgtcagctacgtaggcccccccccccattttgttccccaaccgagtaaaagaaaaggctgtgtccgttactcgggagtggaagatggcgacggcgccgggaaatcaaatgttggagggcggaggaggagcgccgcagcctccgggtacagacatgaccggaatatgcttccgggatcagctctggctcaatagcttccctctggatcgcaacttggtcttcgattacttcgcactctcccctttctacgactggacctgcaacaacgagcagctccgcatgcgctccgttcaccccctcgacatctctcaactctcgaaaatgacggggacggagtatatgctcagcgaagttatggagccgcacctgtttgtcattcgcaagcagaagagagatagccccgacaaagttacacctatgctcgcgtattacgtcctcgatggttccatttaccaggcaccgcaactgtgcaatgtttttgccgccagaattggaagggccctttattacatacaaaaggcttttactacagctgcctcaaagttggagaagattggatatgctgggtcagctgattctgaaaatgagactgcattgttggaatcaaagactgctaaggagacaattgacataaaggaagttaagcgagttgatcatattcttgcatccttgcaacgcaagttaccaccagctcctcctccaccaccatttccagaaggttatgttccacctccaactgcagaaacggagaaaggcactgaaactcaagaagcagcagaaacgcaagctcctactgctgatccgataattgatcaaggaccagcaaaaagaatgaaattttgatataaaagacatactgcaacggctattaatacttatacaggtggaggaaaattatattattccttaacaagcggccgttgctaaaacatgattaacttaatgttattctctggtctaaaatgcgttgctcttttcctgtcttcaccataaatgtagatattatcactgaaataggattaagttctcctgttttttcattctagacaatgtattgagcaattgtaacttgtaagggtaaacgaaactagtgtccttttcgcattgaacattttctgtattttacgttgacgcagggacttgcattgatcctagttttccctgaacacctcgggaaattgaattgctgatcaattgagtgtataaatattgcgtacgtcaactagggaatagattgaattgtcttataaaaaaaaaaaaaaaaaaaaaaaaaaaaaaaaaaaaaaaaaaa

SEQ ID NO: 6206 - DNA, 1149 bp, Glycine max
  misc_feature (1124)..(1125): n is a, c, g, or t
cacgcgtccgagcgcttaaaaaaacgaagacaatctacagcgcgtttttttttttttttttactctccgtctcgtgctcaatttcctctctgcctcgcgcccaacccttcttccctcgcgaaccctctcgtcttcatcgacctctttgatgggaaacaagagaaggagaagagggaaaagaaacgaaaggaaggaaggagaaggggcgtgaaggttacatctggtggctccgatggcagatttggtggcttcgaggcgcatgcgacaatgtgaaacctcgatggatgaagtttatcagaacactggcagtgagcatgaggccaaatggcataacataagtaactgtgctggaatgctcttcagtaccaggaataatttggagtattttttatgaaaatctgttcaagaagcatataaaggggtaagattgccacgagggaggcccttttggtgctgttatagttcataatgatgaaatggttgctagttgtcacaacatggttctgtgtaacacagacccaactgctcatgctgcggtgacagcaataagagagaaatttgcacatgatggacatgccctgccccgttggatagcaaagcttgtaagaagcttaagaagatagaacttgcagattgcgaaatatatgcttcttgtgagccttgtcccatgtgctttggtgcaatccacctttctcgaattaagagggctgaggcagcaattgctattgggttttgatgatttcattgcagatgccttgcaaggtactggattctatcagaaagtaacattggaaattaagagagctgatggtatatcattgctgaagaggtttttgagaaaacaaaggaaaaattccaaatgtattatatctgtcattcttttcacagctgatggcaagtagccattggagttctacttccaacaacagattatgttctccttcataactttgcagatttatatagcttggattatttgtgtataagttaattttaaaatgaaaatgagcaaattttttaaatgtttctggatagcttggattgtgtgtacgagtttgaaacaatgaaagtgaacgaaatctgatttattttatatatatatatatatatatagcgcttcttcnnaaaaaaaaaaaaaaaaaaaaaaaa

SEQ ID NO: 6207 - DNA, 959 bp, Glycine max
gcccggggattttcaagaggggcatctgtgtatagaggtgtgacaagacaccatcaacatggaaggtggcaggcccgaataggaagggttgcaggaaacaaggacttgtatcttggtacatttagcacacaagaagaagctgctgaagcatatgatatagcagcaatcaagttcagaggaacaagtgctgtgaccaactttgacataagtaggtatgatgtgaagagaatctgctcaagctccactcttattgcaggagatcttgcaaaacggtctcctaaagaatcaccagctccggttcctgcctctgacttcaattcgtgcggttcatcgccgatgccgctggtgtctcagccacctcctttggctataactgatggtgaacattctgatgagttgtccaacatgatgtggaatgccaacaacagtgatgagcaagcacagaatgagagtggtggtgctgaattcaacaacaatgtaactgaatcatcatcatcacaacaggtttcaccaagcagcaacaaggatgctttgaaccctcaaagccccaatgagtttggagtcagtggagcagattatggacatggctacttcacccttgatggaccaaaatatgatgatgggaacaatgaaaatgaccacatgagcaccaacaggcttggaaatttgggattggttaatcaagttcccatgtttgctttgtggaatgaatgaagggaatgttatgttgatgagttgagattacaaaaaacattagcttaggaaaaaaaactaagatcagatggcagaattattgaatgattattatattgtagcttggtatggtaactttttattttatgttgaaagaaaggggatatgtcagtagtgctgattccttaaaaaaaaaaaaaaaaaaaaaaaaaaaaaaagagacaaacacaaaaaaaaaaaaagggcggccaccgactagtgagcac

SEQ ID NO: 6208 - DNA, 1326 bp, Glycine max
aaaaagcatactgtttgaaaccccaaagagccattactcatataaccatcctctttctctcatcttttcttttccacataacctgcaacttgtttcgttgatcctcacttttttttcttctcgggatcacttcctcctaaagctacaaaaactatttttgtttcctatatagcagggaagagggaccaatttttttcggtgaccttcttccaatacattggcttcctggtggacaagattttgcaaaaatcatggagggaatgcgagacagaaactcacagcttgaactccaagaccaagagggtactaatattgggtcctctttgtcaaagctgatattaacaagtggcacaaacaccctcgattcaattttctcgaattgccccacaacaacaaatggcagcactagaagcaactccgtgttggattatttagagccctttgggtctttggggtatgagcctttggggtcttccgtgtacctccgccaaagggacatcctccaaaagttctaccaagaaagccgaggaaatgggtcttataatgttcccacttcctccttgagtaattcgttgacgaacccttgcaagaaaaagctgtacaggggagtgaggcagaggcactggggcaaatgggtggcggaaattagactcccacagaacaggatgagagtgtggttgggaacctacgacaccgccgaagctgctgcctacgcctacgaccgcgccgcgtacaagctccgtggagagtacgcgcgtttgaacttccccaatctcaaggaccccaccaagctaggtttcggtgactccgccagattgaacgccttgaagtcctccgtcgacgccaaaattcaagccatatgccagaaggtcaaaagggagagagccaaaaagaatgccgccaagaagcttcacaatagcactgaccctaaacgcggccagagtgagaagccctcctcctcgtcctcgccgtcgccgtcgccgtcgccgtcgatttttaacgataattgggcgaaccagttgttttctccggccgtttcggaggatgggttttggaagggggagaattcgcattcgccggcctcggttttgaccgagtgtcaaacagaggaaacagagttgttgttcgaaggttgttctctggctagattgccttccttcgaccccgagttgatttgggaggttctgaccgtttaattagttgatactgtcttcctttcttaggttactacttacagcgagcgctcatgtcatgtgtatatgaaaaatatatattattagtgtggtcttgttttgtttgtcggaatgggaagaggtcctttagcgt

SEQ ID NO: 6209 - DNA, 773 bp, Glycine max
atccgttattttttcttctgcgcttcttctctggtctctggcttccttggtacgggaagaactcaatcttgtccatttccctttggtttttctttcttcgatctcttcaccttcctttcgaccactctcttatcaccgctcgctttcttaactagagccctctccgttgagtgacgagttcgtgaatattcgcttgagatttgactgcgaagctggttttagagggtttctccaggtgtggtttgatttacagtttctgatgctgaagaaataaaaaagcttgaaggcttttgctcttctgtgtgaaaaatgttggaaagtggtgcgaaattcccaggaataatagatctcaacaaaaataataacaactactatgatttctctcaaggcttttaccataagcttggggagggtaccaatatgtcaattgacagtgttgggagcttgcagacaagtaacggcggaggatctgttgcgatgtctatcgataatagcagtgtcgggtccaatgattcccatactcgcatgttagaccaccaagggttgcggaggcgtgccaatgataactactctgttgcacatagtgccaatcgtcggggaagagtcacccatgctttgagtgatgatgctttagctcaagctctaatggacaatagttctccgactgaagggcttgaccattttgatgagtggacaattgatttgaggaaactgaatatgggtgagccttttgctcaaggagcttttgggaaactttacccgaggtacttaca

SEQ ID NO: 6210 - DNA, 1827 bp, Glycine max
tcagctacgtaggccccccccccccatccgtttcattttcttctgcgcttcttctctggtctctggcttccttggtacgggaagaactcaatcttgtccatttccctttggtttttctttcttcgatctcttcaccttcctttcgaccactctcttatcaccgctcgctttcttaactagagccctctccgttgagggtttctccaggtgtggtttgatttacagtttctgatgctgaagaaataaaaaagcttgaaggcttttgctcttctgtgtgaaaaatgttggaaagtggtgcgaaattcccaggaataatagatctcaacaaaaataataacaactactatgatttctctcaaggcttttaccataagcttggggagggtaccaatatgtcaattgacagtgttgggagcttgcagacaagtaacggcggaggatctgttgcgatgtctatcgataatagcagtgtcgggtccaatgattcccatactcgcatgttagaccaccaagggttgcggaggcgtgccaatgataactactctgttgcacatagtgccaatcgtcggggaagagtcacccatgctttgagtgatgatgctttagctcaagctctaatggacaatagttctccgactgaagggcttgacaattttgatgagtggacaattgatttgaggaaactgaatatgggtgagccttttgctcaaggagcttttgggaaactttaccgaggtacttacaatggtgaagatgttgcaatcaaaatcttggagaggcctgaaaatgatccagcaaaggctcaattgatggaacaacagttccagcaggaggtcacaatgttggccacactaaagcattctaacatagttcgtttcattggtgcatgccgcaagccaatggtatggtgcattgtaactgagtatgccaaaggtggttcagttcgacaatttttaatgaagcgtcaaaaccgctcagttcccctcaaattggctgtcaaacaagctttggatgttgcaagggggatggcttatgttcatggccttggatttatccacagggacttgaaatctgataatcttttgatttttggtgacaagtcaattaaaattgctgactttggagttgcccgtattgaggtgcaaactgaaggaatgacacctgagactggaacataccgttggatggctccggagatgatccagcataggccttacacacaaaaagtggatgtatatagctttgggattgttctatgggaactcatcactggtatgcttccatttcagaacatgacagcagtacaggccgcatttgcagttgtcaacagaaatgttcgcccaatcatacctaacgattgcctagcggttctccgtgacatcatgacaagatgctgggatcccaaccctgatgtcaggccaccatttgctgaaattgtgggaatgcttgagaatgcagagaatgagatcatgacaacagttcggaaggctcggttcaggtgttgcatgacccatccaatgactgctgactgatctgatcctctgcgaaagcaaatgcaaaaaagtcataaaaacatagactggaaaatttgggggcaagatgaaactctggtagtgaagggtgactatattatagctttgtgtatctgtgtgttttatttatttatctggagaccttttgcttattcggtatctgtttactgaatgtctgttctgaattagtaaagagaagacggtgtatgtaatacatgcatgttttacagttatgtatagcttgagttctgaaggcaacataaaatgagatcatgggcgaaaacttttgctttgt

SEQ ID NO: 6211 - DNA, 1974 bp, Glycine max
aaaagctcgagacccgtttccctttcttctgcgcttcttctctggtctctggcttccttggtacgggaagaactcaatcttgtccatttccctttggtttttctctcttcgatctcttcaccttccattcgaccaccctcttatcacagctcgcgttaacttaagccctctccgttgagggtttctccaggtgtggtttgattttcagtttctgatgctgaagaaataaaaaagcttgaaggctttgctcttctgtgtgaaaaatgttggaaggtggtgcgaaattcccgggaataatagatctcaacaagaataataacaactactatgatttctctcaaggcttttaccataagctgggggagggtaccaatatgtcaattgacagcgttgggagcttacagacaagtaacggcggaggatctgttgcgatgtctatcgataatagcagtgttgggtccaatgattcccatactcgcatgttggaccaccaagggttacggaggcgtgccaatgataactactctgttgcacatagtgccaatcgtcggggaagagtcacccatgctttgagtgatgatgctttagctcaagctctaatggacaatagttctccgactgaagggcttgacaattttgatgagtggacaattgatttgaggaaactgaatatgggtgagccttttgctcaaggagcttttgggaaactctacagaggtacttacaatggtgaagatgttgctattaaaatcttggagaggcctgaaaatgatccagcaaaggctcaattgatggagcaacagttccagcaggaggtcatgatgttggccacactaaagcatcctaacatagttcgtttcattggtgcgtgccgcaagccaatggtatggtgcattgtaactgagtatgccaaaggtggttcggttcgacaatttttaatgaagcgtcaaaaccgctcagttcccctcaaattggctgtcaaacaagctttggatgttgcaagggggatggcttatgttcatggccttttattgatccacagggacttgaaatctgataatcttttgatttttggtgacaagtcaattaaaattgctgactttggagttgctcgtattgaggtgcaaactgaaggaatgacacctgagactggaacataccgttggatggctccggagatgatccagcataggccttacacacaaaaagtggatgtatatagctttgggattgttctatgggaactcattaccggtatgcttccatttcagaacatgacagcagtacaggctgcatttgcagttgtcaacaaaaatgttcgtccaatcatacccaacgattgcctacctgttctccgtgacatcatgacaagatgctgggatcccaaccctgatgttaggccaccatttgctgaaattgtaggaatgcttgagaatgcagagaatgagatcatgacaacagttcggaaggcccggttcaggtgttgcatgactcaaccaatgactgctgactgatcctgtgaaagcaaatgcaaatgcaaatgcaaatgcaaaaaagtcataaaaacatagactggaatatttgggggcaagatgaaactctggtagtgaaggggtgactatattatagctttgtgtatctgtgtgttttatttatttcttctgaagaaaaaaatgaaaatcttatctggagaccttttgcttattcggtttctgtttactgaatgtctgttctgaattagtaaaaagaagatgctgtatgtaatacatgcatgttttacagttatgtatagcttgagttctgaagtcagataaaatgagattatgggcgaaaacttttgctttgtaaaaaaaaaaaaacagttgcagttgcaccacaactaccccggggattgacatactgcctggtttggttcaactggggcttaaatttagcaagtaaaagaaaataaatcagagttatccaattttgact

SEQ ID NO: 6212 - DNA, 1790 bp, Glycine max
  misc_feature (832)..(832): n is a, c, g, or t
  misc_feature (1000)..(1000): n is a, c, g, or t
  misc_feature (1037)..(1037): n is a, c, g, or t
tcagctacgtaggccccccccccgtgaaggctctcacttttgcaactcaaaagcttcaaacccaaagaagtagtacttggcttatagccagtgatgaacactaactgcattatgtaaagattgcatttttgctcccacaaggacaacctcatttgtcaaatatggattacgagaggatccaaaagcctcagggtggtgggggattttcaccgggaaaattgaggagcatgctactgggtgtggagaagaagaggaaagaagaggaagagcttgattctactttcaccacgagatctcagaattcagacatggatgaatctggtggtagcagttctgatcattgtaaagacgtagatgttgtgagtgtccttcctgattattcaacttctgctatagttcgcactagtagcgtagaggcagttggtggtgatcgttttgtgaaggctaatgcaggagtgaattcaaggagtagaatcttggaagacccttcttcagattatgatagtgggcacgataatatgagcatgtcctcgtcaatgtttgaatttcaaaaggccgagcgtgccccacagagggttcccgtggggccattctcaaaaccagcaccatctaaatgggatgatgcacagaagtggatagcaagtccaacttcaaacaggccaaagacagtgcagagccaggggcaaggtgggcaaagtgggcatgtaggaccgcgaaaggttggtagtctttggttatggaagccggcaatcttcaatgaaggttgttgttgaagttccagatcagaaagaaattgctttagatgaaccagataccaagcaaattgatacanatcagactaaaatggagactggaggacagaaatttgtgagttgggaggctgatccctatgcaattgcaagttcttgtgctcggtctgtgtcaatgagagatatgggtaccgaaatgacccctattgctagccaggagccatcaagaacaggtaccccagtgagggcancaacaccaatgcgcagccctaattcttcccggccttntactccccccagagcctcccctgcatctactttaactgatctacatagtgacaatctgaatctcaacatgaatgagttgtccgaaaaggagctacaaatgaaaacaaggcgagaaataatggttctcgggacacaactaggtaaaatgaacattgctgcctgggctagcaaagaagaggaggataaggatgcatccacttccctgaaaacaaaagcagaaccccctaagagtgtcgttgtagcacgtgcagcggcatgggaggaggctgagaaggccaagtacatggccaggtttaggcgtgaggagatgaaaattcaagcatgggaaaatcaccagaaagcaaaaacagaagccaagatgagaaaaattgaggtagaagttgaaagaatacgaggtaaggcgcatgataagctaatgaacaaattagcagctgcaaggcataaacccgaggaaaagcgagcagcagcagaagccaatagaaatcatcaacctgcaaaagctgaagagcaagcagagtatatacgaagatctggtcatgtcccttcctcatatttatcattttcttgctgcaattggtgctcttaaagaaagccaatcctggtcaatgtttgtttttacataggtatgcaatgccttttgctgcttacacccaagcatgttaaatatgtctgttgcatttccctcgaggtgtaaaatgttacattgttctgctgaataattgcaaattgaaagtgctatgttatttgtccagt

SEQ ID NO: 6213 - DNA, 1557 bp, Glycine max
cacatgctttccacctcataacataaaataaccccacttatataattcattcttctcccttcagctacgtaggccccccccccattaccatggtttccctttccaccaccccttttcttcccttcactgcaaaaaatgcttctactagaatccctcctcccacatcattctcttacagcaagcaacgtagtaacagggatcccaggaaggttgtctgcgcctgcatcgctcctcctcaaaacttcaagagccaggactcttccgccattcatttcaatggttcgtccaaatcagagcaattgagcactgcgcgggatcatgaggatgattctgatgttcttattgagtgtagagacgtgtacaagtcttttggggaaaagaaaatcttaaatggtgtcagcttcaagatcaagcatggtgaagctgttggaataattggtccctctgggactggcaaatctacagttttgaagattattgcaggacttcttgctccggacaagggggaagtttatattcgaggtaaaaagagagttggtttagtaagcgatgatgacatatctggtcttcggattggattggttttccaaagtgctgcactctttgattctttgactgttcgtgaaaatgttggttttctcttgtatgaacactcaagcatgtctgaggatcagatatcagagcttgtcacggaaaccttggctgcagttggattgaagggagttgaggatcggttgccttctgagttatcaggtgggatgaaaaagcgagttgctttagctcgatctattatttgtgacactacaaaggaatcaatagagccagaggtgctcttgtatgacgaaccaactgctggacttgatcccattgcatctactgttgttgaagatctgattcgctctgtgcacataaaaggacaagatgcacgtggaaaacctgggaatatttcatcttatgtggttgttactcaccaacatagtaccattaaaagagccattgatagattgttgtttctacacaagggaaagattgtttgggaaggaatgactcatgaatttacaacttcaactaatccaattgtccagcagtttgcatctgggagccttgatggtcctatcagatattagaacagtactgcaattttaaactagataacatatggattatggctggtcttggctacttccatggagtgtgcagataagaattagcaaaaaattgtctgcaacaaggattaacggtcttgtcaggattttggtattaaattccaatttgacttttacagaattggccgtctgcattggattagaaagccggcaaggacagcttttttttcttttttttcgtttttaagttagaggacagcttattgttactgatgacttgattcattggcaatagaaggtgcatattgcctgcacaccatatatgttagaagagattggtgtaaccccatgtattaaatatttgttttatgcggaaacttgaaatgaagtattaaataattcttctaaaaaaaaaaaaaaaaaaaaaaaaaagaaaaaaaaaaaaaaaaaa

SEQ ID NO: 6214 - DNA, 1796 bp, Glycine max
cccacgcgtccgctttgataaataaaataaaaaacagttttttgaaggtgatattttcgcctgcgaggtgtcgacgcccgcgccgagggcgcatgtgtatgtagcgtgcacccttccacattctttctcgttctcgatctctctcgatttttccttcccttttctccataaacgaggtgcttcagatttgctcataataggagggaatcgaatcgaatcgaatcgaaaggaaagtgcagaatggatgacatgccgttgccggcgctctttgagcaagcccgcaagatccacgccgcagccaccgattccggcgccgaccaggaggttgtgaagaaggggtgcgaggctctgcatagatgcgaggacatggtcaataatctaggtttgttctctcccaacgagaccaaagaagatatcagcaccacgaatctcaaatacattctggtgccattttatcttgcggagttgacagaaaaaatagcacaggatgacaggatacagattctaaagtcttcccaggcaaaacttaaggagtttatctcattttgtgaagcaatggagctggtcccaaaagaggagttagaatcttacattgatggggcaccaaaaactgttgctgatcagagggccaggaagatcgctaggttcaaacgtcagagagctgcagaatcaaagttgttggaaataaaagagcgaaaggaacgacgtgggcgttctactaaagcagctgccctgtccacccctgttgaggcaggagaggaagaagtattggatgatgatggggaagaagaaagagaggcttggatcactaccatatctttggcaatctgtaaggcactagatatgctggatatgttgaagaaagaggaagagatgctttctgctgtaaaggatagacaatccaaggatggggataaggagttctctaaggatgttcttgatgaacgtgccaagaaagcagaagcttggcatcgtgattctgcagttcgtgcacagtacactaggccatcaccaccaatcacatgtgccactttcgcccaagatgttctagaaggaagagcaaaggcttcacaagaacacgatcacaagcatcaacccctaatatttggaccagctagccttgtaaatggaaacataacaactgagagagaaagaatggcagctcaggtcttccaacctagtcataggatgccaactatgagcattgaggaggccgggctaaaagaaatggaaataatgaacaaatggcaagagagaaatgtcaaactcatggaagaagtcaattcatcttggcacaatgataggaagtcaaagctaggagaagacgatgatgatgaagatgatgatgctgcacaggagaaagcaagggcttgggatgactggaaggatgataatccacgtggtgctggaaataagaaacttaccccttgtgggtaaactgaggtcttccctggcttaagtaacgggcttaggataaaactgtttttaacgaaatcccgtaatttggagttgatatactacttgtagttagattgtgttaagattatatgtataccaggattttcatttgatttacatgtgtttttcttgtgagtgctagtagggtcctaccctaccccacccggttttgcatgctctttcccaagtatatttgtggaatttgtagcttgcttggcaatttacaccagaggttgcatcatactaaattttctagaaagacaaatagcttttgaataattttgagggaatagttacatctcttttagaaaggttttcagtatattctttggttatcc

SEQ ID NO: 6215 - DNA, 1811 bp, Glycine max
acaacacaaaaacaaaggtgaaaatggagttagttctaaacagcacaacaattggagttggagttgtttctctgatcctcctcttgtacttgtttttgcgtggtggttcatggaagagtggggaagagggtcctccaacagttgcaggtgcatggccaataattggtcacctcccattgttgcttggttcaaagacacctcataaaacattgggtgacttggctgacaagtatggacccatattctcgatcaagattggtgccaaaaacgcagtggttgttagcaactgggaaatggctaaagaatgctacaccacaaacgacatcgccgtttcctccctccccgatcttatctccgctaacctcttgtgctacaaccgatccatgatagtcgtagcaccctacggtccctattggcgccaacttcgaaagattttaatgtctgagttcctatctccttcccgagtagagcaactacaccatgttcgcgtctctgaagttcaaagttccatcacggagctcttccgtgattggcgtagcaataagaatgtccagtctggctttgccactgtggagttgaagcaatggttctctcttcttgtcttcaacatgattctgcggatggtctgtgggaagcgctatttcagcgcttctacttcggatgatgagaaggcaaacagatgcgttaaggctgtggatgagttcgtgcgtctcgccgccaccttcaccgtgggagatgccattccttatcttagatggtttgactttggtggctatgagaatgatatgagagaaactgggaaggaattggacgagattattggcgagtggttagatgagcatcgacaaaaaagaaaaatgggtgagaacgttcaagacctcatgagcgtgttgctttccttgcttgaaggaaaaactattgagggcatgaatgttgatattgtcatcaaatcctttgtattgacagtaattcaagcaggaactgaggcaagcattactactcttatatgggcaacaagtttgatattgaataatcctagtgtactagaaaaacttaaagcagaactagacatccaagttggaaaagagagatacatatgtgagtctgatttaagtaagttaacatatcttcaagctgtagtcaaagaaactttaagattgtaccctccagctcctctctcaagacctcgtgagtttgaagaggattgcactataggtggctacactgtcaaaaagggaactcgtctaattacaaatctttccaagatccacacagatcataacgtttggtcaaatccattagagtttaaaccagaaaggttccttacgactgataaagatatagacatgaagggtcaacattttcagctattaccatttggaggtggtaggaggatttgtcctggaataaacttaggccttcaaacagttcgtttgacacttgctagttttttgcattcctttgaaatcttaaatccatcaactgagcctcttgatatgactgaagtctttagagcaaccaacactaaagccactccacttgagattcttattaaaccacgcctatctcctagttgttatgaaagtatctaatatttaattatgtgttagttgtgtgaacctgctgtctgtattttttatttttaaactatatgtaatctgttttaaaataagcctggtttgccttgtaagctattccaaaactatgtattttgttgcttaatctcatttgaataaacatgaagcaagagattgatggtgttttcttcaaaaaaaaaaaaaaaaaaaaaaaaaacccggtctagttctctc

SEQ ID NO: 6216 - DNA, 1084 bp, Glycine max
gtgttcacggtggcagatgctattcctttcttgagatggtttgattttggtggctatgagaaggccatgaaggaaactgccaaggatttggatgagatttttggtgagtggttagaggagcacaaacaaaatagggcttttggtgagaacaacgttgatggaattcaagacttcgtggacgccatgctttccgggtttgatggaaaaacaattcatggcatagatgcggataccatcatcaaatccaatttactgacagtaatttcaggaggaactgaatcaatcactaatactcttacatgggcagtatgtttgatattgagaaatcctattgtattggaaaaagttatagcagaacttgacttccaagttggaaaagagagatgtataactgagtctgatataagtaagttaacataccttcaagctgtggtcaaagaaactttaagattatacccttcagttcctctctcatcacctcgtgaattcatagaggattgcactttaggtggctacaatgtcaaaaaaggaactcgtctaattacaaatatttggaagatccacacagatcttagtgtttggtcaaatccattagagttcaaaccagaaaggtttctaaccacccataaagacattgatgttaggggacatcattttgagctattaccatttggtggtggtagaagagtgtgtcctggaatatcctttagccttcaaatggttcatttgattcttgccagtctttttcattctttttcattcttaaatccatcaaatgaacctattgatatgactgaaaccgttggattaggcaagactaaagctactccacttgagattttaattaagccacgattatcttctaattgttatctatgaaagcatgtgattcttgtcttagcggtttgtggaaagtccattgttaaattatgtaatcttcttttagttgaatcaggtttgcctgataaattatgtcgaaactatgaataattgtctctcatttaataatatcatggattgttaagggaaagtctgatctaaagatttttgttgaggattattcggctataatagaatttgaatg

SEQ ID NO: 6217 - DNA, 1555 bp, Glycine max
agtacggctgcgagaagacgacagaaggggaagaaagtgagggaaaaaagtagagtggtatgtgggttgctgcggcaacaaaaccattcatcaaattccaattccacagacacactacttctcttccgcttcttctgatggcaaaccaagcttcactctccttttcttcttccgtgtctcctgttcacgcgcctctcaagcgcgtgggcacgcacaacggaagctttcattgcgacgaggccctcggctgcttcatgattcgcctcacgaacaaattcaacagcgccgaaatcgttcgctcccgagaccctcaggtgttggaggttctcgatgctgttctcgatgttgggggagtgtatgaccctgcccgagatcggtatgatcatcatcaaaagggatttgaagaagtttttgggcatggtttttccactaaattgagtagtgctggtcttgtttataagcattttggaaaggagattatagccaaagaacttgaggtagatgaggaacaccgagatgtgcatcacatatatttggctgtttacaagagcttcatggaggcaattgatgctatagacaatgggatcaatcagtatgatacagaccagcctccaagatacgtgaataatactcatttatcctcaagagtaggaaggctaaatttggattggacagatcctgatcagtcacctgagaaagaaaatgaggcctttcaacgtgcaatggctcttgctggcagtgagtttctggatagtgttcgatttcatgtcaattcatggttaccagcaaggtcaattgtaatggagaccctagcggctagacatactgttgatcctagtggagaaattctagttttgactaaattttgtccttggaagcttcacttatttgagcttgagggagagttgaaaaatgaccctgctgtcaaatatgttctatatcaggatgaaagaagcaagcattggcgagtgcaggcagttgcagtatctcctgacagttttcagagccgaaaggctctaccctcacagtggcgggggttaagggatgaagaattgtcaaagaagtcaagcattcctggatgtgtttttgtgcatatcagcggatttattggtggaaaccaaaactttgatggtgccttggccatggcaaaggctgctttgaagatgtagacgaggatcatatgaaccaagggctatcactgattttgcgcactcattcacagtacactttactgattgcgttgaagaatgcatatgaaccatggggactgggaacagtggcttaaagatggttctatatcaagttcattaactcatttgctgataggtggtctatcttatccaaattttctttcaatagtttaaccaatgtattagttaatgaatttcttgtgtctattatgttgataattgtcattgatcttattgttataagcatcttataacaaagaatttcttgtgtcaaaaaaaaaaaaaaaaaaaaacattagaacttcagaaaaacgataaatcatttctaaaggtagtccaaattgataccatttacttgtttttct

SEQ ID NO: 6218 - DNA, 1750 bp, Glycine max
tcagctacgcgggcccccccctagccagtgagaaactcctcattctccttcttcttctgctacccatggctttgtcttcttctgagcctcctccaccttcagttcctgctcccgttcaatctaaccctcctccacacttgatgtacaaaaatcgtttacaagagtttacttcaaagtcaggcattaactttcctgtgtatcagaccattaatgagggacaggatcatagtccaaaatttaggtcgactgtgtgggtcgctgatatgggttacacttcccaatccacattttcccataaaaaagctgctgagcatgaggcagctagacttgctttggaaagtatccttaagaggaccagagatgaaggactctctcttgtcaatcagatttctccattttccaagtctatcatgaatgagtacgctgacaaactgcatgtagaacaacctacatacaacactgatcagcaacagctaggaggggtgcttcctatctttataacttctttagttttcaatggtacaagttacactggtgatccagctagaacaaaaaaggaagctgagcagtcagccgcaaaggctgcaattctttcaattatgggtgattctagctcgggaactgtgcttgttgagattattaagtcaaagtctatattttatgatgcaatcaaaggaaagggacgatctctgtcacagcctagtgcagtgttatccacaacaaatgcaggacagatctctattacactggatcataaagatacagaagttgcagcttgtgtggctgataataataataatgagactaaagttgaatttcctgagtttcctaagatgctttccacatgtcaagaactccaaatgatacatcaagaatcttcccttgaagccaataatgtctctttgcagccgggttcagaacattccattgataatgattcaacttcaaaaaagcggaaaaagaacaagaagaagtctaataagaagttacggtcacagactccgctgtcaccgattactggggttcccttgaaccaagtccctccacgtactggagttctcatgaaccaagttactccttgttctacatttctcatgaaccaagttcctccttgtactgctgttcccatgaaccaagttcctccttgtactgcagttcccatgagccaactttatgctcgtacttctcccatggaccaagtccctcctcgtacagctcccatgaaccaagttatgccgtgtactgcagctcccatggaccaaggccctcctcgtactgcagctcccatgaaccaagttccaccgtgtagtgcatttcccatgattcaagtcgctccttgtacttcagctactgcagctccgatgaaccaagttccccctgcagctccgatgaaccaagttcccccttgcactgcagcttccatgaacaaagtccctcttttataggtggcacagtaaaaatgtaaagtgtgatgaaattcttgtgtatgttgcaaactctcagactagagttcatggagagaaaaccgcagatccttgttaaaatttaggaattgttgttaaaatccttctttagtggccgtttttgtttattaagcccgtgtctttcatgttttgggcttcaaactttatatcatgttaaaattgatcttcaaatgttatatcatgttacaattgatattgtatgtttacctaatggtgtcatacattattggttggatttgaacttaaacaaaaaaaaaaaaaaaaaa

SEQ ID NO: 6219 - DNA, 887 bp, Glycine max
  misc_feature (720)..(721): n is a, c, g, or t
  misc_feature (725)..(725): n is a, c, g, or t
  misc_feature (762)..(762): n is a, c, g, or t
cgattgggtaccgggccccccctcgatcagctacgtaggccccccccccccccaaacaaacactatccctggcagtaccaatccatctctttcctctctggcccatgacgacgtcgtccggttccgtgaagaacgcgatgcccccaggcctccaagaacccaacatcaatgccgaaccctcttcctccgccgacgattgctccaactccaacacgaagcccatcgtgttggtcaccaacagtgacggcattgagtctccgggcctcgttcacctcgtcgaagccctcgtgctccagggcctctgcgacgtccatgtctgcgttcctcaatcggacaaatcggcttcggcccactctgtcactcgcggagtaaccgttgaagctttttcggcacaaattaatggcgccaccgcctttgaagtttcaggaactcctgtggattgtgtttcactagcgttatctggggccttgttttcatggtcaaaacctatgctggttattagtggaattaaccggggatcaagctgtggtcatcacatgttctactcaggtgttgttgctggagcaagagaggcgttgttatgtggtgtaccttcattgtcaatatcattaaattggaagaaggatgaaagtcaagagactgatttcaaggatgcagtagtactctgtttacctttaataattgctgctatcagggatgttgtaaacggaactttcctcnnaaanctgctttctgaatatagaaattcctaaatcacctttnaaccagcagggtttccaaatttaattgtaatttggataataatattgagcattttacttcaatatgagaatcttctaggtttgggctatatattgtacaaaatctaatatggatgagtcatgaga

SEQ ID NO: 6220 - DNA, 1269 bp, Glycine max
aggtttttgatttgttcttgttttgtatctttcctccaaggtgttttatttattagattcttctcacactcttcactttttttcgcatatcgctccaccacttatttttttaccccacccaccaattatcttctcttctcttccgccaaggtaatcccttccctctccaataatcaaacaatctcacttttttcttttgatacattcaatctcaaaaattgttttaaaaatggcaatggcagcccaagccatggctcaattccgtttctctcctctatcttctcattaccgttaccattaccagtacaattaccattccaccccttctttcccgtccccgcgacgtcacccccgcaaccaaaggctccacctttccttctccggcggagacagaggcggaagcggcggcggcggaggaggaggagattccgatggaggaggaggcgacaacgagaagaacgtgggattgggagttgtgggaatggtgttaaacggatggagatcgagagtagcagcggacccacaattcccattcaaggtgttaatggaggaactggtgggagtgagtgcggcggtggctggtgacatggccacgcggcccaagttcggtctgaacgaactggacttggttttctcaactcttgttgtggggtccattctgaatttcatcctcatgtatctgctggcaccaacgtcttgttcttcttctagctccacactaccatggatcttcgccaggtgtcccagcagccacatgttcgaagcggggccttacgggagcgtggagcgtttggggactctgttgtacaaggggggcgtgttcgcgctggtggggcttggcgccgggcttgtaggaacagcgatatcgaatgggctgatcgcgacgaggaagaaggtggacccgacgttccagagcccgaacaagtctccccctatggttctgaacgccttcacttgggcggcgcacatgggtgtgagcagcaatgtgaggtaccagactctgaacggtgtggagtttcttttggacaaatggcttcctcctttgctcttccagttctctgttttggctcttagattcatcaacaacgttgctggagggatgacctttgtcatgctcgctaggttcaccggctctcaggctgctgctgctgttcctgttcctgttcctaaacactcttaattactttgggtctagtactttggaattactcatgacgtgccaccttgtcctgagagaaccaacaattaaatgcactatttatttttatt

SEQ ID NO: 6221 - DNA, 2612 bp, Glycine max
  misc_feature (2553)..(2553): n is a, c, g, or t
  misc_feature (2562)..(2562): n is a, c, g, or t
  misc_feature (2585)..(2585): n is a, c, g, or t
  misc_feature (2593)..(2593): n is a, c, g, or t
gccggaattcccgggtcgacccacgcgtccgggccattttcctaaccctagccacgcatcaccgccatcatcgtccaccttccggaaagaaccatctctaatctatctcacctctttcccctttctccaattcaccattcacacactctctctctctccttctttaatttaagatctttcgaacctttctctctcccaccgaaaccctaacaacgacaatcgcgtgttcttctacccaccagaagatcagtggatccttctaaggccagatcgaggtaaaccctactcgaatcagtggttttttgtttctacttttgtttctatttattggggcaatgcaaatttggagctggtggtgacttgcgcaacttatacatatggacacttgagtttgttgggtatgcccccacttggttaagatcgagagttaaagttaggatccttttcatttgggtatcgaggtttttgtttttgcttttattttgcccctttctggttgactagtggattaggtttggacagtgatgtctgtgaacaataataacccttctaagggcattggggcctcttcctcatcctttggtaatgctggagtaccctccaattctataccttcaaaccctggattttcacagtcccaaggacaggcccagattcctgttggttatcaaggacagtttccactgtcccaggcccatgctattgtccaagctcagtccaaggcccaggcccaggcccaggcccaagcagcagctgcagctcatgctcaactccaggctcatttgcaagctcagggattgagtcttaatcagaaccaggctggtggtttgggggtgtcgtcaccgttgatttccacgccgggtaatgcgagtgggaaacggatccctctgaaaccccccatgcggccagttgggttttcccctcccaacagcttctccccattgagaccagtggagctcacgcctgctgctcggaggaagaagcagaagcttcctgagaaacagctgcaagataaagtggctgctattctgcccgagtctgcgctgtatacgcagcttctcgagtttgagtctcgcgttgacgctgcacttgctagaaagaaggctgacatccaggaagcgctcaaaaacccgccatgtattcagaaaactcttcgtatttatgtatttaatacttttgctaatcaaattcgcacgattccgaagaagccaaatgtggagcctccaacctggacgctaaagatagttgggaggatattggaggatggtgttgaccctgatcagccaggagtagttcagaagtcgtctcctttgtatccaaagttttcagctttctttaaaagagtaaccatttctttggatcagagactttatcccgataatcacattattttgtgggagaatgctcgatcacctgctccacatgaaggttttgaagtaaagaggaaaggggataaagaatttacagtgaatatacggctggaaatgaattatgtgccagagaagtttaagctttcaccagctttgacagaagttcttggtattgaggttgatacccgcccgagaattgttgctgcgatctggcactatgtgaaggctaggaaattgcaaaacccaaatgacccttcttactttcactgtgatccgcctcttcagaaagtatttggagaagaaaatatgaagtttacaatggtttctcagaaaatatcatctcatttgttccccccacagcctatacttttggagcataagattaagctctctggaaacagtcctgctggtactgcttgttatgatgtgatggttgatgttccttttcctattcagagggagttgtctgctttattggctaacgtggaaaagaacaaagatattgagacatgtgatgaagcaatatgtggaatcattagaaaaatccatgagcaccgtaggagacgggcattttttcttggttttagtcaatcgccagtagaatttattaatgcattgattgaatctcaaagcaaggatctgaaacttgtatccggagaacctagtcgcaatgcagaaaaagagcgtcgttcagatttcttcaaccaaccatgggttgaagatgctgttattcgttacctgaatcgcaaaccagctgtgggaagtgatgctccaggaagcacatgacaccagttcatattttaatcattcatcatcctttttggcgatgtatctcaagataaattataccttgagaatttctgaagtagctagttttccaacttccatgcttgtattagtggccggaaggaatgctgctccatagtgataatatacaatatgttgttgtatgggtagtagtgtgagcacatttagttgcagtcttgataattgcttgtttaggtgataaatggtaccacaatttcatgtctctcagttgtagtcaactgtgacggattctttggttacctcattgttcatttctccacgcaagatgttttacattattatgaaaaattgtattaggaaagattgattggtgtacagtatcttcagttgtcttgtgacaacataagagaaaacnaatgttgcnccctataggactattgacgtttnatccatanatgggctctgttggcattg

SEQ ID NO: 6222 - DNA, 1180 bp, Glycine max
ggttttccccccgagggaagaggaaggagaaggagaaggacgaggaggttgaggatttgagtttcgatggctccgggttgaactatgattctgatgacttgactgagagcaattataataatgtttctgagggtaatactgggaagaatggtggggttagttccaacgcgaacagcaccgtcatcaccggtttggatcaaaaagggaagaagaagggaatgcctgctaagaatttgatggccgaacgacgccgtaggaagaagctcaatgatagactctacatgttgaggtccgttgttcccaagattagcaaaatggacagggcttcaattcttggggatgcaattgagtatctgaaggagcttctgcaaaggatcaatgatctgcataacgagttggaatcgacaccagtgggttcttcactcactcctgtctcaagtttccatcctttgacgcctactcctcctacgctgccaagccgaatcaaggaagaactgtgccccagctcattgcccagccccaatggccaacctgctagggttgaggttcggctgcgcgaaggaagggctgttaacatccacatgttttgtgcccgcaagcctggtctgttgctctcaaccatgagggctttggataaccttggattagacattcagcaggctgttatcagctgcttcaatggatttgctatggatatttttcgagccgagcaatgcaaagaaggtcaggatgtccatccggagcaaatcaaagcagtactcttggattcagctggctacaatggcatgatgtaactagttttgacaagaaacaaactggtagctgctatttcacagtcaatttggcaagttaaatcagaatcagtttttactttgttatgttcacaattcaagtgtacgatactagctctggtaacttgagttaaagttgaggtagaagaaattttcacatgaattttaccccctgcagcggcagttactatttggtacctttcacttgctcatgtcgaaccgaatcttgatgctactacttcgagttcaattagttcagggacatttctgaaggcgcgttttgacgtgaagtttgtatttatgtttgtcgaacctattgtcctctttatacagttttcgccaaggacaaaactttaaagcaactttcttttaaaaaaaaaaaaaaaaaa

SEQ ID NO: 6223 - DNA, 950 bp, Glycine max
  misc_feature (904)..(904): n is a, c, g, or t
ggttccggccccccccctggagggtggacggatcgataagcttttttttttttttttgggtttttttttttttttttttttttttttatttattttttataatttttattttatcatctgtcaattacttttttaatttagacaagaacatcaaaagaagacgtaataaaaattgttaatgaatgacaatggaaataaaagaaaaagagtaaattacaattaccctccctgttgtgtgagtggcacattgcttttaatgaattttttcttcccaaaatgccatcaccccttctctccagctcagccaccccaacaatgcaagaaccagtatcttccacaacttcaagcgggaccaagagcagcaaaaaaataaaataaaaatgaaacattgttgtttacttatttcaattttgcttgtagttgtattacatcggtttgaaaagcataaagcttaagctggatccaagaagagaagttgataggaaattggagcaattggggtgagatgatgaggtgaggaaatgggtttgcttaccacttctactctttattcatcacatcgctgcaacaactctacaaatgtgttaattgttctcgtgagaataaagcatggtgcaggtggtgaggcacggcggcgcggaagattttgaaccacccttggcggcggcaaccatagtgtaagatgatagatgcaagtgttgcttgcctcccctcagctccgacatcactcacgctgccacctcccttccaacaccgtcactgtccagatctggtgctcccttcatttttttcactttgcaaatctttttttttttcaaaagttttttctaattttttaacagacgtccgagggatgatctcgtgcaaattctgcacagccgagggatcactagttctatagggncggcactcgcgtggagctcagctttgtcccctttaatgaggttaat

SEQ ID NO: 6224 - DNA, 1404 bp, Glycine max
cacgagaccattacctagaacatcctaatcgaaaaaaaacaaaaacccctcgtccgctccaaaattctaaaacctgaaagtaagcatactctgctcgtgttttgcgtttcgttgcgatgttggaaatcaaaaccgccaagacccgcaagggcaagcgggagctcgagaagcgcgcccccaagctcgtggaatcggggaagaagacgctgatcctgcacggaacgaagaccagcggcgtgctgaacgccgtgctcgcgcagatttatcatttgaagaaggacagcgccgtcaagtacagccgcaagaacgagaacgtcaagcctttcgaggccggcggcgagacttcgctcgagtttttctctctcaaaaccgattgcagcgtatttgtgtatggatctcactcgaagaagcggcctgataaccttgttatagggagaacttatgatcatcatatctttgatttagtggaggttggagttgaaaattttaaacccatggagtcttttagttataataagaagttggctcctaaggaagggtcaaagccttttattgtttttattggagaaggatttgaggctgtggaagagctaaagcatttgaaggaagttttgctcgatcttcttcgcggtgaggttgtggagaatctaaatcttgctggagtggatcgtgcatatgtatgtgctgccctttctccgaatcgtgtgttttttacacactgtgcattgcggctgaaaaagtcaggcaccgttgtgccaaggatggaattggaagaagttggcccgtccatggattttgttcttcgtaggcatcgtcctcctaatgaaagtttgaggaaggaagcactgaaaacgtcgagggagaagccgaagaaaaaggagaagaatgttaaaaaggatgaattacagggaaagattggaagtatttatatcccagatcagaaggttggagaaactcctttaccttacaaagcaaaaggagtgaagagggagcgccgagaatcgaagcggaaaaatgagagtgatggaagtgcttcaaaacggaagaaggaagattcttaatacttacaaattacacttgttgtctttccctggcatctgattataatagaatgatcaattgtagatcatatgatattaaactgcatgttgtttaggtgtcatgaatattcatgattttcccctataagggggggttttgccatcattttattcagcgtatttttttccccttcatattttgccaagttgaaatgcagtcctttgaaccatgagtcttagcttctactgttagtatatcagttcaaagtttagatggatgcttttcatttctaattaggtagtgttggattatagcattttattgtttgcagcgcccctttgcaagtgatcttctgtttttttt

SEQ ID NO: 6225 - DNA, 1434 bp, Glycine max
  misc_feature (1413)..(1413): n is a, c, g, or t
  misc_feature (1419)..(1419): n is a, c, g, or t
tcccccctcttttgttcgggcaggatctccctccccctgggttggggagggagggagacaatcccccccccggggcaaacagcgcgcactcccgcagtaatatttttttgggcggggagagatatagcggaaaatgtcccctaataacaaaggcccccttctctttccccccgggggggtgggggggtattttctataaaaaaaaaagggcgcccaccaaagtttttttctcccataaagaaaaaagcggcgcctagggggggcgccccccaccaataattgggggggttttttccccccccccatggggccccccccgcggggtttcccccttttatgtttccccccgtctttaattttggtggggaaaatggagaggggaaaacaaatttttcccccggggaaaccatttttgcccctttttttccccaaagggggcaatttacccctccttaaaggggaccaaaagggtgggagtctcccccccccggggggggccggcccccttttaagaacttagggggattccccccggggctgcaaggaaccttggacggccgccccgtaccctagaaccctccctaatcgaaaaacgttttgattaaaactagatctagccatggtgagcaccaccaagggctacgaatcttaaaaccaaatttgggcatgatgagcgctgtaatgggttttgaatcttaacggtgagcactgccacagagcagcctcatgatcaaggataacaccattactcgttctctcaatcgtcgaatcagattgagatcgagatcgagatctgaaatcagatctaaaatgcatgatatcgagatttgtgctaatggtggctggttatggtgagcgaggtttgcgcgggttaatggtgggttggtctggatcgcatgtgggctgtttatagctatggttgacatagggtagattcgagacttggtcgtgttggagtgaggctatggtgcttgatgggtttgtggcggtgcaagggtttgtggttggtggcagatctaagcagtagttggttagggtggtgctgtagtgaggttgatggtgggtggtggtggttttgggagatgaaaaagaaaaaggttatggatgaggaggtggaatggtgcaacaccgggtgaaagaggttgaagggaagagtaaaaagttaatcagatcatattagggtgtttaggatttgaggttagattaagaaaaaaataagaaatacatttttagttcttacaatttagtgtttttctgctttttgtccttgcagaaaaatattttaatccttataaattatgtttattttgttgcaaaaaaaaaaaaaaaacgagaagccggcacgagaagccggcacgagaagcgcttctcgtatcgataccgtcgaccctcgagggggggcccggtgccccnattcgnccctatagtgagtcg

SEQ ID NO: 6226 - DNA, 1059 bp, Glycine max
  misc_feature (80)..(80): n is a, c, g, or t
  misc_feature (83)..(83): n is a, c, g, or t
  misc_feature (247)..(248): n is a, c, g, or t
  misc_feature (252)..(252): n is a, c, g, or t
  misc_feature (258)..(258): n is a, c, g, or t
  misc_feature (292)..(292): n is a, c, g, or t
  misc_feature (328)..(328): n is a, c, g, or t
catggcgaaaggtggcccccgggtccgatcccacttgtgtgttcaggaggcaactgcaaagtgtcgtcagagaatcccgnctnggcatcgagatgctgacctgtgtcacctgtaaagtcagtggaacaaggtcttcatcaacgtaacccaaaatgcccttgagggttccctcagactctcccctgatagcagctttaatctgatcataggtgctgggcttcgcaagtctaccagtcagatcacacanngaancatcancagtgggaacacggaaggccattccagtcaactntccgttaagctctgggagcaccttgccaacagcctntgcggcaccagtgctgcttggaatgatgttgaagccggcagcccttccacctctccagtccttgctggaaggaccatcaacagtcttctgggttgcagtcatggcatgaactgtggtcatcaaaccctcaacaatgccaaacctgtcattgataaccttagcaagaggagcaaggcagttagtggtgcagctagcgttggagacaatgtcgatgtcagacttgtattccttctcattgacaccacagacaaacatgggagcatccttgctgggagcagaaatgatgaccttcttggcaccacccttaatgtgagctgcagccttgtccttgtcagtgaaaacaccggtggactcaacaacgtactcagcaccagcagcagcccatgggatctcctcagggttcctgcagccaaacacagcaacctccttctcaccgaagagaagggtcttggagtccttcaccttaacttcatggtgcttccactgtccgtggacagtgtcatacttgaacatgtaggtcatgtagtcggtggtgatgaaggggtcgttgacggcgacgagctcgacatcggggctctggagcgcaaccctggccacaagcctgccgatccggccgaaaccattgatgccgatcttgatcggagccatggggaaggaaatctggagctgcgacggacggaggagggttgagaacagatcgaggattgggacggctactcgagattgcgatt

SEQ ID NO: 6227 - DNA, 1382 bp, Glycine max
tcgaggtcgattgtatcgataagcttttttttttttttttttgggcaaacacaagtactggactgaacgatttatataatcttcacaaaccacaaccaaaaaagagtacttgattagcaactccattacagaagtactagttgatgcggaaaacagaaggtaactcatgtccaactaacatgaaccaggcgtcgtctggcgacaccatccacatttattcttcgcatagacaaagcagggacacctctgaccaaaggaaatcagaacgctctactgagtcttggccatgtggcggatcagatcgacaacgcggttgctgtaaccccactcgttgtcgtaccacgagacgagcttgacgaaatggtcgttcagagcaattccagccttggcatcaaagatgctcgacctgctgtcaccgacaaagtcagtggagaccaaatcttcctcgacataacccatgatccccttgagttttccctcagatgcagccttgatagccttcttgatgtcatcgtatgatgcagccttctcggttctaacagtgagatcaacaactgacacatccacagtgggaacccggaaagacataccggtaagcttgccattcagctcaggaagaaccttgccaacagccttggcagcaccagtgctgctgggaatgatgttaaagcttgcggccctgccacctctccagtccttgctcgagggaccatcaacggtcttctgtgtggcagtgatggcatgaacagtggtcatcaaaccctcaataataccgaagttgtcattaatgatctttgctaggggagcaaggcagttagtggtgcagctagcatttgagacaatgttaacgtctgaggtgtacttgtcctcattgacaccaaccacaaacataggggcatctttgcttggggcagagatgaccaccttcttggcaccacccttcaagtgagcagcggccttgtccttgtcagtgaagacaccggtggactccacaacgtaatcggcaccagcctcaccccacgggatctcctcagggttcctgacgccgaagacggtaactggcttctcgccaaagagcagcgtcttgtcgtccttgagcttgatgtcactgtgcttccagtggccgtgaacggtgtcgtacttgaacatgtaggtcatgtactcggtggtgataaaggggtcgttgacggcgacgagctcgacatcgtcgctctggagggcgaccctggcgacgagcctcccgatccttccgaaaccgttgattccgatcttaatcttgcccatggcgagggagtggaactgccgctgcgacgcgagacggggatgggaggttggctggggacgggacgggagaagtgaagtgtctggaagctgatatggag

SEQ ID NO: 6228 - DNA, 985 bp, Glycine max
  misc_feature (24)..(26): n is a, c, g, or t
  misc_feature (28)..(29): n is a, c, g, or t
tagaacatcctaatcgaaaaaatnnncnntccagttccaacttaataatcaatcagccaactgacggtggagaacggcttgctttgcggccaaaagaggggaggagaggagaggaaaagggggccaagaaacccagagtcgtccccctcctcccgtctataaattcccctccttccctcgtctttatataggaggcatccaacccaaagaggaggaagaacaccaaggactgactgccagcgcctctccgcgatccaaatcctcccgggaaagttcttggttgatctcttcctcctcgaccgcctcccaggttcttggtgtagcttttgccactctcaccaggagatttcatgtctgatcttgacgttcagatcccaactgcctttgacccctttgccgaggcgaatgctggggacgctggtgcagctgccggatcaaaagactacgttcatgtacgcatccagcagcgtaatggtcgcaagagcctgaccactgtccagggcctgaagaaggagttcagctacagcaagatcctcaaagacctcaagaaagagttttgctgcaatggtacagttgtccaggacacagaacttggacaggtcattcaactccagggtgatcagaggaagaacgtctcaaacttccttgtccaggccggcattgtgaagaaggaacacatcaagattcatggtttctgaacaactgccagctccatatcagagtctacatgcaaagcagctatatattggtggtgcagtatatttagttgtgtgctagcgcaagcaggcgttaccagcttgcgcgctctgagtatacggaaaatctagcatagcccacctctctgcgtgtatgcttgttacccttgtgttgaaactttgtaaggagcaccatcgttagatggcttgttaccctctcccatcaaggttgaataataatatatgctttcttaaatgtggtgtccttcgtatcaaaaaaaaaaaaaaaa

SEQ ID NO: 6229 - DNA, 1246 bp, Glycine max
  misc_feature (26)..(26): n is a, c, g, or t
  misc_feature (33)..(33): n is a, c, g, or t
cccccctcccgttccaactttattgngtttaancgggccccccctcgaggtcgacggtatcgataagctcttttttttttttttttactcagaacacttggaagtatattaaacatggtctttaaacagagataaagtgcaatcagcttataagtgcagagatactcagtttatctctgaagacaacacaatcatccattgtttcagagcacacccacgcgaaattgacgagctacatgcataggtccagcacactggagcacttgcggaccttaattaaccagggccgaccttcgggatatcatagtgctcactaagatttgcgaggtactggttgaagtcctggatgcggtccctgtgcgacttgtcagccaccttggccaacttgtgtacgtcgatcttctgcttctgttcaatgtaacgcctctcagctggagtgaggtgatcataatcggcttgcgcactcccttcctctcccagcttgtcagcttcactgaactcattgtcagggtcacctggcaattcagagcttccaccttcgcggagctcgccgtgctcgccttgagacgactcctcgcggcggtgcttcttcttattcttcttcttgactccgccctccttgacatccagcggtttccccttcagcttgagcctccccccaacgacgttctggtactccgacatctcgactgcctgacaggaggaatcgcttcgcgggagcctccgatccgcgccgatccggtggaggatggcaggcacgaggaggaggacgaggggttcgaggcgcttcggtggttggctcggcggctccggtgacggtcgagggctcggcggcggccgatttgggttggggaaggggattctaatggtgcgagaccaccagggtcggtggggctgctttggtcgccatccttttaccgttgggtcctatggtactcggaatcggagtttttttttttcgattaggatgttctaggtaaggaaaggggctctgggggaaaattctgggagccccggggggatccccctaattttttaaaagggcgccccccccccggggggaaacccccctttttttttccctctataggaggggggataaatgggggcgtgggggaaaaaaaggaggaaaaaagttgttcttccgggggaaaaaaattttttcccccccccaaatttccccacaaaaataaataaagggcgggaaaaaaaataagggtaaaaccccgggggggggcgccaaaag

SEQ ID NO: 6230 - DNA, 807 bp, Glycine max
  misc_feature (120)..(120): n is a, c, g, or t
  misc_feature (126)..(126): n is a, c, g, or t
  misc_feature (128)..(128): n is a, c, g, or t
catttgcccatgatcccccagccggcaattaccctccctaaaagaaccaaagctgagctcccccgcggtgccgccgctctagacttagtgatccccccggcctgcaggattcgcacgagnccattncntcccgtccccactttattgtgcttatcttgctctctctatcccatatactcttaccagctaggtagctaagctgccccttgcaaccaacaatggcgccttcaccgagctggagtgcagctgtgttggccgtgctgctggtggtcgtcctgctattggggatgggatgcccggcggccgctgcgacgccatgtacggactgcacagcgcagtgcaactcaacatgcagcgccgccggggcaaggccgtgcggcgcccactgcagcccggcgccgggatgcccgagctgcctcgccgcgtaccacgccaagtgcttgccgtattgcgtgagcgcgtgcaaagcccaatcacctgctgggtacgactgccaaagcgcgtgcaacaagacacagctgtgcagcagctcgtgcagcgccgtctgcggcgagtcgccgacgtgcaaggcctgccaggacaactactaccgtgggtgcatatccagatgcacctcctactgcaactcccactgcgtctaggtctagcaacgactttcgacactctacggagtacgttttcacgtaaaaaaggattcagcgcctcaccaaggaaaaacgtgtcactgtaattttcttcatccaataatcataggagtgctcatatatgtatctgcctccttttccaaaaaaaaaaaaaaaagctcgg

SEQ ID NO: 6231 - DNA, 2411 bp, Glycine max
tcggtcagctacgtaggccccccccccccattattaagaactagagagcaagtcatgtggttaatttttgaaaagggaacattatcgtttagattcagaaatctgatttggaatcaaagcactccctcctctccccctctctgtctatctggtttgtatatacatacatatatataaacataaggtcaatatcgactgcatgttgagatttgagaagatcccagaaagaagctgaagcgttttttttttttttttttgttggtttcttttgttggatctagagaagacaatcttagttgtgaaacccaggagatcgaggttaaactcagtttttatatatacagctgggaaatgaaaattcactgaagccactttttagcatgttgccacttctcagatttctgaatcacatgtaaagtgagcagcacactttacaaaacagacatattgaagatgcatatcaaggaagcagaaagggtggtcattgccaaaccagttgcatcaaggccaacttgttctactttcaaatctttctcagagctcctagcaggtgcaatcaatgcttctcccgctattccatcttctcaaacaacagtttctgccattagaccaaagacagtgaggttcaagccagcaatgaatcaacccccttctgggtttgttttttctcaggctgatacttttggagctgcacttgataattcctctgagatgagtcctaaacttgacaccaaacagtccctcatatacaagccaacggcaaaactcgtatcaaagacaactgtgtctcttttggcaaatatgggaaattgcagtactagtcggcaacaaacacagcaaccaatggaggccaattttcaacattccatccatgaaaaatttagaaccaacacgagctcaaatcttgatcagagtattaccccgcaaacagaaataaattatcagagcagtgaacctagtaagatggtgcagcagaacatagaggaggaccaaaaagttttaacatcctcagtcaattgtgatcgaccttcttatgatggttacaactggagaaaatatggtcaaaagcaagtaaaagggagcgagtacccgcgaagttactacaagtgcacacatcctaattgtccagtgaaaaagaaggttgaaagatcatttgatgggaatattgcagaaattgtttataaaggtgaacacaatcattcgaagccacagcttcacaagcgaaactcagcagcagggacacaaggatcaggggttgtgtctgatggaatagttcaagatatgtggagtaatagtcacagtgagaggaatgaaggcaatgaagttagaattgagaacacaggactgtctatgcattcagattattatgtcaaagttccacggcctaatgattctgctctaaatgttggtgcaactaatgctggtggagtaagcacggaaaactcgtgtggtctaagtggggaatgtgaggaaggaagcaagggatttgaggcacaggaagatgaacccagatataaaagaaggaaaaatgagaatcaatccaatgaagcagcactatcagaggaaggattagtagagccacggattgtgatgcaaagttttatggattctgaaatacttggagatggctttcgctggaggaaatatgggcagaaggtggtgaagggcaatccatatcccagaagttactatagatgtactaatatcaaatgtaacgttcgcaaacatgtggagagagccatagatgacccaagatcgtttgtgactacatatgagggaaagcacaatcatgagatgccactcaagaacacaggaactgtagcatctgaaagagattcacaggcttctcttagtaaagataaagcatgattgacacttcaattagttagcaagtatgattcaatttcaatggcattggctgtcatcagaaataattcagaggatccattccttttatatcctaaagtatgctcagaataattgaagttgatcagaaagatcaagacattgacaatttcgaatgcagtacctagctactgagactaggatatttacttctacaacaacttgttgataataacagtattggtgctgataatttgtattatatatggaatcaagggcactggctcagtggcactgcccttcaataactttccatctctgctagctgcctttgtataccaaaccggtatattctattgtctatcatcatatataaattaatctggagtacataatatcatatgctaataatttttgttgtaaatcactggcatcgccagaaagaaccccaaaagacctttataaactattagctatggacataattttgtttcttaatgtaatttaatctgatttagtttgtactttcttgttcaatacgttatgatcagcgagcaacgagccat

SEQ ID NO: 6232 - DNA, 695 bp, Glycine max
ttttttttttttttttgtaaatggggaagccatagaggatacatggaacaggcagaacatatcaaaacaatgcattgttaaagcaccaaaattggatagcaaaggtatggttcaccagtaaatcaaccagcaaccaggggctgaattacatatcaaaacattgtctggccagcgtttcacaactcagctaaataaaggctaaaacatcattgactctagtttcctggccaaggatagatacttcagacacaagatgccccacaacttagtcgaacagactgaagcccatgtcatcatcactctcttccttctccacgaccttctcttctttctttgactcagctgcaggggcagcagcacctccagcagcaggggcagcagctgaaacagccacaccaccaccaccagatggaaccgcagcaaacttctccctaccagcagccaagagctcggtgatgtccttgcccttcacttgggacagcatgagttccatcttctcattgtcgatttcacaaccaactgactcaagaatggatgtcaggtcctctgcagaggggctggcgttgccagagaggtaagcaagcagataggcagcaatgaacttcatcttggatcggagaaggaaggagagagctgaaggcgcggcggcggcggagggctcgagcgatctgctagggtttctgcgagtaaggggc

SEQ ID NO: 6233 - DNA, 1010 bp, Glycine max
  misc_feature (1)..(1): n is a, c, g, or t
ncgtttaaaacgccgccagggattgtatccgcctccctatagggggattgggtacggggccccccctcgagtccagctacgtaggccccccccccagtaagcggcggtctaacgaccccctaggttggagctatgaagcttaccttatttattagaaaggactttttcatttcagcttgctgactagggttggcagcgaaattcttcgcgaccccataacatacgaaaaagtttctgagttcataagcccccttagagagaggggcgactttgtagtaattgcgaatgagcaagtagggggcggcaactaaagaggtagcgagactgaccgcaattgcaggtagttgacttgcttacttgttagagtaaggaggaataggttgactttctttttttttgttatggaaagtgaaagttgtttcgtttagtacgagatcgcttcacacctcgcggtgcttacacctctcgcctatcgaagttctgttcaaaaacctcgtccgagaacttgtatagagaaggatttcccgcggcgcagcagttcttccataccaacttagcagcccggcgctgctattggcataacaaccggtacaccataggttggcccaacccagtcctctcgtactagggttggctcctcgcagttctccctttaacaccaacggtagataggaaccgaactgtctcacgacgttctaaacccaactcacgtaccacttgaatcggcgaacaaccgaacccttgggaccttcttcaaccccaggatgtgatgagtcgacatcgaggtgccaaacgactccgtcgataagagctcttgggagtcatcagcctgttatccccggcgtacctttgatccgttgagcgagagcccttccacacgggactcccggatcactatggccgactttcgtctctgttcgaccagtcggtctcacctttctgcaagccggggggaatccctagttctaaaagcggccgcccccgcggtggaacctccaccttttggttcc

SEQ ID NO: 6234 - DNA, 1203 bp, Glycine max
acaaacaccagagttgagtgctccaataataccatggaagctcaagcgtcgttcttgtttattagcttgtttttctctctggtgttgcatttgcttgcaaagcattattacaagccaaaaaccaccctttctcacaaactacccccgggaccaaagaagctacctctgatagggaacctgcatcaactagcaatggctggttcacttccacatcgtactctccgagaccttgcccttaaatacggacctctcatgcatctccaacttggtgaaatttcttccgtggttgtatcctcccccaacatggccaaggagataatgaaaacccatgatcttgcttttgtgcagaggccacaatttcttcctgctcaaattttgacctatgggcaaaatgatattgtttttgctccatatggggattattggagacaaatgaagaaaatatgtgtctcggagcttctaagtgccaagagagttcagtctttctctcatattagagaagacgagacatccaaatttatagaatcaattcgaatatcagaaggttcaccaatcaatcttactagtaaaatttactccttggtaagttcttctgtttccagggtagcatttggcgacaaatctaaggaccaggaagagtttttgtgtgtgcttgaaaaaatgatattagcggggggaggatttgaacctgacgatttgtttccttcgatgaaacttcatctcataaatggaaggaaggccaaattggagaagatgcatgagcaggttgacaagatcgcagacaacattctcagagagcatcaagaaaagcgccaaagggcactacgagaaggcaaggttgacctagaggaggaggatcttgttgatgttcttttgagaatccaacaaagtgacaacctcgagatcaaaattagtaccacaaacatcaaagctgttatattggacgtatttactgctggaacggatacttcagcatcaacacttgaatgggctatggcagaaatgatgagaaacccaagagtgagggagaaagcacatgctgaaggtagacaagcatttagggaattgaaaataatccatgatacagatgtacggaaacttacatactttaggttggtgatcaaagagacattactgttactcgctccttctcctttattggtacctataaaatgcttctgtctaaccattattgatggatat

SEQ ID NO: 6235 - DNA, 619 bp, Glycine max
taaaaaataaaacaaaaatataagaagaataagctcaggagagataccgccttaacatctaccacactttcgtttcagtttgaattttgtgaccttctccctgaggggtcatgctcatgacaaagagcaccaaggtcatttcctgcaacacacaggacatgatgaaaaccctaagaattcttgagcaagttgagctgaggaaacggttttcagatttcagctcaacttgaacagtacgttttttcgattaggattgtcaaggaaagggctctcgggcaattccgtggaaccggggggatcccatagtttcaaaagggccggcccccggcggggaacccccattttttgttcccttaaagggggggtaaattgggcgcgtgggaaaaaaaaggggcaaaaagtgttttccgggggaaaaatttgttcccggccacaaattccccaaaaaaataaaggggggaaaaaaaaaaggggaaaaccgggggggggcctagggggggggcgcacccccccattttgggggggggggcctaagcgggcctttttataagggagaaaaaaatggggggcgcgccggttttttttaaatgaaccccccccccggcgggaggggaggggg

SEQ ID NO: 6236 - DNA, 553 bp, Glycine max
  misc_feature (2)..(7): n is a, c, g, or t
  misc_feature (9)..(9): n is a, c, g, or t
  misc_feature (11)..(11): n is a, c, g, or t
  misc_feature (13)..(13): n is a, c, g, or t
tnnnnnntntntnttttttttttttttttgggtgacataaagcattccttatcttcactaactccagcttcaaaaggatgaatacattcattaaaaaaaaaaacattacatatacatagaagataaatcaactatgaagcttacaagggaatgataacatccaatatctaaaattctagaaactctacttattatatttttataaataacttacaagaaatcttgacctgagtattaaatttttggacttgcaaggtcaagaaaacttgaacattattcataaaattaaaaaaaataaaacaaaaacattagaagaataagctcaggagagataccgccataacatctaccacactttcctttcattttgaattttgtggccttcaccttgaggggtcatgacaaagagcaccaaggtcatttcctgcaacaaacaggacatgatgaaaaccctaagaatggttgagctgaggagcgtttcttcagattaatttcagctcagcttgaacagtcgtatttttcgattaggatgttctaggtaatggtctcgtgc

SEQ ID NO: 6237 - DNA, 1603 bp, Glycine max
ccgaagtgttcaagatggctccgagagcagaatagggccgatgcggagcgggcgcaaagcatgagcgagtgcgatagtcatcattgcgcccacacatttaaccgacgacgatcaagggttgggtgaagtatcatcggtccgtaatattgccgtccccgttacacgatatcacccgcttaataggtctgtctaccgagtggtctgtattggcaaatatatgcgcctgcagcaggccaccgagaggagtcggggaaagagcgagacagggggttacacgcatatgatcccttagtacccatatacttcgataaacgggagatttctaaccgctgagtagcgcaggcctcccaggaacggtaacacgctaacaagccttcacagtgttcggtaataaatggcgagccaatctacagagcccgattaagaggtggagcgcgtcaagggagatcgagcagaggagccatggaatccaaacacagcttccctagtagggcctgccttaagtggggcccatgaacatggagctgctacggcgggggcgacggttctagcagtagtgggtccaccggtgtgcaggaattcctccgagaccgtttcctagggcatcctgtgcaaaccgtccaacaaacctctttcccctccccgcatcccaagcctcccagctccatcgccacacgctcgaacccactcctctcacgctcaagcgcacaccgcaccaaccagagcagccatggctctcaccggcggcgccaccaccgcagcgtgcatcctcgtcctcctcgcgctcgccgacgccgcgggggcggctacccgggcgccagcgccggcgccggcgccggactgcatggaggcgttgattagcctcgcagactgcctcgactatgtgacgcccagcaccaagtcggctcggccttccaaggcttgctgcacggaggtgaagaccgccgtcggcacccccgccaccgtgaagtgcctctgcgctgccatggacgccaagacaactccgataccgatcaacatgacacgggtgctcgctctccccaccgcctgcggccaatccgcctccgtcttgaacaagtgccacgctgcacatgggccgggtggtgctcctgctgaagcaccgtcaccttcagcatccagtggcggcgcgaccgcttcaccaccgaaggcgaatgtggcggcgaggtctccgggcggctccgccaccgttctcttggcaactgtggtgacttcgctgctcgccttctattacctctgagggccaacatctcagcctctctcacgtgttatgttgcacagaccttgtgactctgcgttgcgcggtgttgtaatctgagtttactttgtttatcgggatgggttattatcatgtagtgtcgtggactgaatattgagtgcgtagtaaattgcaatgtaccgtggactgggtattttgaagtcgttgccagttatgacactttatttacttttgaatgcgcagatgactttgttgactttggaatgcgcagatgatctgctacgatcttcttttgggctaaaaaaaaaaaaaaaaaagcttatcgatacggtacccaccctcgagggggggggcccggtacccaat

SEQ ID NO: 6238 - DNA, 2368 bp, Glycine max
tatgaaaaggagcctggtcccacacatgctggaggcagaagcaggcgagtagagcctgaaagaacactgactgatgcacagagggatgaatttgaggatatgctgcgtgctttaacattagagaggagccagataaaagaggctatgggattttctttagataatgccgatgctgctggcgaggtagttgaagttttgactgaatccttgacacttaaagaaacccctattccaactaaaattgcaaggcttatgcttgtctctgatattcttcataatagtagtgctccagtaagaaatgcatcagcatatcgcaccaagtttgaagcaacattgccagacataatggaaagttttaatgacttgtatcgtagcataatgggacggattactgctgaggccctaaaggaacgagtgctgaaagttttacaagtttgggccgactggtttctcttttcagatgcttatgtgaatggattaagagccactttccttcgacctgggaactctggtgtaattccattccattccatatgtggtgatgcgccagagattgagcagaagaccgcttccgaagatatggttgttggtggcaagaccaaccaagatgctgcattggcaatgggtcgaggggctgcaatgaaggagctaatgagtcttcctcttgctgagctggaaagacggtgccggcacaatggatggccacttgttggtggaagagaaatgatggttgcacggttgctaagtcttgaagaggctcgagtccagcaaggtgtgccccccccccccgaattgaaatatgcccacaatcaagtgagttctgggaaatattcaagtaatcaacgagaaacaagtgcagagctggacccagtaggactgtctgcatggaaccactatggggatgaagatatacagtcacagggcagaagttctgtacctttagccccaacccttcctattccacagcctaaacttaaagctttcacaaaaaaggagaagaatgatccagttctgccagcctctaaatgggctcgggaggatgatgagagtgatgatgaacaaagaagtggaaaaaatctcggcttaagctactcatcttctggtagtgagaacgtggatgatggtcttgttaaagctgatgaatcagagtctgcagctgatagaagtttttcagctcatgctgacagtggaatgaatgaagagcagaggcaaaagctgagacgcttggaggttgctttaattgaatacggtgagtctcttgaagagaggggaattaaaaatttggaggaaattgagaagaaagttcagttgcataggaaacggctgcaagtggagtatgggttatcagattctggtgaagatggtcatggccatagaagaacttcagagaggagggattggaatgatgtttcaaggaaacggcatcgaagccctagtccaagtggtagtccactgccaaaattatatggcaaggacagagatagagaacaccacgatttagaaagggatcgagacagacaaagagacagaagtcatgattgcgatggcgacagagggggggaccggcaccgggaaaagagtggaagcagagagagggatgatcatgataaggatagaagcagggatagagacagggacaggagaagacgagccaaataagaacatttcagatgtttcagcagagatttgataccttaatgatttgcaaattggcttgtaagagtcaggaggacagttggcttttcgtcatcacagggatattggcaatgtgaaacctcctgttgggagataggaatgaaacatctgccaggatagtgttactgtggacagtctttggaattgctgagtagtaactggctcttgataccctccataatttcaacttcatgtaatattaagattttaaatcgataattttgcctgtgaattagtgcttgctgctgcacactgcatacctgatcaagagggttctgtcaataccaattgttgagatagtttacagggagattcgtgcgtgcgtgcttgctgggtacacaactgagtgacatgcggttggatctattgaaactgactcttctagtagttgttttttagtttatgaagttctttatggttttagaaactcgtggatgagtttgattgaatagaacttcaactgtaggataacaaacctgtcttaagatgtgaaaattattgatactaaaagcatttatttacatgacatgttaatggagagggaaagttatgttttagtgattatcaaagtaacacgtggaaatagtggggggaccatgtctgatgtgttgactaagtttgcttattctcttgatggttaaataagaatgagtttccaccatctttgttttcc

SEQ ID NO: 6239 - DNA, 530 bp, Glycine max
aagctctacagcatagagatcacaactaaaatcccagaaacagatttgcccaccaacgaagagtcttcaagctctttcaccgcggatcctcctcgcgagctgaatatccttgggcatgatcgtaaccctcttagcgtgaatcgcgcaaagattcgtatcctcgaacaaacccacaaggtacgcctccgccgcctcttgcagagccgcgacggcgctgctctggaacctcagatcggttttgaagtcctgagcgatctcgcggacaagacgctggaaggggagcttgcggatcagaagctcggtgctcttctggtacttcctgatctccctcagcgccacggttccgggacggaacctgtgcggcttcttcactcctccggtggccggagccgacttcctcgccgccttggttgcgagctgcttcctcggggctttgcctccggtggattttctcgcggtttgcttggtacgagccatttgagattcgaaaaggtttgctcttttttgcttagtgagaggatgtgattgat

SEQ ID NO: 6240 - DNA, 1191 bp, Glycine max
gcatgcctgcgcgccacagatgcgccacctttaaagagaagaaaagttatcgttagccaatagtgtagagcaagcagaattctctccatctacaggagagaaagacttcaactattgatgttattaagaatttggcattagtgtaatcatgagtgcgtagcatatttaaatttgaatgtttatggcaattactttggtgaagaaaattcaactagattttcatgccaaaatagtcatgacccatgaatctctttcatcttaatttatatgtttaagttctcctttctcttgacattatttaaaaggagtttctccgttcaagtcgagctcggaggagatattgggctaggagctatgctggatggaggcgatttacagcagcacaaccatctgctgcccatactgcattggccacattagataaagctggccgaatcaattttatgattacccaaaatgttgataggctgcatcatcgtgctggtagcaacccattagaaatacatgggactgtatacactgtaatttgtatagattgtggatattccttttgccggagcttgtttcaggaccagttgaaggcccttaatcccaagtgggcagaagcaatcgataacttggaccatggaaaccctggatcagataagagttttggcatgaaacaaagacctgatggtgatattgagattgatgaaagattttgggaggaggattttaccatcccaacttgtcataagtgcaatggagctctcaaacctgatgttgtcttttttggtgataatgttcccaaggacagagctgatatggcaatggaagcatctagaagatgtgatgcttttcttgtactcgggtcatctctgatgaccatgtctgcttttcgacttatcagagcagctcatgaggctggtgctgctactgcaattgtgaacataggtgtgacgcgtgctgatgattttgtgcccctgaaaataaatgcacgattgggtgagatcctgccaagagtacttgatattggatctataagcatacccgctgtataatgatagatgaaaataatgtattatgttgcattcaaattcagcaaccagtattttatttcatcattcttgccctcatgtaaagatattgacgaggaattaaataaaaagtaattgatgtgtcattttctgaatttaaaaaaaaactcgctcg

SEQ ID NO: 6241 - DNA, 602 bp, Glycine max
aaaacccactagggtttatctcctctcgccgcagcctccaccgaagccaagagaggagcagggcgaaaggaggccgtcggagatgtcggagaagaagcgcgcccccggcccgcgcaaggacgaggtggtgacccgcgagtacaccgtcaacctccacaagcgcctccatggatgcaccttcaagaagaaggcaccaaatgccatcaaggagatcaggaagtttgcacagaaggccatgggaaccaacgatgtccgcattgacgtgaagctcaacaagcacatctggagcagcggcatcaggagtgtcccgaggagagtccgtgtcaggattgcccgcaagaggaacgacgaggaggacgctaaggaggagctgtactctctggtcacagttgctgaagtcccccaggaaggtcttaaaggtttgggtaccaaggttgtggaggatgaggactaaaccccctgtctgtcgtatcgatcagttagaacttaatacatatctgctgagagcatattgggaagtcttgctttagcttattgtcatctactgttcatgatgttccatgacttcttgataaaagatttgagacgttggatatttcaaa

SEQ ID NO: 6242 - DNA, 838 bp, Glycine max
ccaaggatacacgcatagtatctttcatgtttctcaaagattttcgattttttatgggtaacagtacgatacattcaaaactcacggttaacgagaaccactcacaacaatcaatctcacgccagcctgctctccccaccaaccaaattttagggggggaaattcccaaaaaatcaagtctagtgctttacagtcggattattttagattcttcagacgatggcatcaaagtccacggcgagtattctggcgagcgcctcgagccccacgccgccgtcgccgtcagcagccatacttatcatggcgcggatctcgtcgtcggcgaccggcatcccggcccacccgaggtaggccttgaggtcctcgaacccgaccttgccgtccccgtcgcggtccattagccggaaggcgtcctccatcgcggagcggcagccgctgtccgcccccgccttagctgcgcggccaaggaggccctcgaactcgtggtactgcacgaagccgtcgaggtcggcgtcggcggcggcgatcatggcctcgatgtcgtcgtcgtcgaagcgctcgtcggtggcgccggcgttggcgtagaaggtcttgaggtcgtcgcggctgatgcggccgtcgtggtccgcgtccagcacgtcgaacgccggccgcaggttccccgcgccggcggcggcggggaggtcaaggcccgcgtacctgccgccgggacacatgcttgcttcggcgctgcggggagggaaaggggagcctcgcgacagccgcagagctagatcggaagcgcgatctctgtttgtttgtattttcgggaggcggagagggctgggaggctattttt

SEQ ID NO: 6243 - DNA, 1258 bp, Glycine max
  misc_feature (26)..(26): n is a, c, g, or t
ttttttttttttttttcgcgagcganagtgacattcataaataaatttaggtgaaacggacaaaatggacaacacatttgcgaaatggacaaatcataagccaattagagacggaaagaagtacacatcaattagaccgtgggggatagaaatagagtgtggttggccatcgactatagcataaactgaggacattagcgcacctcgacgaaaaaaggtagtaatattgatcaaagcaccattaatataataataccatttagggatacatagatgatagatccaatggtctaataaagtagaacaagcatacaagatgaattatggatcaggggcgatgggggcagaaggtgaggaaatagttagctttggtgcaagtagcaatgctggtggggtcatcataggcataggagtaggccttggggcatgcggtcttgaagatcttggaatagacggtgggcttgcaggcctgtgggcttccataggagccggtgcagcagtacttgggggagttgaaagcggagcaagcgctcttgcaggcaaccacgcgcttgttgtcgcgtgagcgaacttggaggcccacggggcacatggtgttcaggtcgctcacgcagcccgcgtagctgcattttccggatcccttgaatggggtgatggagatgggcaggttgtagccgtccaccaggctcacgtcgtagaagtcctgctcgttgcccagggtcaactccgccagggtcgccggtgggcttcccccgatgccgttgcagaagagggacccgccgcagtcaccggtggcgcagcgcccgcgcccgccgacgtcgaaggcgcagccgtggcggccccagaagcgcccggaccagagggcgggtagctggagggagtaggcccggtttggggcgagcttgaagcctccgcgggccagaacgggctttcctgcgctgggctggatcccgggccacactgggtgggggcacttgttgtagaatatcactgacgatgatgctgaaaccttgagcactgtgaagaggaagaagatggtggtgagaatgggtctaagagtcggcattgtggtgttcaacaattctagctagggctgagctcgccttttatagacgcaattgggggagggatagaattaaagatggtgtttattacgtgattaataaggagtgaatcaagcaggttgaaatgcgggctctgtgctacacgtacaaaccttgggttcatgaaaccagaccatataatctaatcgactttt

SEQ ID NO: 6244 - DNA, 1247 bp, Glycine max
acaaatttaaaaagtcaattatatcacgtggaccataaaaaaaaaggttgccgagcttaatttcctgtatctagctagctagctagctagaggaatggtctattacggctccgagtagacgacagcagggggaagctggaaaagttagaagtagtgaagaaaatgaaagtcattgttttcttcgttgctataataattttaggtgcagaatggcaatgcaatgggtcagagcatgagcatgagcatggccacagctaccaaattttccctttgcgaatgaaaaccggccccggtggccactacattccggaggtatcgtgcaaaagttggaggcttggtgtggaagcacacaacgtcattgactggagaaccattcctcaagattgcgagggatatataggaaactacatgcttggccaccaatatagatcagactccaaaacagtttgccgtgaagcttatttttatgctaaaaccatcaacatcactgccaaaaccacatgggtgtttgatgtagatgagactacactctctaatctcccttactttgctgatcatggatttggggtggagctatataatgcaacagcgtttaatgaatgggttgaccttggcgaggcaccggcactgccagagagtctcaaactgtacaataaactgttgtctcttggcatcaaaattgtattcataacaggaagaccactgtatcaacaggctgtaactgctaccaacttaaagcttgctggatactacaaatgggaaaagttaattaccaaggatacagataaatacaatggtaagacagcagttacatacaaatcaactgagaggcagaagctggaggaaaatggatacaacatcattggaaacattggagaccaatggagcgatatattaggaaccaacacaggccttaggacctttaagttgcctgatcccatgtactacattagttgaggtctctaggctcttatgaatgaaatgagatatgtagtaattaataatggagagacttaacctaggggcactcgttattgctatgtttcatatgtatgtgactttgtgtgagacagtagttacgtgagactgcacaagcacaacttaacgttgttttatctttcgtggttttagtatgatttttattttcagaattgattttgagtctataatcaattttagttctagaattaattttaagtaatttttgtgttaaatcaagaaatttatattaaattatactcgatttt

SEQ ID NO: 6245 - DNA, 919 bp, Glycine max
ataaattgggatgaaattacttaacgacatcataaactttacgtgtggaactgaaagaaaggctaaaaaaattatagagcttttcacataagaatagaaaaccatagaagtaaatataatttattcaaaccaagaggaacaggcaaatgaccatagtaatttgaaccctcctggaaccatcatcctcaatacatacataacataacccatagaattctcgtatcctccgcttggcatgcatgcatgctgacatggagccaaatcagcagtgcttatatatatatatatatatatatatcgtaaagccatacccaaagacttaccattacaataataacattaataataaataaaataaaaatgcaagaaacttcatctacttcaataataccgtatccatgggcttaagcttcagtcttctcaacagaaacttgttctgttttggtttcctcaacggtttcagctggtttgttctcctcttgcttctgttcctccactggtgctgattcggtttctttagtttcctctttcacttcttcttcttctgttctctcaggtgctgggttctcttctacctcaggcttcacttcctctgtcacttctgttgcctcattagtctcaactggggcttcttcttcctcttttgcttctttggtggtttcttcctttggttcttcggtggtagtaacctgggtagctggttgttctggggtagtttcctcaatcttggttacctcggttgcttcattttctgtcacagttgttggtgtttgttgtgcaacctcaacagtggccatttggaatgcaaagaggaaaagtaataaaagaaatgaaattgaagaaacaagtatgaacaggaaaggaaagctaagagagtgcttgtggggtgatcaaagtaagagaagtttatatagtgata

SEQ ID NO: 6246 - DNA, 1138 bp, Glycine max
tctcgagccgaatcggctcgacggctgcgagaagacgacagaagggggatgcaaaagttagtagtagtgaagaaaatgaaagtccttgttttctttgttgctatagttctagcagcatggcattgccatggctcagaccatgaccatgaccatggccacacctaccaaattttccctctgagaatgaaaactggccatggtggccactacattccggaggtatcatgccaaagttggaggcttggtgtggaagcacacaacgtcattgactggaaaaccgttcctcaagattgcgagggatatattgggaactacatgcttggcgaacaatatagatcagactccaaaatagttaaccaacaagcttatttctatgctaaaaccctcaatatcactgccaaaaccgcatgggtgttcgacatagatgagactacactctctaatctcccttactatgctgaccatggatttggggtggagttatataatgaaacatcgtttaataaatgggttgaccttggcgaggcaccggcactgccagagagtctcaaattgtacaagaaactgttgtctcttggcatcaagattgtattcataacaggaagaccactggatcaaaaggctgtaactgctaccaacttaaagcttgctggatatcacacatgggaaaagttaattaccaagaatacatctgaataccatggtaagacagcagttacatacaaatctactgagagaaagaagctggaggaaaaaggatacaaaatcattggaaacattggagaccaatggagcgatctattaggaaccaacacaggcgataggacctttaagttgcctgatcccatgtactacattagttgaggtctctagggctcttactagcatgttcctatgaataaaataagatgcatgttgtaataatggagagatcgacttaaaccaaggagcactcgttaattaattgctatgtatgtgactttgtgtgagacaaaaggtcacgtggtaagagactgtacaagcacaacggtgttttatctttcgtggttttaataaatcatgtgtgctataattccgttaatttaaaaaaaaaaaaaaaaaaaaaaaaaaaaaaaaaaaaaaaaaaaaaaaaaaaaaa

SEQ ID NO: 6247 - DNA, 1012 bp, Glycine max
gtatattgttcttcatgccatcagagtcgaaaatagtttaataattgcaaaaacataccgtaaacctttaccctggagcatgctagtacaacagacggaacacaggcacaaaaacatggcgccttgctttcaggttatgatacaggtttgcttatttatcggctagtcgagcaaaacaggggaaatggcaggtccaatttaatggcaagaggaaatcaacggtaaagggcctcagacttcaagttctcagcaatctcggtctcccagcggtcgccgttctcgagcagtttctccttgtcgtacagcagctcctcgtgagtttcagtagagaactcaaagttagggccttcgacaatagcatcgacagggcaagcttcctggcagaacccgcagtagatgcatttggtcatgtcaatatcgtatcttgtggttcggcgactgccatcttcacgttcttctgcctcaatagtaattgcctgggctgggcatatagcttcacagagtttacaggcaatgcaacgctcttccccagtatcataacgtctgagagcatgctcccctcggaaacgggggctcaaagggcccttctcaaatggatagttaattgtaactttcctctcgaagaagtacttgagcgtcagcatcaaaccacggaccatttcagtcaaaaacaatgtattgatactcctttcaaacacagcactccaatctttggcgagctctttcgcaagctgttctttctcctcgtcctctttgaacctcttgggcgcccccgcgtccatgtaggtccggaggtggccctgcatcgccgtcgcggacgggccgagacgcgccgtctgcctagcgcggagggccagcgctgcctgccgggctaggagcgccgccatggtggcgtcgtcggcgacgaggagacggtgggttcggatcgaaagggggggttgaggtggactgtgcactgtggtctctagttagtggctgggggatgtccgggtgtgtggagaaacaggaactt

SEQ ID NO: 6248 - DNA, 658 bp, Glycine max
  misc_feature (1)..(1): n is a, c, g, or t
  misc_feature (35)..(35): n is a, c, g, or t
nctccatcaggcaagatcctgccctcactcttgancttgaggtagtcatgcgggttgactggggtgaagccccacttcatgctctcaatgatcttttgccgcccagggaacttgaacttggcacgacgaaggccctcagtggcatggatggcattgttgggcttgcaccgcacagaaaggaggacctgcccaatggcaacacgggcacagactccctgcggcttcccaaaagcacccctcataccagtctggagcctatcagccccggcacacgaaagcatcttgttgatacggagcacatggaacgggtgaaccctgaccctgaggtggaaggcatcctttcctgcatgcttggtcatgtacttgttgcaagcaatacgggcagcctcaagagcctcactggacacattctccttctcccatgagacaaggtgaacacagtgagagaactcatcgacacccttcttcttcatgccaacatcatagatcctgatcttagggtcaggcacaccacggcagtaccttgacttggggtacggcttgttcttgatctgccgatagcacctcgcaggtcttctccccatggcgacggcggctcgaggcaggcggcggctgcggcggcggcgggaggagacggaagagctgcgactagggtttt

SEQ ID NO: 6249 - DNA, 2702 bp, Glycine max
ctcagagtgataaggacacaagtagtgctgcaatgacatcccgtgtagtgatggaaatccccaagcatgcgagttcatctggtatcaggaaaattacttttaagttcagtaagaagaaggaggactatgattaccaaccgcctccacctatgcaccatcctgctctttacaatgatggcaattacattggctttcatggggatgatgaagaatatttggcaagggatgattgtagtggtgggtcgttagaaagcccgtgtggaatgggatatgttcgtgatggagatttggacttgtacactcgcaatatggaattgaaaatgtccaagaaagtagtccccaactgctaccctacaaatgtcaaaaagcttttatcaactggcatccttgacggagctgtagtgaagtatatttacaatcctggaaaggttgagctacaggggattattgatggtggcggatatttgtgtggctgttcaatgtgcaattactctagagttcttagtgcctatgagttcgagcagcatgctggagccaagactagacatccaaataatcatatattcttagaaaatggaagaccgatatatagtattatacaggaaataaaaacggctccactcagtatactagatgaggttataaagaatgtggctggttcatctgtcaatgaggagtccttccaggcttggaaagaaagtcttctacaaagcaatggcaaggttcaggctcataaaagttatagcaccaaacttgtcggtatgcctcatacaaacataagtcaatctgtagaaagtacaagccatttgtcatctttgcatgtaccgagtcattatgagcagcacatgtatatgaatcagacaactgatgaatggaagcgtgtggtgaaaaagccaagctcctacacttctaactcaggtgtactgcagaaaagaagtgctgatggttgcactaagagaaaggacaatgatttacacaggttgctttttatgccaaatgggctaccagatggtgctgagttggcttactatgtcaaaggacagaaattacttggaggttacaaacagggaaacgggatagtctgtggttgttgtgatatagagataagcccttcacagtttgaagcccatgctggaatggctgctaggcgtcaaccttaccgacacatatatacttccaatggattaacacttcatgacatagctctatcgttggcaaatggtcaaaaccttaccacgggagacagtgatgatatgtgtgcagtatgtggagatggaggagatttgattctttgcaatggatgccccagggcatttcatgcagcctgcttgggtttacagtgtgttccagacagtggttggcaatgtctaaattgtagagataatgccggtaatggaagagaatcttctattgtgaggccaatcatgatacgattgacacgcgttgataaaacaccagaagttgaaatgggaggatgtgttgtttgcagggaacatgatttcagtgttgctaaatttgatgaacgaacagtaataattttgtgaccagtgtgagaaggagtatcatgttggctgcttgcgggacatggggctatgtgagttggaagagctgcccaaggataagtggttttgttgtgatgactgcaatcgaatatatgctgctctacagaattcagtttctgctggagcagaaattataccagcttccttttcagaactaataatcaggaagcatgaggacaagggattatgtacctatggggccatgaatgatatccagtggagaattttaagtggaaaaagtcgttatcctgaacatttaccattgctttcacgagctgctgcaattttccgagaatgttttgatcccatagttgccatttctggtcgtgatctgattcctgttatggtctacgggagaaatatttctggccaagagtttgggggaatgtattgcattgttttaattgtgaattatgttgtagtatctgctgggcttcttaggatttttggccgtaatgttgctgagcttccacttgttgccacaagcagagcacatcaaggaaaaggttattttcaagtgttgttctcttgcatagagaggttgctgtcttctctaaacgtggaaaagttggtgcttcctgcagccggggatgctgaatcaatttggactaagaaattgggcttccgaaagatgagtgaagatcagttatccaaacatctcagagaggtgcagctaacactcttcaataaaacttcaatgctggagaagacagtgcagctggctatagaatgaattttatctggtgttgtaactaatttttggctatttattcatttttttagcattttcctcactgtaacgttgctgcgatgttcatgctgccgtattgttcttttcttaattttttgtttcccacgtagtatgggtggttgtggcttggtcttggttccagccagccatgtctctttttgtacaatgtaggataaaaaggcgtaaaaaatagggaacatggcctagaaggaagtagaggagttccaaagagccagcatgctgaccaattttattttttttaattagcatgcatgttggatatataaaatcctactgtattgatttttttttcctccaaaaaaaaaaagtgcgtctttaaaaaaaaaaaaaaaaaaaagggggggccccccaattggtgccctctcccc

SEQ ID NO: 6250 - DNA, 2487 bp, Glycine max
gttcttcaatttattttctttctgcttctcatggatctctcctcactctcttcataccgcactgtcggagtaacaccttctgatcctcgaaaatcacttcctcaatggggtcttcatttcctctcctacactcacaggctcaaccaggttactgccatttatgaatgcaatgcctcctcttttataactacctttgtttattgctgaattagtcaatgggtgtatatatatttagattaagaaaaggtcaagtggggtatatgcatcactatccgcgagagagagaggagagtcttattcccagagaccgccaactccgctactagacaccgtcaactatcctattcatatgaaaaatctctctaccaatgagctgaaacaactcgcagatgaactgcgttctgatgttattttcagtgtttctagaactgggggccatttgggctcaagtcttggtgtggtggaactcaccgttgcactccactatgtctttaatgcccctcaggacaagatactctgggacgttggtcaccagtcttacccgcataagatactcaccggtaggagggacaagatgcataccatgaggcagacaaatggcttgtctggcttcaccaaacgttccgagagtgaatttgattgttttggcactggtcacagctccaccactatttcagccggacttggaatggctgttgggagagatctgaagggaagaaagaataacgtggttgctgttataggtgatggtgccatgacagcaggccaagcttatgaagccatgaacaatgctggatatcttgattctgacatgattgttattctaaatgacaacaaacaggtctctttaccaactgctactcttgacggacccataccacctgtaggagccttgagtagcgctctcagtagattacaatcaaataggcctcttagagaattgagagaggttgccaagggagttactaaacgaattggaggtcctatgcatgaattggctgcaaaagttgacgagtatgctcgtggcatgatcagtggttctggatcatcactttttgaagagcttggactctactatattggtcctgttgatggtcataacataaatgatcttgttgccattctcaatgaagttaaaagcactaacacaaccggtcctgtattgatccatgttatcactgaaaaaggccgtggatacccatatgcagaaaaggcagctgacaaataccatggggttaccaagtttgatccaccaactgggaagcaattcaaatccaaggctaccactcggtcttatacaacatactttgctgaagctttgattgcagaagccgaagctgacaaagacgttgttgcaatccatgctgctatgggaggtggaactggcatgaatctcttccatcgccgtttcccaacaagatgctttgatgtggggatagcagaacagcatgctgttacatttgctgcaggtctggcttgtgaaggtcttaaacctttctgtgcaatttactcatcattcatgcagagggcttatgaccaggtggtgcatgatgtggatttgcagaagctgcctgtaagatttgcaatggacagggctggattagttggagcagatggtcccacacattgtggttcttttgatgtcacatttatggcatgcctgcctaacatggtggtgatggctccttctgatgaagccgaacttttccacatggttgccactgcagcagccattaatgatcgacctagttgtttccgatatccaaggggaaatggcattggtgttcaactaccaactggaaataaaggaactcctcttgagattgggaaaggtaggatattgattgaaggggaaagagtggctctcttgggctatggatcagctgttcagaactgtttggctgcagcttccttagtggaacatcatggtttgcgtgtaacagttgctgatgcacgtttctgcaaaccactggatcgttccctgattcgcagcctggcaaaatcacatgaggttttgattacagttgaagaaggatcaattggaggatttggttctcatgttgctcagttcatggcccttgatggccttatagatggcaaattgaagtggaggccaatagttcttccggatcgttatatcgaccatggatcacctgctgaccaattgtctttagccggtcttacaccatctcacatagcagcaacagtgttcaacatactaggacaaacaagagaggcactagaggtcatgtcttagaaatattaaggggttcaatttttcactttacacgatgtacaatgcataacatgattcaccacgtgtaatataatatgaaaaagtaatgtaatactgtgaaattttgaagtatatgatgcaggtcgtcatatggtaaaacaactagttataaaggagaaaaatctgaacttttatgtaagtgcaaaagaatagcctttctgacatggtctaaactgaatttgaaatctgac

SEQ ID NO: 6251 - DNA, 781 bp, Glycine max
ttttttttttttttttttgacaaaatctgggcacattataacagtcgtttaacagacagaacagtgaaaccataaaggttttacagcatcctccaggcaaacatagaaaatttgcagcatctgcttggctccaaactctcataaagcattacataagaatggtttccagaacaatcaagctttaatcagctaagagcacaccagatctggatctcccttacgccaccagagtgctggcggtggtagactcgtacttccaggtgggcgggagcttcttggtgcgcttgtagtagcgagcgaggcggtggatcctgctctccacaaggatgagcctgaacttagagtccttgtccttcctgttcctctccaggtgcttccttatcgccaccgccttcttgatcagaaagtagaggtcctccgggatctctggtgccagcccatgggccttgaggatgcggaggatcttgctcccggtgacgctcttgacgagggggatgccgtgctggtcacggagcaggacgccgatctgcgacggcatctggcccttcttcgcggccttggtgattaactcgtccacatcggcgacggcggtcttgacccagctcggtggagtcctcttgtacggcagcgccgacgacgagatgcccttcccgcggctgtgcatgcgccccatggctgcggctgctgcggcggcgaggggagtggcggcggcggcggcggcgggaagggcgtgagaggcgcgagtggtgagaggatagaaaaaagtctggttagggttctg

SEQ ID NO: 6252 - DNA, 755 bp, Glycine max
ttttttttttttggcagaaccagacagaattgcaaaaccaaaaatggtttatgggattctccaagtaaacatagaaaatttggtctcttgttcatctaaatcgctccaaactcaaaagcgttacatgaaattgataatatgtagaacaagaccatcctgaagccggtaagagcacaccagatgaagagccctcctaagccaccagagtgctggcagtggtagactcgtacttccaggtgggcgggagcttcgttggtgcgcttgtagtaacgggcaagacggtggatcctgctctcaacaagaatgagcctgaatttggagtccttgtccttcctgttcctctcaagatgcttcctaatggccacagccttcttaatcaaaaagtacagatcctctgggatttccggcgccaggccatgagccttgaggatgcggaggatcttgcttccggtaacgctcttgacgagggggataccgtgctggtcacggagcagaacaccgatctgcgagggcatctgacccttcttcgcagccttcgtgatcaactcgtcgacatcagcgacggcggtcttgacccagctcgggggagtcctcttgtacggcagcgccgacgacgagatacccttcccgcggctgtgcatacgccccatggcgtcaggcgaggggtttagctccggcgacggcggcggcggttgcctgcagcagcagcggcgcgaagggcgagaggggctcgagcggcggcgcgattgaggagt

SEQ ID NO: 6253 - DNA, 807 bp, Glycine max
  misc_feature (787)..(787): n is a, c, g, or t
cccacgcgtccgcccacgcgtccgcccacgcgtccgcccacgcgtccccaaaacccacataagaaaatataaaaaagagcattacttttttaatttctccttcttttatgcaaccagaagtgtagtgtgttgtgtatgactaggtttctgccagccctggggataatgggtaattatctagattcttcagctaaagtagaagcagctcacagttccagaaccccttctggaatttcaaaaactagaccttcatctgttcctcccaacttatctattctgtcatatagtgaagcaagtgatttctcaaatcttcccacaccgaggtccgagggtgaaatcttgtcttccccaaatcttaaggcctttacctttaacaagctaaagaatgccaccaggaactttcgccccgacagccttcttggtgaaggaggatttggttatgtttacaaggggtggattgatgaacacacacttacagcttcaaaacctggatcaggaatggttgttgctgttaagaaactcaagcctgaagggttacagggtcataaggagtggctgactgaagtggactaccttggacaacttcaccatcagaatctggtaaaattgattggatattgcgtggagggagagaatcggctgttggtatatgagtttatgtccaaagggagcttagagaatcatctgtttagaagaggaccacaacctctttcttggtcagtgaggatgaaaagtaccattggtgctgccagaagacttttctttcttcataatgccaaatcacaanttatataccgtaaatttaaa

SEQ ID NO: 6254 - DNA, 940 bp, Glycine max
cgccttgccaacgccgtaccgtaagcctccggaattcggcttcgagcaccacatatactaaatcatgtggtttttgttggaaacaagtgaatatgagccacaatttttagattcattatgttttgctccaagcactgctccttaagatagaattcagaagctaactcctttcacttggtctcattttaagcaaaaccccctactaaaagctccaattcattaacaaggtcggcttgccagcttaaaagtgatgtatacagctttggggttgtgttgcttgaactattgtccggtagacgtgcccttgacagatcaaaagccggtgaagagcagaatctagtagaatgggcaaaaccatatttgggtgacaaaataagactatttcagattatggacaccaagttgggtagccaatacccacaaaatggagcctacatggctgccactcttgctctaaaatgccttaatagcgaagctaaggcaaggcctccaatgacagaggttttagaaacccttgaacagattgcagagtgctaaaagggtcccatttgaatcatactcctactgcattcccataatctgcttgcgtactctaaattttgaacatctgtaaatatattccttatttttataaggttggtttttacaaggagaaatgctaggaacacactattttgaacacttcctctcttgttagttgaaatttattgaagatgacaaaattttgttggtcctacatgatgtttaatgatcttttctcttgattttgttgtttttaatggattttaaccaattagagataatgcatttgaaggagtgggatagaaagtgtgttcctagcagtcctctttgacaagatataatgtggcatgtacatgtacttagatgaaatttcaactgaatattagcacattatttccccaaactatagaagttccgc

SEQ ID NO: 6255 - DNA, 860 bp, Glycine max
  misc_feature (797)..(797): n is a, c, g, or t
tcgatcagctacgtaggccccccccccgaacacacgcaaaccaaatcaagtaagagcgagagtgtgatagagagataatgcgttcttatggcttaaccgtaccgggaagcgaccaccgcttctgcgtgcccaccgtatctcaggtgttctttaggcccaacaggcccattaaccgaatcgcgtttcccaaggccaccctcaagaacgacggcttcgtggtggacctgagcttctacgaccttctgggaataccggaatccggttcggtaacggagatcaagaacgcctacaagcaactcgcccgaaagtaccacccggacgtgtcgcctccgggtcgggtcgaggagtacacaaagaggtttattcaggtgcaggaggcctacgaaaccctgtctgatccttccagaagagctatgtacgacaaggacatggccaagggcattaacttcgccttcaacgcccgcagacgctataattaccacgatcaggtagttgaacaaaaaagtgaatggaaagctaggtggaaatctcaactgtcagagctgaagagaaaaagtaacggcaaggatgctggagggaatatgtcatgggcggcacgaatgcgccaacagagggatgaattgtcaaatgaatcatgactaggattttccttagttctctctacgtaactagttgtatatatagataatgggtacatcttcgtactctagatcacaaattaaatataaaattaatgttgagaaaaagaaaaaaaaaaaaattgctctacttagagtttttcagtgtgccaaccacanaaaaaaaaaaaaaaaaagacctaaaaactaaagttgcgctccctttaaagctggtgtttcgtt

SEQ ID NO: 6256 - DNA, 1556 bp, Glycine max
ggctcgaggtccatctttcgataaacaccattttttctcttcctcttttgaccaaacatgaaacccacggcaacattcttctttctcctatccacaacaacactccttgtttgtctttgcctcggaacaacaacgttccaaaccactctctttataaccttcttcactatttcccttaactatcactcttatcacaccaacgaaaaaccaaacaaaaaacttactgggtgacgacatggtgaagagcgcgtggaaggagatggagatgaaaggcgtggtggaggttcgcggtgtgtttcaggaagggtctctttgtaatattctggagagtgtttttgggagtaatgataagagtgaagagttgggggatatggttagggaaaggtacgagctcctggcgatgttgaacttggaggattattttcctttgaagtttttggactttcatggggtgaagagaaggtgccacaagttggcggctaaggttggtagcgtggtggggcaaattgtggaggatcgaaaaagagaagggagttttgttgtcaagaatgattttcttagcactttgctatccttgcccaaagaagaaaggttggctgattcagatatggcggctattttgtgggaaatggtgtttcgaggaacagacacagttgcaatactccttgaatgggtcatggccaggatggttttacaccaagacgtacaaaagaaagcccgcgaagaaatcgacacgtgcatcggccaaaacagtcacgtgcgagactcggatattgcaaatctcccatacctccaggctatagtaaaagaagttctccggctgcacccacccggcccactcctatcatgggcccgtcttgcagtcaatgatgtccacgttgacaaagttcttgtgccagctggtacaacagcaatggttaacatgtgggccatatcacatgactcatccatctgggaagacccatgggctttcaagcccgagaggttcctcaaagaagatgtttctatcatgggatcggacttgaggcttgcacccttcggggctggacgtagggtgtgtccgggccgggccttgggtttggccacgacccatctctggctcgcgcaacttcttcgccacttcatatggcttcccgcgcaacccgtggatctttcggagtgtcttaggctttccatggaaatgaagacacctctgcgatgtctagttgttcgtagataaaaaatataataacgtaagccttttagctgaactatgtttgatgtgcaattatagaatgatcgagcttgtatctgatgtttgatgttaaagatggtactcaaatatttagtgaaatatttagagatgagttatcgtataattatggaacttatctctaagctttatttcactttatttttaagggtatcaaattattaaaataaatatctagtgccaggactagaggtggatgtaagaaaagattggatcgattaagaaggttttatgtctctttaaatcgtaaaatgtaaattgctgtaatgtaatgaagttgcttccgtacgtatgcatgcaaaaa

SEQ ID NO: 6257 - DNA, 1104 bp, Glycine max
ggctcgagattaggagattccttttctctccgccgtgcgccccccccccctaggtccaaagccaatagatggcttgtgggcccctctggtggtataagtctgtacataaatctactggttttgagaaaccaagaaagtatccccagccatttcctttttctctttatgatttgttggagcaaagtctacccctgtataatatgctacgacgccatgtgaagaaaaagtcatctcttctgagccctcctttacctaatcctgatcttcctgttcctgcaaacgagaaattgcttgcttgggttggtgatgagattgtgacacgtgatagtgcaaaggtttctgtgtttgattctgttgtccaaggaggtgactcagtttgggaaggacttcgagtatataatggaaagatatttaagcttgaggagcatctagacaggttatttgattcagcaaaagctttagcttttgaaaatgttcctactcaagatgagattaaggaagcaattttcagaactctaattaggaatggcatgtttgacaattcacacatccgggctttctctaacacgaggaaaaaaggtttcttctgggatgagtccagctttcaatctttatgggtgtacattaattgtgcttgctgaatggaagcccccagtatatgataatacacgtggtatagttcttgtaactgctacaacacgccgtaattcaccaaataatttggattcgaagattcatcacaataaccttctcaataacatacttgcaaagattgaaggcaataatgcaaaagcagatgatgcaatcatgctcgaccaagatggttatttatcagaaaccaatgcaactaacatttttgttgttaaaaagggccgtgttttgacccctcatgctgattactgtcttcctggcattactcgtgcaactgtaatggatcttgtggtgaaagaacaattaatcttagaggagcgccgaatcagcttgtcagacgtgcatactgcagatgacgtatggacgactggaacaatgcgagtactacgccccgttgtgaacgttgagggtcgtataatcggcaatggagacataagaccagtacctataacg

SEQ ID NO: 6258 - DNA, 1592 bp, Glycine max
agatgaaagcaagtattggcgtggcggctatggtggcggctatggtggtggttatggaggtgggcgtggaggctatggaggtgggcgtggaggcttaacgctacctccggtaccccccgagccggccgaactgcaccttcaccttcccttcgagatggcaaagtctaagaatcacacagcgcacaatcagtcctacaaggcccacaaaaacggcatcaagaaacccaagaggcatcgccacacttccaccaaagggatggatcccaagtttctgaggaatcagaggtacgcgaggaagcacaacaagaagagcggcgaaattgccactgaggaagagtgaagtggcactttctaacggaaccattagggtttttttttaagctcggtttttttttgttttattttgtttttaatggttgactttgtttgaaatcaacgttcagtagtataattaaatttgttttcagagaatgcagtgctcttatagcaattattttcctggtttctgctgaagacccttgaattatttatttatcagtgaaatgaatgttaaggtgttttgtgtttcttagtcaggaaaaagaaaagaaaagaaactcacagctattgaatttcacttcacttcacttgcatgccaaatgaaaacaacctcttcccagaatcttgtcggtatttaactccctcgatttcacaacaccaataacaatgagagtttcaacagagacagagccggagactaaaaagataaaacgcattcgcggcggcggggactcgagcaagcaccctttgtaccgcggcgtgcggatgcggaactgggggaagtgggtgtcggaaatccgcgagccgaggaagaaatcgcggatatggctaggcacattccccacgccggaaatggcggcgagagcgcacgacgtcgccgctctcagcatcaaaggccccgccgccattctcaacttccctcacttggccaactcgctcccccgcccggcttcgctggcgccgcgcgacgttcaagctgcggcggcgaaggcggcgcacatggacccttcctccctctcctccttggtctccgcaatggacttgtcctctgcctctgacgagttgagccaaatcatagagcttccttctttggaaagcaccgatgatggctctgttgacttaaagaaggagtttgtttttgttgattcccttgatgcttggatgtatcagccaccctttggttttgacaccgaacaagacactggtttcgagggtttgatgtggaattactaggttcgatccaagtttctattctatgtcttgtgtttgtataaatttatatcgatctcttttatgttttggtttgtgtgtgtctataagcagtaagcagccacttgtggtttttctttcgggggctgccagtgctactgatcactctcgtattcatcatcatgtctctgtgtctttttcttaattcctctgattttaattgtaaatggctagatgaataaagtaagaggagaaattttctgtaacttgttttggtacaaaatgtttttactcttcttaagattgcgtaatccatgaaatccagtttgagatgggaagtacta

SEQ ID NO: 6259 - DNA, 1601 bp, Glycine max
attgtatcgagtctagtctctacaatcactccttcctctcatcctctataaagaaagtgcttaatttgtgttgttacttggttcagtttccatggattgggggcttgctatatcttctcatcctaaaccttattcagtcacaactggtggaaatctctggcggagtaaacacaccaccaagaatatttactttgcaagttcttggatatcaaaagcttcacgacacaaaagggaaactcaaatagaacataatgttttgaggttccaacaaccaagtttggatcatcattacaaatgcatcagaggagggtctacatatcaagaatgcaatagaaaatttgttgtgaaggcaatctctaaacaacctcttggttttgaagctcatgcttccaatcctaagaacattttggactctgtcaaaaatgtattgtctgctttctactggttttcctatccatacacaatgattggcataacattatgcgcattttcttcatctcttctcgcggtggaaaaattatcagatatatctttatcatttttaattggcgtgttacagggtgtgctgcctcaattgtttattgaaatttatctttgtggtgtgaatcaactgtatgaccttgaaatagacaagataaacaaaccacatcttccaatggcatctggacaattttcctttaaaaccggtgtcattatttctgcagcatttttagctctgagttttggatttacttggattaccggctcttggccattgatttgtaatcttgtagtaatcgcttcatcgtggacggcttattcaatcgatgtgcccctactgagatggaagagatacccatttgtcgcagcaatgtgcatgatttctacttgggctcttgcattgccaatttcatatttccatcacatgcagaccgttgtgttgaagaggccaattggctttccaagatcattgggttttcttgttgcattcatgaccttctactccttgggtttggcattgtccaaggatatacctgacgttgaaggagataaagagcacggcattgattcttttgcagtacgtctaggtcagaaacgggcattttggatttgcgtttccttttttgaaatggctttcggagttggtatcctggccggagcatcatgctcacacttttggactaaaattttcacgggtatgggaaatgctgttcttgcttcaattctctggtaccaagccaagtccgtagatttgagcgacaaagcttccactggatctttctatatgttcatctggaagctattgtatgcagggttctttctcatggcattaattagatgaggatatcgtggaaggcttaaacaatgttctcgacacatacaccaaaataaaaggaatatatgttttgcatctaagatttattaaataaagccgaatgttggttcttgtatcattaagattttttttttaattgtcgaagactttatgtattcatattcaccttgacttctacggtcaaatttttcataagtggaataaaagcaacttgttatacaaaaaaaaaaaaaaaaaaaaaaaaaaaagcttgtaaaaaaaaaaaaccaaaagtgaaaccttgaaa

SEQ ID NO: 6260 - DNA, 1079 bp, Glycine max
aaaaaatcggaaagataggataaagcaggagtgggatcttgcataattgaacgtgatgacagcagcagcatgcattgcactagttgtttggtcccttgctccttgtcgatcatatgggaacacttttcggtttgatttacaaaatacattgcagaagcttccaaacaacatatttgaaaagagctatccacttcgggaatttgacatgcaaaagagaattcaatgctttttgttcaaggctgctgagttgtgcatggttggtttgagtgctggtgcagtacagggtgcgttgtcaaactctttggctagtaaaaaggaggggagattatctgtgacagtcccaagtgtgagcagtaatgctcttggttatggtgcttttcttggaatttatgctaacctgagatatcaactgttatgtgggtttgatagagcaatgatgacccattttgatgttattggagttgccttgttcttcagcacaacattcaggatcttgaacgttcaattgggagagacttctaagcgtgcctggcttggagttgaggcagatcccctggctcagtcggatgacctcttgaaagtgtataacaggacttctgagaatgtagaaaagtcatcctcaaaatggtttatatcaaaaaatgcagttgtttctgggcttgggctcttgggcatcaaacaaaggaatacagacgggtctggtgcagaatcttcagctcctaaaactcgccgaaaaaggattgttcggaagaaggttgcggcgggttctgcttagtatcttctgatgtaaaacgtggtcatagtccaattttgctgttttcttcttctggagggtcatttgtggtttactggctgcttcaccaagtccggggggcaattagtggaccaagatttttcatcacatttaactcaaatttgaggagggttttgcttttaaattttgttaggaactcttgtattgatcctttctgttttctatctgattctgtactagtatatattttgaatcttttaaataaaagtagagcaagttatttttttaaaaaaaaaaaaaaaaaaaccaaaaaaaaaaaaaaaaa

SEQ ID NO: 6261 - DNA, 1156 bp, Glycine max
acgatttcaaccgccacgtcatcgttaaggaataccctaaattacacggtggcccgagaaattacccttccgcagggtcatcggcaatgctagctttacaagggaattattctaaagctgagattgtggtttgtggaggtgcgaaatacggtgcgtttttgctgcggagtactgacaccccggcgcatggtagctgtgggcgcattttagcgatggaagagaaaccgagatgggaaatggaagacatgccgtatgggaggattatgggggatatggtgatgcttccgaccggcgacgttttggttattaatggagcgatgtcggggactcagggttttgagatggctagtgatccgtgtttgaacccggttctgtaccggcccgaccaaccggtcgggttgcggttcatggttttgaaccccgggacggttccgaggatgtaccacgcgacagcgaatctgttacctgatgcgagggttttgcttgcggggagtaacccccatgttctgtaccggttcaatgacgtggagtttccgaccgagttgcgggttgaagcgttctcgcccgagtatttgtctgcggaccgagccaatcttagaccggttattgaggaggtgcccgaaacggtgcgttttggtgggaagtttgatgtggtggtttcggttgctttgcctgtggtggggattgtggaagtgaatttggcaagcgcgccttttgccacgcactcgttctcgcagggtcaacgtttggtcaaactgacggtttcctctgccgtgccttacggcaggtacggggaggtcccggatggagtaaccggcccccccgagtgggcgggtggcccccccgggttactaccatggcggttcgcagtgaaccagggagtacccagcattgcaaagtggatacacgtgtcataagtcgtaactgtgaagtaacgaagtctctttgatgcattttggaaattgaaattgtatttaaatttatttattttcttttttggggggcaagtgggggattaaaaatttaaaattgagattcttcaattgttaataggaattggggactgggaagtcggtaagtgtgactggtgaattgcaaattcattttttttaagccccacaaccagaaggggaaatgcaaatgatgttttaatggg

SEQ ID NO: 6262 - DNA, 1049 bp, Glycine max
  misc_feature (50)..(50): n is a, c, g, or t
aaaacccagatgggtaatggaagacatgaccgtttgggaaggattatggngggatatggtgatgctggccaaactggcgaacgttttgattattaatggagcgatgtcggggactcagggttttgagatggcgagtgatccgtgtttgaacccggttctgtaccggcccgaccaaccggtcgggttgcggttcatggttttgaaccccgggacggttccgaggatgtaccacgcgacagcgaatctgttgcctgatgcgagggttttgcttgccgggagtaacccccatgttttgtaccggttcgatgacgtggagtttccgaccgaattgcggctcgaggcgttttcgcccgagtatttgtctgcagaccgggcgaatcttagaccggttattgaggaggtgccccaaacagtgcgttttgggggcaagtttgatgtggtggtttcggttgatttgcctgtggtggggattgtggaagtaaacttggctagcgcgccttttgccacgcactcgttctctcagggtcaacgtttggtcaaactgacggtttcctctgccgtgcctgacggcagtgacgggaggtaccggattggagtaacggctccgccgagtggggcggtggcgccgccgggttactacatggcgttcgcagtgaaccagggagtacccagcattgcaaagtggatacacgtgtcataagtcgtaactgtgaagtaacgaagtctctttgatgcattttggaaattgaaattgtatttaaatttatttattttcttttttggggggcaagtgggggattaaaaatttaaaattgagattcttcaattgttaataggaattggggactgggaagtcggtaagtgtgactggtgaattgcaaattcattttttttaagccccacaaccagaaggggaaatgcaaatgatgttttaatgggaatttcgcaatgcatggatgattgatttaatagaatttataatattgtatggtgctagtactatatgatttttattagatggatttgtatgaggtggttatatcccgccc

SEQ ID NO: 6263 - DNA, 2033 bp, Glycine max
ggctcgagatttgacggtgtcggtgattcaccaaattctctctctctctctctctcaaatctcaattcactcattcatttcccctttcttctctttctcaatttcgctttgtattgtcttcaattcagtaaaccgcaccaattccgatggcggcgtcgcggcggctccgggacctccaatcccaaccggcgaacaagatctgcgtcgactgttcccagaagaacccgcaatgggcctcggtttcctacggcgtcttcatgtgcctggagtgctccggcaagcaccgcggcctcggcgtgcacatctccttcgtgcgatccgtgacgatggattcgtggtctgaaatccagatcaagaagatggaagccggaggcaacgacaaactcaacgcgtttctcttgcagtacggcatccccaaggaaaccgatatcgtcgccaagtataactccaacgctgcctccgtctaccgcgaccgcatccaggccctcgccgacggccgcccctggcgggatccccccgtcgtcaaggaagccgtccgttcctcctccgctgcattcaagggcaagccgccgctctcggctagcagcaacaacaacggcggatgggataattgggacgccgacgacggattcggatcggccaggggcgggtcggatctcaggcggaaccagtccaccggggacgtgaggggattcggcggcggcgggaacgtggcgaggtcaaaatcgacgcaggatatttacacgcgggctgaattggaagcttctgctgccaacaaagaagaattcttcgcgcggaagagagcggagaatgagtcgcggccggaggggcttccgccgtcgcagggtggcaagtatgttggattcggatctggccccgccccgccccagaggggtaatcagcaaaacgattatttctctgtcgtttctcagggacttggtaaattatccttggctgctgcttctgctgctaatgttgttcaggccgggacaaaagagttatccgctaaggtaaaagagggtggttatgattacaaggtcaatgaaactgtcaatgttgtctctcagaagacaacagagattggacaaaggacatggggtatgatgaaaggggtcatggcattggcttcacagaaggttgaggaattcgctagagataacccgaattggacgtctgataactggcaacgaaatgaaagtgatagaaatggtttctaccaggagttcaatcgagagaataatggccggaattcttctaccagagaaggacaacattcttcaggtggacaaactaatacttttcactcaagctcttgggatgattggggccacaatgattttaggaaggaagagccagctaaaggatcagctcctcagtcatcaggtgggaagtttgataattataactcgagctcctgggatgattgggaccaggaagatacaaggaagaaagaaccagctaaagggtcatctgcccgtagcagtgatggttgggctggatgggataatgccaaagatgatggatttgatgatatctatggaagtgcatctaatagtaaaggtgtcactcataatgacaagtcaggtgctgcctggacaggaggaggctttctctaaggtttgacccgatctctatcagcaggatcaaagttttgttggaaatgacctcttggactggtggcatgcaaaccgagcaggggtgttgtttagtatgatggatgtgacctgattgtcaactataagtttgttggtcactattaaattcatgccccatatgtactggatgaatgattattttgaggtcagtgtattgtctacaagtatttatttttcaacattctcccatcctcccttgtgtaatcttttcatgtgattttttggggacttctgtatggttggaaacttattttaaatgtacaagtgtctaaagaaagggcaaattgcccaaatttatgattatttttactggaagtgtgatgaaacattattgtgacacgaaaaaatttcataattattttgaatttatagcaactt

SEQ ID NO: 6264 - DNA, 955 bp, Glycine max
tgggtaccgggccccccctcgagtcagctacgtaggccccccccccccaatcaaaaaaaattttcctgcactcttcacatcctttctagtaactcactgagtccacccattcaaggatcagttcttactagctcacagctccccatatatctctcatcaggccccctcgctgatgccaggcagatatttggaccatcttagtgcaaccataagatgaaaagaccccagtcccctttacaagatgctgtgtgacaagaccccaaaagaagacagtttgcaagtgggcgacttagatccagagctcctgtccaagcagggaagaagaaaacaagaacaaaactccccaaaatggatctaaagtcaggttgtgcttacagagtcaggtttggagaaaaaacccaggaagcaagggtgttatgagaccaggtgacaaattggaagaaaacacaagctttttcaacaaaaaccaaaaaccaaaataaattttcaaacaaggagatgacaaacaagattataatacaatataaatgtcctccgctacaaacaatctatttaataagattacaagaaaagccccttcaagattaattccaacacctgggataccatatgaagataaactctctctcataacaacaagacccccaagttcccctcaagaccccctctacaaaaaccaaaaaaataaagcgaaccaatgaaaaagctttccaaaagtatacaacgagtagattgaaacgtggcttgttttggcttactaaagattcaagaccgtcccctatttccagtatccagggaacttttattgacagttctccacaagttcccacccaaaaagggactcttcagtatcagttccctcctcagtccctatgaagactcgacgccaagggaccattcccttgattcaaggctcaaaatttagtgctagaagagcatatggcaaagtgacgaa

SEQ ID NO: 6265 - DNA, 1542 bp, Glycine max
atagattggcttaacaaagtaagtaagcatgcatctcatgattcatcatgaatcacatgggagaatttcacttgtcctcactacacactcttttgcattcctataaatggcacacacctgccaccccggcccccatcaacaaaacacattaacatttctcagaagaaaaaaaagtgagagatggagaactttcccgtgatcaacttggagaatctcaacggtgaggagaggaaggctacccttaaccagattgaagatgcttgccagaactggggattttttgagttggtgagtcatggaataccccttgaactattggatactgtggaaaggttaacaaaagagcattataggaaatgcatggagaagaggttcaaggaggcagtgtcaagcaaagggttagaagctgaagtgaaggacatggattgggaaagcacgttcttcttgcgccatctcccaacctccaacatctccgaaatcccagatctcagccaagagtatagggatgcaatgaaggaatttgcacagaaattggagaaactagcagaggagttgctagacctgttatgtgaaaatcttggattagaaaaagggtacttgaaaaatgcattttatggatcaagaggtccaaattttgggacaaaggtagcaaactaccctgcatgcccaaagccagagttggtgaagggtcttcgtgcacatacggatgcgggtgggattatccttctcttgcaagatgacaaggtcagtggccttcagcttctcaaaaatggccaatgggtggatgtgcctccaatgcgccattccattgttgttaaccttggtgaccaaattgaggtcattaccaatgggagatacaagagtgtggagcatcgtgtgattgcccaaacgaatgggaccagaatgtccgtagcctcattctacaaccctgccagtgacgctcttatctaccctgcaccagcattgttggagcaaaaggcagaggatacagaacaagtgtatccaaaatttgtatttgaggattacatgaagctctatgcgacactcaagttccagcctaaggagcccagattcgaagccatgaaggcagtaaactcattttagactatttccaactccatcacaccttaacaggagctatacctatataatatactgccagaagaatttttattgatttggaaatttgaagaagaaaaaaaacagcaatgaggaaaccattatttgtattctaattattcaatttcttattacaacaggtgatttgattacttccgttttaataaataatgaattattctgataagaagcaattaagcattggttttcccttctaaaaaaaaaaaaaaaaaaaaaaaaaaaaaaaaaaaaaaaaaaaaaaaaaaaaaaaaaaaataaaaaaaaaaaaaagggggggcccccattttggggctcttcccccccggaatttatttcgggccgggtccctgggggggtcccattttttttttttggggggctttttaaagttgggggtaaaaagggcatagattttttcctggg

SEQ ID NO: 6266 - DNA, 1530 bp, Glycine max
tcgagtcagctacgtaggccccccccctcttgattctgcaacactttcgtttcgtcactctgttgttttcccatccacagtactctctacaatacaaaacctccactttcagttctacaatataagattgttcatcaatggaatgtaatgatcagcgtgtaagtgtaagcttgaagagaaaatcaccagaaaatggagatcatgtactcttcaacaccttttctctggatgaccttaatgaagatctctttgaaaggatactttcatggctccaaacttccacattctttcgcctcaattctgtgtgcaaaagatggaaatcagtagctgcttctgccagtttcaagcttgcctgctctcacattccctcaagggaaccttggtttttaatggttgctcccaaccttaaccaatctgttatctttgactctgctgaaagcacttggaagagactaaatcacccctctcttctgcaagaagaatctaaccaagattgcatgccagttgcggcttccgggggcttgatttgctaccgtaaatcatcaggaaacttcattgtaaccaaccctgtgactggatcttgtagagaactccctccactgcaacttgcctcacaaaaccaaccactcgatgccatcgtgatgagcacaagttccaaagaccaaatctccttcaaaattgtgctagtctttggtgaacttccaaatctcttgtttaaagtgtacaattcaggttctaactgttgggagggtgagactgcattgaggagaaagactgaagacaattccatggaatatgattccactgatgacaatgttgtgtacttcctcagcaaggctggaattgttgtggcaagcaacatgcagagaagcccctccaagcaattttcatctgttattactaataaaaatgatcaagagattgtgtattttcttagttactcagggaatgtagtagcttgcaatttgacatgcaagtgcttctctgagtaccccaggttgttgcctgtttacaatgagtattccattgatgttgtggagtgcaatggggagatgctagttgttttgctatcagaattcttggaaaccacaacccttagggtgtggaaatatgatgaggctaatagagggtggcatcagattgcagcaatgcctgcagcaaattctcatgagtggtatgggaagaaagcagatattaactgtgttggtgctggtaaccaaatcttcatatgcttgaactccactgagctatgcacttatgttatgtgtgatttggagaccaacaagtgggttgaattgccaaattgttgcataaatggacaagtcatagactttatgtctgccttttcatttgagcctcggatagaggcttcagtgtgacaacaaaatggccttgactttgatgatattaccatcccttttccgttcccttaggacaaattttcctgtcggttgtatagttattgctaactgagatatttattttcattgattatttaggtgtaaaaaaaaaaaaaaaaaaaaaaaaaaa

SEQ ID NO: 6267 - DNA, 916 bp, Glycine max
tcagctacgtaggccccccccccttttttaatttcaagtaaaaacaaaagaattgaatgctatagttcctcataatgatttttgcctttcttattgaaatttggctgttctttgaatctggacaacattttgtacctaaagctgatgaatgatgaatctgcgatgttcataaaatatagaatgtatttttgttgttctctcttctctctatcaagcttaagtagcttatatcagcattctcaacaagaagcttattatcagaacttaaagggctagcacaggtgctcttttgaaattgttttgtccaaaatctttctgatctgtttttcttctttgtgagctatgtttgtggtatcagattgatgagaatgttcagagggagataattaaccaccgatctttaaggcatccaaatataatcaggttcaaagaggtgttactgacccctacacatttagctattgtcttggagtatgcttcaggtggtgaactttttgagaggatatgtactgctggtcgatttagcgaagatgaggcaagatatttcttccagcagctaatatctggggttagctactgtcattcaatggaaatttgtcatagagatctaaaattggaaaacactctcttggacggaaatccatctccccggcttaaaatttgtgactttggttactccaagtctgctctactgcactctcaacctaaatcaacagttggaactcctgcatacattgctccagaggttctgtcacgaaaggagtatgatggaaagatttcagatgtttggtcctgtggtgtgactctttatgtcatgttatttggagcatacccatttcaagatccagaaaatcctagaaatttcataaagactatcgggagaataataggcgttcagtactccataccccactat

SEQ ID NO: 6268 - DNA, 887 bp, Glycine max
accgccaagttttcaactcttgtcttctgttgcaaaaaccctaattgcggtgtaaaaccctagaaggaggaagaagaagaggaaggatgagacctttagacgagaaggagacgagcgcggtgttcgagaagctgttcaaattcgtcggaaacaacctgaagaacatcgtggagaacccctcacacgaaggtcctgattcgaaccctggccgctactgcttccgcctccacaagaacaagatcttctacgccagcgagtccctcgtcaaacgcgccaccaacgtcgcgcgccccaacctcgtctccctcggcacctgcatcggcaaatacacccacggcggcagcttccacctcaccgtccaggccctaaacttgctcgccgccaacgccaagcacaaggtctggctcaagccgcagtccgagatgtccttcttgtacggtaaccatgtcttgaagggcgcactgggcaaactctccgaaaacattgctgccggcgacggggttgtcgtgttctccatggccgacgtgccgttgggtttcggtgtcgccgcgaagtccacgctggattgtaggaagctggatccgaacgggattgttgttctgcaccaggccgatgtgggagagtacttgaggatggaggatgagctttgattgatgcattttcttgtaattggttttgatccatcttatgaaattacattatcttctatattatctgtacctcctttgaagttgcctatcttctatattatcttcgacttcgttctcgtttcagaaaaaaaaaaaaaaaaaatggatttggtttgttgattcgttctcacttggcttcgttcgctgctcctctcgcgtttttggatatgtaaatcaacttcttgttacgagtttttt

SEQ ID NO: 6269 - DNA, 1209 bp, Glycine max
atacaatcttctaggagaagatgctcctttggctgaagcttttacgtctaagggattaaaatttgtttctatcctgattagtgttggtgctgttgctggacttacaacaacactccttgttggtctctacgttcagtctcggctataccttgggcttggcagggatggcttactacccttaatatttgctaaagtccaccccaaacgccacacccctattcattctcagatctgggttggcttggttgccagtgttttggctgggctatttaatgtgcatgtgctctctcacattctttccgttggtacactgactggctattcagttgtctcagcgtgtgtcgtcgttcttcgctggaaggacaagacaaatagtcaagtgtcatcttctgctgagcgggaaggcgtaatttgcctcattgctgtcgccctttgtggatttgctagtgggctcttgtatcgttatgatgcttcatttatttttctgattctggctttagttattgcagctggtgcttctgctgctcttgttttccgccagggttatgcagatgcaccagggttttcttgcccaggggttccccttctgccaaatatttgcatcttttttaacatgttcttatttgcccagttacatcatgaagcatgggtgagatttgtgattctttgtgttgtcatggttggtgtttatgcaatatatggccaatatcatgctaaccccagtgcagaagagaatgtctatcacagggcacccgaggaagaagctctatgagtcatttgttcaataatatacaatgtgttcattgtgggatggttaaaatgtatccagcaaattagctgttattccttctgttaggaatgtccatcttgtatgaataactatctggctatactcgctactagattgtatatgatatggtcaggttagcatgtgtatgatgtatctcttgtttcctacttcatagaaaaagaaaaatcatcatgtagtttgtgcgagttttaagttgatccatcttttgcatatgttgaggcctacaatttgtcaaagagaggctgccccattaaagaaattgatatgtaataatttattttattatatttgtttgtgtgtgtaccaaaaaaaaaaaaaaaaaaagaaaaaaaaaaaaaaaaaaaaaaaaaaaaaaaaaaaaaaaaaaaaaaaaaaaaaaaaaaaaaaaaaaaaaaaaa

SEQ ID NO: 6270 - DNA, 1072 bp, Glycine max
ttttttttttttttttctttttttttttttttataaaaagacagactaattatttattcactcgatcaccgtatatgtacgtacaattgtataaggtaaggtacgtagtgacttcttctcttttcctttgcatctttacttactcacatgcggtacgtatacacatatgcgatatactaatactatatatagatacaattgttcttgtttggactcccaaccgtcgtgtctatgaacagaaaccttggatcttcttggcagccggcgcggcatcgtcgacggcgagcctcttgccaccgtcgcgctcggggtttagaccgaaatggatgtttgggtaatgtgcccagttctttgcggcagtgctgaaggcttccctgtggctaatggtcggggttgtttgcctttatccttcgtatctcttccttgatgaatctgttgtacgctgaaggaacacgctgcctcttctccggaggacgtgcgtgcagcgtctgttcctgcagcagatcattttgcgacgagaacatcatcgtcggcatccggaatttggacgacgacgaagaagaagacgaaccaaactccgggctattgtagacgctgtgatcgcgaatgaagccgttgctgccattgggcttgctcaggctgctctcctggacctgtgctgcaggagggactggtgagtgcatctgccctctcaggctcaccgaaagtaggtttgtacagtgcccacaccggactgtcacaatgttgagcatgctgttcccagggacactcaccgcgagtacggtgttgcagaagttgcagtggacgtagcagacttgttctgccggcgcgatctggcccgacgacgacattcctcctgattatcccctggcgccgccgcctcgctgcccccctagccgttcagactacggcgaggttcaccaggcggcagccaagaagaagaagcgttgccgtggagaaccgcaggctagctaggttacatgtgctactgctgcttctctctctttctctgtgtgtgtaggttagatcgatggagagagagatatgtatgggcagagaggaaggagaaatt

SEQ ID NO: 6271 - DNA, 1231 bp, Glycine max
tcgagtcacctacgtaggcccccccccccgatgtccttcttcttaaccctttctttcaagtttcatctcttttcctcatttcattcttctaactttctctccgtttacttcacttcatgacggattcttctcctcttatccctccctcaccggtcacagtcaccgagatcgacctcgaagagggaccctccgaacaaattcaatgccggatttgtcttgaaactgatggtagaaatttcatagttccttgtaagtgcaaaggtacgtcaaagtacgtacatagagagtgtttagatcattggcgagccgtgaaggaagggtttgcatttgcccattgcactacttgcaaggctccataccatttgcgtgttcatggtgcttatagacaatggcgtactttcaaatttcggttttttgtaacccgagacattttgcttatatttctggctgttcagcttgtcattgcttcacttgcttatttggtttaccaaatagatggttacgagaagtattggcttcgtcttgtttggggttttggtagtgagctgagcttttactatatatgtggagcacctggtgttttttgtgttgcttggcctgtctgggtgctttattacttgttctgatccaagaattcgcagtgatttgggtcagccttgtcgagaaatatgtctttgttgctgtcaacctggagtttgtgctgatcgtcatttgcatggtactccttatatgtacggtactccttatatgtcgactgattgcaatgcatgctgtgagaattgtggaactgaatgctgtggttgcacttgcatgagaggttctgaggacgaagcagggctaccattattattcataatggttttgttttttctggtactctttgctgtacttgggatattttacagtgtattagtggctacaatgataggacaacggatatggcagcgtcattatcacatacttgcgaaaaggatgctaacaaaggtgcccatgccttactttattgtcttttgcacatttggtacagtgcagttaaccttcaattagtgtttcactgcagctgctgagtcaacttaaatacctttttgatatgtacaactagcctatttagtgatttccttagtctactgaggaacgtatatagaaattgctgcaagatgtaatgagaaggttttctgcttgtttggcctttaaatccaagataatatatatctgcaaagattttattatt

SEQ ID NO: 6272 - DNA, 577 bp, Glycine max
ggcatagctaatcatcagtcgacaaccaagcgaatagttgcaatgcagagaggttcataaacatggatcaaacaaaggaggcgataatgcccgacgagaaataataattaagctactagcagcatttctccgtcagagaggatagctcagtcccagttccacgaagttgatcgtcgtcttctcctcctccctcctcagaagcaggcgtccaggagacagcagcagcaaagggcggccaggcatccctccatgaaggaaggcccgctgctctgctgctgctgctggtggggcggcggctgctgcgcgtactgcggcgggtagccctgctgggggtagccggccggcgggtagccctgcgccgggggtgggtagccggccggagggtaccccggcggtgggtagccgcccttgtccccgtagccttgcggcggcggggcgccgacgggtggctgctggttgtagtagctcatctcctcctcctcctcctctggctccggggtctctcgctggttcctcgcggcgatcggagcaggcgcagcagggctttgtttgaggcgctggggtttgggtgattttt

SEQ ID NO: 6273 - DNA, 1994 bp, Glycine max
cccacgcgttcgaacgaaaatctggctatataaaaacttgcccctccccatccaaaagatccatcttgtttctctttcttgtatcttctcaccccagtttcactttctcattattttctctcctattgataaagaaacagagagagagagaaaaaaatgcctgcggtaggaggtattagcaacggagggggcaaggagtaccctggaagcctcactccttttgtgacggtaacatgtatagttgcagccatgggtgggttaatcttcggttacgatatcggaatttcaggtggggtgacatccatggatccgtttctgctcaagtttttcccgtcggtgttccggaagaagaattccgacaaaacggtgaaccagtactgtcaatacgacagccagacactgacgatgttcacgtcgtcgctgtatctcgccgcgttgctgtcgtcgttggttgcctccaccgtcacacgtaggttcggccgaaaactctccatgcttttcggaggcttgcttttcctcgtcggtgcccttatcaacggttttgcccaacacgtgtggatgctcatcgtgggtcggatcttgctcgggttcggtatcgggtttgccaatcagtctgtgccactctacctatctgaaatggctccatacaaatatagaggagcattgaacattggctttcaattgtcaatcacagttggtatcctcgtggccaatgtgttgaactacttctttgctaaaatccatggtggctggggatggagattgagtttgggaggtgctatggtccctgcccttataatcacaataggatcactagtccttccagacactcccaattccatgattgaaaggggtgatcgcgagaaggccaaggctcagcttcagagaattcgcggcatcgacaatgttgatgaagagttcaatgaccttgtggcagcaagtgaatcctctagccaagtggagcacccttggaggaacttgttgcaaagaaagtacagaccccacctcaccatggcagtgttgattccattcttccagcaactcactggaatcaatgtcatcatgttttacgcgccggtcctgttcagctccatcgggtttaaggatgatgctgctctaatgtcagctgtgatcaccggcgttgttaatgttgtcgcaacttgtgtctcaatttatggtgttgacaagtggggtaggagagcccttttccttgaaggtggagtccaaatgctcatttgccaggctgtagttgcagctgcaattggagcaaagtttggaactgatgggaacccaggtgatttgccaaagtggtatgcaattgttgtggttctcttcatttgcatttatgtatcagcatttgcctggtcatggggtcccctaggttggttggtgcctagtgagatctttcccttggagattcgttcggctgctcagagtatcaatgtgtcggtgaacatgcttttcactttcttgattgcacaagtcttcttgacaatgctttgccacatgaagttcggcttgttcctcttctttgccttcttcgtgttgatcatgacattcttcgtctacttcttcttgcccgaaacaaagggcattccaattgaagaaatggggcaggtttggcaggcacaccccttctggtccagattcgtggagcatgatgattatggcaatggtgttgagatgggaaagggagctattaaagaagtgtagttagtcctcgtcttggtttatttttctcaatgactagcgttttagcttttgttggtaaatcatactattggtttcaatgtattgaattgttcctaaaaattaaaaagggttatttttcttatgtatcccctgcttcttcatatgaagcaagtttacaggatacttttctatattaatccaattgcacaaattgttatgcctttgaaaacatcaagttggatgtacactcatacctcatagacatccgatttcttatcctttaaaaaaaaaaaaaaaaaaaa

SEQ ID NO: 6274 - DNA, 892 bp, Glycine max
gctggccatatagttttgaattccatcttcgggtgtctcttacatcatatggggacctgactttgatatgctagagtcaggaatataaatggggggccatttagtttctcatttgcatatcacacatacattattggtctgctgacataagtgagataaggattgaaggtctggagacactggattacctagacaaccttttccaaaaggaacggtttacagaacaaggagatgcaataacatttgaatctgaggtggatcgagtttatcttagctctccaaacataattgcagtgctagatcatgagaggaaacgaacatttgttataaggaaggatggtctccctgatgttgctgtgtggaatccatgggagaagaaatcaaaatcaatggcagactttggtgatgaggagtataaacatatgctttgtgttgatggggcagtgatagagaaacctgtgaacttgaagccaggcgaggaatggactgggcggctgcagctctcggttgtgccgtcaagtttttgcagtgaccgtctgggtctcgacagaagtggtctttgaggaattgtacaaaatcggtcagagtttatgctacatcctgtaatgtagtattgagtcgtagacatagtctccttaggagtatcaggtttttctgttgtgtggtctttttaggctagaaatagtgttttagagaggcctatgttttttgtgagaatggctatcaaatgttacccggttattagttagttggttcggttctgctatggactcttcttgaagcgttagatttgttgtgtagatgttaagtttcttccctggatggattttatgatcttccacgtaatggctatattaaactttcttgttccaatttaaaaaaaaaaaaaaaa

SEQ ID NO: 6275 - DNA, 1975 bp, Glycine max
  misc_feature (1971)..(1971): n is a, c, g, or t
  misc_feature (1975)..(1975): n is a, c, g, or t
tttttttatattgtgttttaatttatttgttatttttttttttttctttgtttctttctttttttttttttttatttatttggttttttttaattctttgtttttcttcttaatttatttttctctattttatttttgattttttttttttttattttttctcgtttttttttctttatatcttgtttctctttcttgaatcttctcaccccagtttcactttctcattattttctctcctattgataaagaaacagagagagagagaaaaaaatgcctgcggtaggaggtattagcaacggagggggcaaggagtaccctggaagcctcactccttttgtgacggtaacatgtatagttgcagccatgggtgggttaatcttcggttacgatatcggaatttcaggtggggtgacatccatggatccgtttctgctcaagtttttcccgtcggtgttccggaagaagaattccgacaaaacggtgaaccagtactgtcaatacgacagccagacactgacgatgttcacgtcgtcgctgtatctcgccgcgttgctgtcgtcgttggttgcctccaccgtcacacgtaggttcggccgaaaactctccatgcttttcggaggcttgcttttcctcgtcggtgcccttatcaacggttttgcccaacacgtgtggatgctcatcgtgggtcggatcttgctcgggttcggtatcgggtttgccaatcagtctgtgccactctacctatctgaaatggctccatacaaatatagaggagcattgaacattggctttcaattgtcaatcacagttggtatcctcgtggccaatgtgttgaactacttctttgctaaaatccatggtggctggggatggagattgagtttgggaggtgctatggtccctgcccttataatcacaataggatcactagtccttccggacactcccaattccatgattgaaaggggtgatcgtgaaaaggccaaggctcagcttcggagagttcgcggcatcgacgatgtggaagaagagttcaatgaccttgttgcagctagtgaatcctccagaaaagtggagcacccgtggaggaacttgttgcaaagaaagtacagaccccacctcaccatggctgtgctgattccattcttccagcaactcactggaatcaatgtcatcatgttttacgcgccggtgttgttcagctccatcgggtttaaggatgattctgctctaatgtcagctgtgatcactggcgttgttaatgttgtggcaacttgcgtctcaatttatggtgttgacaagtggggtaggagagcccttttccttgaaggtggagttcaaatggtcatttgccaggctgtagttgcagctgctataggagcaaagtttggaattgatggaaaccctggtgatttgccaaaatggtatgcagttgttgtggttctcttcatttgcatttacgtatcagcatttgcctggtcatggggtcccctaggttggttggtgcctagtgagatctttcccttggagatccgttcggctgctcaaagtataaatgtgtcggtgaacatgtttttcactttcttgattgcacaagtcttcttgacaatgctttgccacatgaagttcggcttgttcatcttctttgcctttttcgtgttgatcatgacattcttcatctacttcttcttgcctgaaaccaagggcattcccattgaagaaatgaaccaggtttggaaggcacaccccttctggtccagattcgtggagaatgatgattatggcaatggtgttgagatggggaggggaactgctatcaaagaagtgtagttacttgtttatttttctcaatgactagcgttttagcttttgttggtaaatcatactattggtggtgtcaatgtattgaattgttcctataaattaaaaagggttattttctcaaaaatacaggaaaaagaggaaagnttan

SEQ ID NO: 6276 - DNA, 1779 bp, Glycine max
aattcggctccggcgcgggtgaggcctctgagtctcagtctgacggagctaacctcctatgtcctatgcttcatcatcctcctgcttctcctggaacagatctcctacatactaaaaaaagcttccatcccaggaccctcctttgtacttcccttcataggcaacgctatcccattggtccgagacccaaccaatttctgggacctccaatcctcttttgctaaatccaccccctcgggcttctccgccaactacatcatcggcaacttcatcgtcttcatcagagactcccatctctcccacaaaatattctccaatgtccggcctgacgcctttcacctggtgggccaccccttcggtaaaaagctcttcggccaacacaacctcatctacatgactggccaagtccacaaagatctccgccgtcggatcgcccccaactttacacctaaagccctctccacctacaccgcgctccagcagattatcatcctcaaccacctcaagtcatggctcaatcagtcccaagccccagactcccattccattcctctccgcatcctggctcgtgacatgaacctccagacatcccagaccgtcttcgtgggcccctacttgggccccaaagcccgagagcgtttcgagagggattactttctattcaacgtcggcctaatgaagctgccgtttgacttccccggcaccgcctttcgaaacgccaggctcgccgtggaccgcctcattgcagcactgggcacgtgcaccgagatgagcaaagcacggatgaaggcagggggagagccttcgtgcctcgtcgattacttggatgcaggacacgctcagggaaatcgaggaggccaagctcgccggagagatgccgccgccgttctccactgacgtcgagatcggaggttatctctttgacttcctcttcgccgcccaggacgcgtccacgtcgtcgctgctttgggcggtggcgctacttgactcgcacccggaggtgctcgccaaggtgagaaccgaagtcgctggaatctggtcgccggagtccgacgagcttattactgccgacatgctgagggagatgaagtatactctggcggtggcgcgtgaggtgttgaggttccggccaccggcgaccctggtgccgcacatcgcggcggagagctttccgttgacggaatcgtacacgatacccaaaggagcgatagtgttcccgtcggtcttcgaatcgtcgtttcaggggttcactgaaccggaccgcttcgaccctaaccggttctccgaggaaagacaagaggcccaaatatttaaaagaaactttctggcgttcggggctgggccccatcagtgtgttggtcaaaggtacgcatttaatcatcttgttctcttcatcgccttgttcacgacgttgatcgatttcaagagggacgaatccgacggctgtgatgatatcgtttacgtgcccaccatttgccccaaagacgactgcagagtatttctgtccaaacggtgcgcacggtatccttcttttccttcggtggaggacttcgtcaaatgaaatgcaatactattgttttaaaaatgttttaataattatgaaaattaaaatttatcccagtgaaatgtaataggtggagatgttttgtttacattttagttattgaaattttcataataaattaaatttgaagttgtaatgttatgctgtgttgtttcacgacaatgtgttcgtgcttgttatttgatgattttatttgtctaaaaaaaaaaaaaaaa

SEQ ID NO: 6277 - DNA, 2272 bp, Glycine max
ccacgcgtccgtacggtacgaccgcataggaggatgaaggctctcacactggcatccctcttggcctctttctccttcacggagcttacctcgtacctggcatgcttcatcctcctcctgcttctcctggaacagatctcgtacatagtcaaaaaaggttccatcccaggaccctccttggtccttcccttcctaggcaacgcaatcccattggtccgaaaccctaccaaattctgggaccttcaatcctctttcgctaaatccactcccttgggcttctccgccaactacatcatcggcaacttcatcgtcttcatccgagactccgaactctcccacaaaatcttctccaatgtcaggcccgacgccttccgcttagtgggccaccccttcgggaaaaaactattcggcgaacacaacctcatctacatgactggccaagaccacaaaaatctccgccgtcggatcgcccccaatttcacccctaaagccctctccacctacacctcgctccagcagattatcatcctcaaccacctcaagtcatgggtcagtcaggcccaagcccaaggctcctattctattccgctccgcatcctggctcgtgacatgaacctcgagacctcccagaccgtcttcgtgggcccgtacttgggcctcaaagcccgagagcgatttgagagggattactttctattcaacgtggggctaatgaagctgccgtttgacttccccggcaccgcgtttcggaacgcgaggctcgccgtggaccggcttgtcgtagccctaggcacgtgcaccgagatgagcaaaacgaggatgcggacattaggggaagagccttcgtgcctcatcgattactggatgcaggacacgctcagggaaatcgaggaggccaagctcgccggagaaacgccgccgccgttctccaccgatgccgagatcggtggctacctcttcgacttcctcttcgcggcgcaggacgcgtccacttcgtcgcttctgtgggcggtggctttgctcgaatcgcacccggaggtgctcgcgaaggtgagggccgaagtcgccggaatctggtcgccggagtcggatgaactgattactgccgatatgcttagggagatgaagtacactcaggcggtggcacgtgaggtggtgaggttccggccgccggcgacgctggtgccgcacgtcgcggcggaaaggtttccgttgacggaatcgtacacgataccaaaaggagctatcgtgtttccgtcggcgttcgagtcgtcgtttcaagggttcactgaaccggaccggtttgacccggaccggttctcggaggagagacaggaggaccaaatatttaagagaaactttctcgcgttcggggctgggccccaccagtgtgtaggtcaaaggtacgcgttgaatcatcttgttctcttcatcgccttgttcacaacgttgatcgatttcaagagggacatatccgacggctgtgatgagattgcgtacgtgcccaccatttgccccaaagacgactgcagggtatttctgtccaaacggtgcgcacggtatccttcttttccttcggtagaggacctcgtcaaatgaccatattgcccttctctcatgggtttatttattcgtctcatgcaggtttatcattttttaaatttaattggataagatgcgttttggattccaatttttggtttaaattggataaattcaattttgactgaaaattaagacatccaaaatgtgtttttatcaaaatttgtttgtgttttgtgtctagcagccacaaaattgtgttgacttttcttctggttggtttttttgaaatgttgcaatccttgtaagagtttgtgtatgtgaatgtgagaggtgattggaaggtggatgattgggtgcttattagcaatcaaataaaatgatgtaacaaagaaagatgccaaatttactgaggtggcccttttgaacttttgggatgctgctgctgtatctgtacgtgtatcttttgtaaagttctgaaaggtgttcttttgggaaaaaacattattacatacttgtgctcccgcggggggggggggggggggccggtggggtaataggttctacatctgtatagctaagtcagcaatgatttttaatagaaatgtataggagcagctcacgtgttgaaagttgaagccagcataagaaatggtgcttagcaaggttattttttctttaatgggtgtttgaaagagactaattaatagataaaaaaattgcctttctt

SEQ ID NO: 6278 - DNA, 956 bp, Glycine max
taaggcccctccttctctttctctctctttgtctctcaaattcccaaaccaaagacaccacaattcactttccctttttaacattaaaatgatgaaaactcaggccttactagttctcatgttattggtgaactttgtttttttcatgggctcagaagcccgtccattgagtatcattgagacggaaaaatcagtcactggaggggaagtggtggatttctttgattggttatctcttggagcaatgaaggattctgggccaagtccaggtgtgggtcacaagttcaccaatagtgaaacccttggtgggattaaggactctggtcctagttccggggggccaggtcaccaatttactaacagccagacccttggtggaatcaagaattcgggtcctagccccggaggagagggtcacaaatttaccaacagtgagacccttggtgagatgaaggactcaggtccaagccctggccaaggacactaagtgtgtatttgaattattgtttgagaggcactaaatgtttgtttgcgcattccaatgcacagaacggagaagtaacaacacttggtgaatccataaaaacatgggttactttgaattgaacggtaacccaagcacacttgcatctcattttgttcccttattcttggcaataattcacaagaaaaaaaaatactatagttggaaaataagtttcaggttaattgatttgattccttcatttctttaattcctgtctacatttttttatttatctttattgttcatgccgtaatacttttttcttcttcttcttttttttttttttctgtgtgactcccagttcatgctgtaatactactcctattgatgtactatagttcagattcagatagtttgtctttttttgagatagtgtgaatggtaaaggacagaataatgccattcccgagtatgagtatttattgtattc

SEQ ID NO: 6279 - DNA, 1634 bp, Glycine max
  misc_feature (655)..(655): n is a, c, g, or t
atacacaagtcacaactgcaaagaaagaagtaacctttgttttctctcactctggaagaaacaaacaaacaaacactcaaattctctttccttccacgcagtaatcaatattcaatcaacctttatgacacagaaaaccccaatcccaaacaacaccctcagaccctaattacttaaaaaaatttaattttctgttatggcgactgatgcaagggcgaagttccaaaacccggaattccgacccgatttccacgcggacttaacggtgtcaagtcacgacggcctccagttctggcagtttatgatcgccggatccatcgccggctgcgtcgagcacatggccatgttccccgttgacaccgtcaagacgcgaatgcaagccctaggctcctgccccgtcaaatccgtaacggtccgtcacgccctcaagaccattctccaatcggaaggcccgtcggccctctaccgcggcatcggcgccatgggcctcggcgctgggcccgcccacgccgtctacttctccgtctacgagacctgcaagaagaaattctccgaggggaaccccagcagcaacgcggcggcacacgcggcgtcgggcgtctgcgccaccgtggccagcgacgcggtgctgacgccgatggacatggtgaagcanaggctgcagctggggaacagtgggtacaagggggtttgggactgtgtgaagagggtaatgagtgaggaagggtttggagcgttctatgcgtcttataggaccactgtgttgatgaatgcgccgtttactgctgtgcatttcacgacgtatgaggccgcgaaacgaggcctcatggaggtctcgccggagagtgtggatgatgagaggctggttgtgcacgccactgctggggctgctgctgggggtttggctgctgtggttaccacgccgcttgatgtcgtcaagactcaattgcagtgtcagggtgtctgtggttgtgataggttcacaagtggatcaattggggatgttattagaacaatagtgaaaaaagatggttacagagggctgatgcgagggtggattccaaggatgctctttcatgctcctgctgctgctatttgctggtctacatatgaagctggaaagtccttattccaagatttcaatcagcagaaagacactggcaccgttacctaaataacagagttagaatatacatcattattcggttccgttataatagatgattctgtctgtcaaaattgataaaatgctacaaacgggggcgtgagcaagcaagccttttcaagttatgcgttctaaccccaaataatatatacagaaagcatcggattaacctactaatggagaacttgttttcttgtacacattgtcagttttaattatgatttttcccccgccttagcttttttgctagtttcatttagacagaacattattccatgcaaacgcctctacgccacatgaaatttttgccttagtttcatgcagctgtaagttttaattatgtgaaagattattttgatattctgaaatttttaagagatttcatttcctggcttaaactaatatttgttctctatcttttccactttagttgttcctctattgagaagtcaggtaggaacgactatta

SEQ ID NO: 6280 - DNA, 1618 bp, Glycine max
tcgagtcagctacgtaggccccccccccacatcctctatagcatcggccaaaacaagcataactaatagaggaggaacaaaatcaacaacagtcaaaaaagaataagaatccaaagaaagataaatgggatatggcctacatagttttatggataaataatgagagaaagatgagtgtgaatcgaaagaaagatggctttgacggaatcgtgtctcctccttccctcgggttcaggaagaaacaagaacagggttccagaagacaaatgggatatggcctacatagtgtatttcaccctgggcctcggttaccttctcccatggaacgctttcatcactgccgttgattacttctcctatctctaccccgatgccagcgttgaccgcatcttcgccgtcgtttacatgttgatcggcctcgtggggatctccctcataatcttctacagccacaagtccaacgcctatgtgaggatcaacgttggcctcgccctcttcgtcgtttctctcctcatcatccccctcctcgacgccttttatctcaagggtagggtcggcttgtatagcggcttctacgtcaccgccgccgccgttggactttccgccgtggccgatgcgttggtgcagggctccattgtgggctgcgccggcgagttgccggagaggtatatgcaagctgtcgtcgccggcactgctggctctggagtgcttgtttctgccctgaggatatttacaaaagctgtttacccgcaagatgcctctggcctgcaaaagagtgcaaatctctacttctctgtatcaattgtgattgtcttcgtatgcatggttttctacaacatggtgcacaaacttcctgtgatgaagtactataaggaacttaaggttgaggcagtcactgcaaatgaagacaatggtcccctgactggagctgtctggaggtcaactgtatggaatattgtgggaagaatcaagtggtatgggtttggcattgtgctcatttatattgtgactctggcaatatttcctggttacattacagaggatgtgcactctcaaattcttaaggattggtatccaattctcctaattgctggctataatgtgtttgatcttgttggcaagtgtctgactgcagtttacctcctacagaatgcaaaagttgccataggtggttgcatagcaagattgttgtttttccctctcttcttaggttgcttgcatggtcccaaattcttccggactgagattcccgtgacaatactgacttgcctgttagggcttactaatggctacctaaccagtgcattgatgattctgattcctaaaattgtaatgttgcagcatgcagagactgcagggattgtgagtgtattattcttagtttttggtctagctgctgggtctgttatagcttggttttgggtcatctgaccaagcaatttgtgttaatttgggaacttcgatacgtgtcttgtggcttcactcaatcagaagtcaaaactgggatgaatttccttcatttgtttcctgaaaatgtggaaatttgtaagcttatatgttgatataataatgttatttgtcaattctaatgaaaaaaaaaaaaaaaaggggggccccc

SEQ ID NO: 6281 - DNA, 1825 bp, Glycine max
ttttatataagtccctctgaactggagttctgtatgtgtaacctgtaaggctgtgtttggtggacctttcccttttctcttttgaaacagagaatggctggtggaggagtagagattggaggaccaggaaaaagggctcatctttacgagcacaagttcagttggtatttcgtctatacatgcttcgttggggcccttggcggttctctctttggctatgatctcggtgtttcaggtggggtgacttcaatggatgatttcctgaaggaattcttcccaaaggtttacagaaggaagcagatgcatctgcatgaaacagactattgtaaatatgacgaccaagtgctgacactgtttacatcatctctttatttctcagcacttgtcatgacattctttgcttccttcttgacaagaaagaagggaagaaaggccagtatcattgtgggagcccttagcttcctggctggggctatcctcaatgccgcagccaagaacattgcaatgctaattattggcagagtccttcttggtggaggcattggatttggcaaccaagctgttccattgtatctttcggaaatggctccagctaagaaccgaggagcagtgaaccaactgtttcagttcacaacttgtgctggaatcttaattgcaaacctagtgaattactttactgaaaaaatccatccctatggatggaggatatctctgggtttggcaggtcttccagcatttgcaatgcttgttggaggtatttgttgtgctgagacaccaaacagccttgtggagcaaggaaggttggataaagcaaaacaagtattgcagagaattagaggtaccgagaacgttgaagccgaatttgaggatcttaaagaagccagtgaagaagcacaagctgttaagagcccgtttaggacactcctcaagaggaagtacaggccacaactgatcataggtgcattggggattccagcgttccagcagctaactggcaataactccatcctcttctatgcccctgtcatttttcagagcttgggctttggtgccaatgcttcactgttttcatcttttattaccaatggggctcttcttgttgccactgtcatctcaatgtttttggttgacaaattattacaggtgcagtcttggctgtgaactttgggcacggcaaagaaattgggaaaggagtgagtgcctttctggttgttgtgatcttcttgttcgttttggcatatgggagatcttggggtccccttgggtggttggttcccagtgagctcttcccattagagataagatcatctgcacagagtattgtggtctgtgtcaacatgatcttcactgcacttgttgctcaattgttcctcatgtcactttgccacctcaaatttgggatcttcttgctctttgcttccttaattatcttcatgagcttctttgtcttcttccttttgcccgaaaccaagaaagttccaattgaggagatttatcttctttttgagaatcattggttctggaggagatttgtaactgaccaagacccagagacatcaaaggggactgcttaaaattctcaacaaaatagattgaacaagtgtaggttttttgtttctctttctttattttggagtcaattatttcttacttgcagctttgtcaaaaaaataaatctgttaggacatttcttttaaatatggtttcttgttttttatattcattgaatctctttccctcggcgatgagaacttcctactgtaaagaaggccatcaaggttatatttagagtacaaaagatataaaataagaaaagataataact

SEQ ID NO: 6282 - DNA, 1952 bp, Glycine max
tcagctacgtaggccccccccccccccgtttttgctatgttgtctttgcccttttgaccttaggccttctttcaaatctgggactcattgatgactaagagggcattctcaaatttcaatctttggtttggttttagatgttaagtcaaagatatcttctgagaatcaatgggttgcattttgctttttctaccctctttcaggtggcattgctcttgctggtggcattgagcaatgccgtgagagttaatggaaatggtgggcagtgtggttccaacccaagactagaccctagacctcacagtgtctccattttggagtttggtgcagttggagatggtaaaacactcaacactattgcattccagaatgccatcttctatctcaagtcatttgctgataagggtggggctcagctctatgttcctccgggaaaatggctcactggaagcttcaatctcacaagccatctcaccctctttttggaaaaaggtgctgtcattattggaactcaggatccatcgcattgggatgttgttgaacccttgccttcttatggccgagggcttgaagttcccgggggaagatatcagagtttgataaatggatacatgttacatgatgtggtcgtaacaggtaataatggaaccattgatggcatgggaatggtttggtgggattggtatagcactcattccttgaaccacagtcgtcctcatttggttgaaattgtggcatctgattatgtggtagtttcaaatcttacattcttgaatgctccagcttatagcatacacccagtttattgcagccatgtacatattcaaaatgtttcaatctctactcctccagaatccccttatactgttggtatagtgccagattcttctgataatgtgtgtatagaagattgtattgttgccatgggatttgatgcaatttctctcaaaagtggctgggatgagtatggcattgcttatggaaggcctactgagaatgtacacatcagaagggtgcaacttcatgcattttctggctctgctcttgcatttggcagtgacatgtctggtggcatttcaaatgttctagtggagcatgctcatcttttcaactcaaatagtggcattgagttcagaaccaccaagggaagaggtggttatatgaaagaaattgttatgtcagacatacaaatggagaatgtccacacagcaattgctgccacaggtaattgtggctctcatcctgatgacaagtttgatccaaatgcactcccacatttggatcacattaccttgaaggatgtcataggtacaaacattaccattgctggaaacttagctggaatagaagaatcccctttcacaaacatatgcctctccaacataaccttgtccacaaattctgtttctccaattacttgggaatgctcaaatgtgtctggtttttcagactcagtgctcccagaaccttgtcccgaacttggcaacccctcatatgattcttcctcatcatgtttctacctgctgagtgtcagtggcaaaactgtagtgcagtgataataataatcctttctcaacagaagaagattcttattcttgagtaccctgctgcttgaagttgatgaaaaagtgaatggccatttcccatccaaagatttaagctacattcttttccaataagacagttgtgaggattattcattttttcatccttttagatttgcattcttgcatgttcctaccatcacattatttgtacagcttcttcatttcttcattcatgtgtaaggaaattttggtagtgccgccacaaatggactcaaaaagaagtttgatagtttttgcattagttccattgtgatttcactgtaaagcatgtagtggatttggtgatacttcaattaaagaaagttccaactttttgttaaaaaaaagaaaaaaaaaaaaaaaaaa

SEQ ID NO: 6283 - DNA, 889 bp, Glycine max
gtctacggctgcgagaagacgacagaaggggggacagctcacagtgacagcaaattgcttatcttgttttgtttttcttttcctccttgctttccccttcaatagcaatggcctctgcaacagaagccattaataaattgttgttcatattcctctttcttcaacaatattccttattaataatggcggatgattcagtttcagttccagttccagctgattggccgcaacagttccactcggttctgttcataaaccgaagcggcgatctccagaaaacggacttgtggtacgactggcccaacggtcgcaacttcaacatcattcaacaccagttgggtgtgctcaaatacgacctcgaatgggacaatggaacctccttttactacaccctcgaacccttcgacaaaacctgcaaaatcgtccatttcgaggttggcattctccgccccaactggctccacggcgccaactacctcggtcaggagcatgtcgacaacttcctctgcaatgtttgggagaaagttgacttcatttcttactacgaggatgtcctcactcgaagacccgtcaagtggatcttctcctcctccgggatggttgctcatgtgatgacatttgaggttggtgcggtgcttgaggataaacactggcaggctcctgtctactgttttggtgacgctgagacacagaacaaaacaagtacctccctcttacattcgcaagatgcttttcctggtggttcttctcatgggattttaatgagatagatacctcattctgcatatgctaagtaattctcagaatggagtgttcactttatgatttaccatatatataatatcttgaaatgattaagaacatcttaaattattttttagattaaaaa

SEQ ID NO: 6284 - DNA, 1899 bp, Glycine max
  misc_feature (1176)..(1176): n is a, c, g, or t
aactcatttcccccctccagttcccaacttttccgtgtttaacactaatcgaaaaaagatttattgttaagtccaaagagtgtctttagttttctgtcccatgtacatatatatatatatattagccacccttatcggtggtactatgtgcaagctcaaaactttaccaaatctataatcttccccttctctctcctctccccatctccctgatggggttctcatgaattcaagtagtgaaatcaagctatgatcaagccttttggggcttcgatttaccatctttttgtgctaattaaacacttgaaaattaccaccatgtccaccatgaagaacaatttcaaagaccaagaccatctctactcttcatggagcttctcaaagctcatggctttcttcttcctcttaatctccatctcctacctcttctactccctaaggttcgttagccactccttcgattgtgatcaaacccctcacattcccaccatcactcatcatatttcttccaacaccccatctgaagaagagtccacacccccctttgaagaagttaccaacatttcccacatagtctttggcataggagcctcagcaaagctttggaagcagagaaaagagtacatcaagctatggtggaggcctaatgagatgcgtggggttgtgtggttggagcaaaaggtgaaaactgagcctcaagatgagaatttcttgcccccgttgaggatctctagtgacacttcaaggttcaagtataagaacccaaaggggcatagatcagctattagaatctcacgcatagtgtctgagacacttaggcttgggatggaggatgtgaggtggtttgtgatgggggatgatgacacggtttttgtggcagaaaatttggtgaaagtgttgcaaaaatatgaccacaatcagttttattacattgggagttcctcggagagtcacttgcaaaacatttatttttcttataatatggcttatgggggtggtggttttgccattagttatcccttggctgtggcattggagaagatgcaagataggtgcattcagaggtatccagggttgtacggctctgatgataggattcaggcttgtatggcagaattgggagttccactcaccaaggaaaaagggttccatcagtttgatgtgtacggcaatctnccttgggcttctggcggcccatccagttacgccactggtatccctccatcacttggacgtggtagagcccatatttccaaacgtgagccgggtccaggccctgaagaggctgaaagggcccatgaaacttgacccagccgggctcatccaacaatccatttgctacgacaaagcccggacctggaccatatccgtttcatggggctatgcggttcaaattttccggggcaccttttctgcccgggaaatggagatgccggcgaggacattcctgaactggtacaagcgagccgattacacggcgtatccgttcaacacgcgccctgtcagccgccatgtttgtcagaaaccatttgtttattacttgtctagggcagtgtatgatgagggtgctaatgaaactgcaagtcaatatgtacgggttcagcaaaacccggattgcaattggaaaatggaggatccgacccagatcaaagtggtgcaggtttataagaaacccgacccgcatttgtgggacaaggctccaagaagaaattgttgtagggttcgacgcacaaagaagcaaggaactatggtgattgatgtgggggaatgcagggaagatgaacttgttgaattgtagttagaggtcctacacatcaattgataattcttaactcaagcctttgctatatgtattttcttcttctatacatatatgatttaccttgaggaaaaaaaaaa

SEQ ID NO: 6285 - DNA, 2267 bp, Glycine max
  misc_feature (1986)..(1986): n is a, c, g, or t
  misc_feature (1989)..(1990): n is a, c, g, or t
  misc_feature (1992)..(1992): n is a, c, g, or t
  misc_feature (1994)..(1994): n is a, c, g, or t
  misc_feature (1996)..(2004): n is a, c, g, or t
  misc_feature (2009)..(2009): n is a, c, g, or t
  misc_feature (2011)..(2014): n is a, c, g, or t
  misc_feature (2023)..(2026): n is a, c, g, or t
  misc_feature (2028)..(2028): n is a, c, g, or t
  misc_feature (2035)..(2035): n is a, c, g, or t
  misc_feature (2037)..(2041): n is a, c, g, or t
  misc_feature (2044)..(2046): n is a, c, g, or t
  misc_feature (2052)..(2053): n is a, c, g, or t
  misc_feature (2055)..(2055): n is a, c, g, or t
  misc_feature (2057)..(2063): n is a, c, g, or t
  misc_feature (2066)..(2066): n is a, c, g, or t
  misc_feature (2070)..(2071): n is a, c, g, or t
  misc_feature (2074)..(2074): n is a, c, g, or t
  misc_feature (2078)..(2078): n is a, c, g, or t
  misc_feature (2086)..(2086): n is a, c, g, or t
  misc_feature (2088)..(2089): n is a, c, g, or t
  misc_feature (2093)..(2093): n is a, c, g, or t
  misc_feature (2102)..(2103): n is a, c, g, or t
  misc_feature (2112)..(2114): n is a, c, g, or t
  misc_feature (2120)..(2120): n is a, c, g, or t
  misc_feature (2126)..(2127): n is a, c, g, or t
  misc_feature (2130)..(2130): n is a, c, g, or t
  misc_feature (2143)..(2143): n is a, c, g, or t
  misc_feature (2146)..(2146): n is a, c, g, or t
  misc_feature (2149)..(2149): n is a, c, g, or t
  misc_feature (2151)..(2152): n is a, c, g, or t
  misc_feature (2157)..(2159): n is a, c, g, or t
  misc_feature (2165)..(2165): n is a, c, g, or t
  misc_feature (2168)..(2170): n is a, c, g, or t
  misc_feature (2176)..(2176): n is a, c, g, or t
  misc_feature (2178)..(2178): n is a, c, g, or t
  misc_feature (2180)..(2180): n is a, c, g, or t
  misc_feature (2186)..(2186): n is a, c, g, or t
  misc_feature (2189)..(2189): n is a, c, g, or t
  misc_feature (2193)..(2193): n is a, c, g, or t
  misc_feature (2195)..(2195): n is a, c, g, or t
  misc_feature (2203)..(2203): n is a, c, g, or t
  misc_feature (2206)..(2206): n is a, c, g, or t
  misc_feature (2208)..(2209): n is a, c, g, or t
  misc_feature (2212)..(2212): n is a, c, g, or t
  misc_feature (2214)..(2214): n is a, c, g, or t
  misc_feature (2221)..(2222): n is a, c, g, or t
  misc_feature (2225)..(2225): n is a, c, g, or t
  misc_feature (2227)..(2229): n is a, c, g, or t
  misc_feature (2233)..(2233): n is a, c, g, or t
  misc_feature (2238)..(2238): n is a, c, g, or t
  misc_feature (2240)..(2240): n is a, c, g, or t
  misc_feature (2245)..(2245): n is a, c, g, or t
  misc_feature (2248)..(2248): n is a, c, g, or t
  misc_feature (2251)..(2251): n is a, c, g, or t
  misc_feature (2253)..(2253): n is a, c, g, or t
  misc_feature (2264)..(2264): n is a, c, g, or t
  misc_feature (2267)..(2267): n is a, c, g, or t
tcagctacgtaggcccccccccccgatatgccaaactccactactccttagtttctctcttcacatatcatcatacttagatagtcagatacatcacccaataattaaattaaatacatgctagcactttaacagtactcctttctctaatatctctctcatattttcctttctgcggatattcagctaattaaactaagtcactaagatgactgagggaaagctagttgaagctgcagaagctcataagacacttcaggatttcgatcctccaaagaagcgcaaaaggaacaagtatgcttttgcttgtgctatgctggcctccatgacttccatcttgcttggttatgatattggagtgatgagtggagcagccatatacataaaaagggacctgaaagtctcggacgagcaaatcgagatcctgctcggaatcatcaacctatactctctgataggctcatgtctcgccggcagaacctccgactggataggtcgccgttacacgattgttttcgccggcgccatcttctttgtcggagcacttctcatgggtttctcccccaattattcctttctcatgtttggccgtttcgtcgctggcattggcatcggctacgccctcatgatagcccccgtctacaccgccgaggtctccccggcctcctctcgtggcttcctcacttccttccctgaggtatttattaatggagggatattaattggatacatatcaaactatgcattttcgaagctgacactaaaggtgggatggcgaatgatgcttggagttggtgcaataccttcggtactcctaacagtaggagtgttggcgatgccggagtccccaaggtggcttgtgatgaggggtcgtttgggagaggcaagaaaagtgcttaacaaaacctcagacagcaaggaagaggcccaactaaggctagcggaaatcaaacaagccgcagggatccccgagagttgcaacgacgacgtcgttcaggtaaataaacaaagcaacggtgaaggtgtatggaaagagctcttcctctatccaacgcccgcaattcgtcacatcgtaatcgctgcccttggtattcacttcttccaacaagcgtcgggcgtagacgccgtcgttttgtacagccccaggatcttcgaaaaggctgggattacaaacgacacgcataagcttcttgcaaccgtggccgttggattcgttaagaccgtgttcatcttggcggctacgtttacgttggaccgcgtgggtcgtcgtccgttgttattgtctagtgtcggcggcatggtgctctcgcttctcacgcttgcgatcagcctcactgttattgatcattcggagaggaaattaatgtgggccgttggatcgagcatagccatggtgttggcttacgtggccacgttctccatcggtgcgggtcccatcacgtgggtctatagttctgagatcttcccgttgaggctgcgggcgcagggtgcggccgcgggagttgcggtgaataggaccactagcgcggttgtctcaatgacttttctgtccctcactagagccatcactattggtggagctttcttcctttattgtggcattgctactgttgggtggatattcttttacaccgtcttgcctgagacccggggaaaaacgctcgaagacatggaagggtcttttggtacttttaggtccaaatccaacgccagcaaggctgtagaaaatgagaatgggcaagtagcacaagtccagctaggaaccaatgtccaaacttgaaaaatgagtattgggacatccagtaatagtgaagtaatttcgtgattttttttttgttttttactttttagactagttcttcaaatcaaaacgagaagttaaagtgacaagacttgtgtatgaaaaaaaaaatacaataatttctatgaatgacaaaggttgaaagaaaaaaaaaaaaaaaaaataccaaaaaaacaaaactactnagnncngntnnnnnnnnnctaanannnngcatcaaannnncntccctantnnnnngcnnnaaaacnncntnnnnnnnaanttcnngcncccngggggatncnnattnttcttaacnnccccccccnnngggggncccctnnttnggcccccttaagnggnggnannataannncggggncannntaggcngntnttctcntcngggnanaaaaagtntcncnnaananccccccnnatncnnnccgngaatntnaggcnccnacntngggcctcccanacn

SEQ ID NO: 6286 - DNA, 1619 bp, Glycine max
tcgagtcagctacgtaggcccccccccccgtcgcgcaccacacgccatcgagcatcaacgcaaatcgatggcggcgatgggttccctcgcaaaactcatcatcgttcactgatgaaaccaaaacctaaaccctactccttcctccctctcaaccgatttcttcgcgcgctacaatctcgtcccctcatggcccaaaccccaacatctctcgatgcagagcacccctccgacaacgaccagcacatgggctttcgggcgcggagcctgagcggagagtctcgggcggagcaagcgtgggcccattggaccaagctgggccggcccaggttcatagtggccccgatggtcgacaactcggagctgcctttccggatgctgtgccgcaagtacggtgcccagggcgcgtacacgcccatgctccattcccgcattttcaccgagaccgaaaagtataggaacgaagagttcaccacttgcaaggaggatcgaccgttgtttgttcaattctgtgccaacgatccggatgtgttgttggaagctgcacgcaaggtggaacgtttttgcgattatgttgatattaatcttgggtgtcctcagcgcattgctaaacggggatactatggtgccttcttgatggataaccttcctcttgtgaaatctctggtggaaaaattggctgttaaccttcaggttcctgtttcatgcaagattaggctctttccaaatttagaggacactttgaagtatgctaggatgcttgaggaggctggttgtatgcttttagctgttcatggcaggacaagagatgagaaggatgggaagaaatttcgagcagactggaaagctatcagggctgtgaagaatgcagtcagaatccctgtccttgcgaatgggaacataaggcatattgatgatgttagagactgcttagaagagactggggtcgaaggggttctttccgctgagaccctgctagaaaatccagctctctttgctggatttcgaactgctgagtgggtgtctgaaagtgaaggtaccaatgtggatggaaagctggaccaggcagatctgctaatagagtatttgaagctttgtgaaaaataccctgttccgtggagaatgattcgttctcatgttcataaattgttgggagactggttcagccttcagcctcacatcagggaggaacttaacaaacaatctaaattgacttttgaatttctctatgacatggtggatcgacttagggctacaggtataagaattccactttacaaagatacccaagtggaacttacagcaggcagttacccagattaacagagctgcacgccaacatttggagttcaaatttaaatcaatgaaatatcttatgcggtagaggtggtgcggccagccaaagctagcatgattgcacatcatttagatacaattttgtagtgattagaagtgagaatagttaaaatttctaatatgtgctgtatttgtgttcattcttattgcaattgccaattgacagtgttgtaccctattaaaacgcttatgtttgctcagagcagataaatttatgcgattaccttgaatgtttcaaaaagaaaaaaaaaaaaaaaaaagaattc

SEQ ID NO: 6287 - DNA, 2403 bp, Glycine max
ggtgctcccatcgtcttctagggtaaccacggcgccactcgaacaagtgcggcaattcccaacgcttctcttctcagggggagttcgaatcctgtgagctttcaatatgacgtcgttcttgaagcctgagaatgctctgaaaagggcggaagaattaatcaatgttgggcagaagcaggatgctttgcagactcttcatgacctcatcacctcaaaacgatacagagcatggcagaagacacttgaaaggattatgttcaagtatgtggaactttgcgtcgacatgcgaaaaggccgttttgctaaagacgggttaattcagtataggattatatgtcaacaagtgaacgttagttcactggaggaggtcataaagcattttatgcagctttctaccgagaaagctgaacaggcccgtagccaggcgcaggcactagaagaagcccttgatgttgatgatttagaggcccggtcgaccccgcggcccctgatgttgagctatgtcagtggcgagaaagggaaagacagatctgatcgggagactgttaccccctggtttaagtttctttgggaaacttataggacagtgctggaaatattgaggaacaactcaaagctggaagccttatatgctatgacagctcatcgagctttccagttctgtaagcaatataagcggacaacagagttccgcagactgtgcgaaatcattagaaatcatttggctaatcttaataaatatcgtgaccaacgagaccgacctgatctttcagctcctgaaagcttgcaactgtatcttgatacaagatttgagcagctgaaaattgctactgaacttggactctggcaggaagccttcaggtcagtggaggatatacatggactgatgtgcttggtcaagaaaacacccaagccatccttgatggttgtttactatgtgaagctgacagaaatattttggatatcatcgagtcatctgtatcatgcatatgcatggttcaagctctttttattgcaaaaaagcttcaataagaatctgagtcagaaggatctgcaattaattgcttcatctgtcgttctggctgcactttcagtgcctcctcatgatcgcacccacggtgcatctcatttggaactggagcatgaaaaagagagaaatttgagaatggctaatctcattggctttaatcttgaaactaaacctgaaagcagagaaatgctatcaagggcatcacttcttgctgaactggcatccaagggtgtgatgtcttgtgtgactcaggaagtgaaggacatttaccatcttttggaacatgagttttatccctcagatcttgcattaaaagcactgcccttaataactaaaatctcaaagttagggggcaagctttctactgcgtcatctgttccagaagtgcaattagctcagtatgttccagcactggaaagactggctaccatgaggttgctgcaacaggtgtctaatgtgtaccaatctatgaagattgagaccttatcagggatgatccccttctttgactttgctcaagtggaaaagatttctgtagatgctgttaagcagaagtttgtatcgatgaaagttgaccacatgaaaaatgctgtgatttttagtaaaaagagtctcgagtctgatggcttaagggatcacttgggcaattttgctgaacaattaaataaggcaagacaaatgatttatcctcctgatgggagaccatcaaaacttggagctttacttccaactttgacagaggttgtggccaaagaacacaagaggcttcttgctcgaaaatcaattattgagaagaggaaggaagaacaagaacgacagcttcttgaaatggaacgggaggaggagtcgaagaggctaagacttcagaaaataaccgaagaagcggaacaaagaaggcttgccactgagtatgaacagagaaagaatcagaggatccttagggagatagaggagagagaaaatgaagaagcacaagctttactccaggaagctgaaaagcgtattaaaaagaagggaaagaaaccaatcatagagggggacaaaataaccaagcagaccttgatggaattgactttgaccgagcaactccgggaaagacaggaaatggaaaagaaactccagaagttagcaaaaaccatggattatttggaaagagccaaaagagaagaggctgctcccctgattgaagctgcgtataacagcgtctagtggaagagagacttcttatgagcgtgagcagcacaagaggttgaactgagcaaacagaggcatgagggagatctaaggagaggagaggcttgttcgaatgatgggcaatagggaagtatatcaagcaggggggttagtcaccgccagcagagttaacagatgag

SEQ ID NO: 6288 - DNA, 760 bp, Glycine max
  misc_feature (736)..(736): n is a, c, g, or t
tcagcgacgcgggccccccccccggtgctcccatcgtcttctagggtaaccacggcgccactcgaacaagtgcggcaattcccaacgcttctcttctcagggggagttcgaatcctgtgagctttcaatatgacgtcgttcttgaagcctgagaatgctctgaaaagggcggaagaattaatcaatgttgggcagaagcaggatgctttgcagactcttcatgacctcatcacctcaaaacgatacagagcatggcagaagacacttgaaaggattatgttcaagtatgtggaactttgcgtcgacatgcgaaaaggccgttttgctaaagacgggttaattcagtataggattatatgtcaacaagtgaacgttagttcactggaggaggtcataaagcattttatgcagctttctaccgagaaagctgaacaggcccgtagccaggcacaggcactagaagaagcccttgatgttgatgatttagaggccgataaaaggccggaggacctgatgttgagctatgtcagtggcgagaaagggaaagacagatctgatcgggagactgttaccccctggtttaagtttctttgggaaacttataggacagtgctggaaatattgaggaacaactcaaagcttggaagccttatatgctatgacagctcatcgagctttccagttctggtagcaatataagcgaacaaccagagtttccccaactgtgccgaaatcntttggaaacccatttggcttaatc

SEQ ID NO: 6289 - DNA, 2578 bp, Glycine max
tcgagtcagctacgtaggccccccccccccactacagtctccaatgatagtaactttttccctcaccttcttccaattcaaaccagtggcattttcgcaaatgtgagcggatccaggtccgtttctaccccaacttctgcttccacttccaccctcgtatataaacctttcactttccacttcccctgttcaaaaacactcagcaaaagaataaaagaaacccaaaatctctctctctctctcgttcgctttccgtatccatatatatcccaaaccctaccgttaggttccccaattcttcaacaccccgtggaccggtgctctgcttcttagtagttcgtacggtttttccgtcgattgcctccgaaacgatgtcgtatcgcccaagcgggaactccaggaccgaggtccgccggaaccggtacaaggtggcggtggacgcggaggaaggtcggagacggcgagaggacacgatggtggagatccgcaagaaccgcagagaagagagtttgcagaagaagaggcgcgaggggctccaacctcagcagatgcctgcgtccgttcactctagtttggttgagaagaagttggaacatctaccatcgatggttactggtgtttggactgatgataataacctgcagctcgaggcgacgacgcagtttcggaagctgctttcgattgaacgtagtccaccgattgaggaggttatacagactggtgtggtttctcgatttgttgagtttctcatgagggaagactttccgcagttgcagtttgaggcagcttgggctttgacaaatatagcttctggaacgtctgaaaacacaaaggttgtgattgatcacggggctgtcccaattttcgtgaagctacttgcttctcctagtgatgatgtccgcgaacaggcagtgtgggcattaggaaatgtcgctggggattcgcctagatgtcgtgatcttgttctaagtcatggggctttgcttcctttgttggcacaattaaatgaacatgcgaagctttctatgcttagaaatgctacctggacactttcaaacttctgcaggggcaagccacagcctccttttgatcaggttaaacctgcacttcctgctcttgcccgtcttatccattcgaacgatgaagaagttttgactgatgcatgttgggcactgtcatatctttctgatggtacaaatgataaaattcaagctgtaattgaagctggtgtttgtccccgacttgttgagctgctgctgcacccatccccttcagtgctaattcctgctcttcgaactgttggaaatattgtcactggagatgatatgcagacacaggttatcatcaatcaccaggctcttccttgccttctgaatctgttgaccaataattataaaaaaagcatcaagaaggaagcttgttggaccatatcaaacatcacagctggtaataaacagcagattcaggctgtgattgaggctaatctaattgctcctttggtcaatctgcttcaaaatgctgagtttgatatcaagaaagaagctgcttgggctatctcaaatgctacatccggtggttctcatgaacaaatcaagttcctagtaagccaagggtgtattaagcccttgtgtgatcttctcatctgtcctgatcctagaattgtgacagtttgtctggaaggccttgaaaacatcttgaaggtgggagaagctgataaaaacataggcaatactggtgatgtgaatctatatgcccaaatgattgatgaagctgagggattggagaaaattgagaacctccagagtcatgacaacacagagatttacgaaaaggcggtcaagattcttgagacatactggttggaggaggaagatgagactatgcctccaggggatgcttctcagtcagggttcaactttggtagcagtgacgctcctgctgtgccgtccggtggattcaactttaattagaagatattcatgctctactggggagctttggctggtctagagttttggttggtctatctgtgaagtcctcctttatgacacgacagcagttgggggacaagtcaacgtcttgtcattgtcctaatgtccttgggttgtacgaggtccagcaagtaaatacatggttgctggactgccttgggtttttgcaatgcctgatatttcatatctcatggtgtaaaatgctttgtggctatatttttttgccaccgtagagaatactagagtcttctttctgccaagtgatcatttcatagaattaatgaatgctcagtctcgtgattttttttccctttgttatatattgtcctagactggagtaaaaagttacgattgttggtttttttggcaaatgccaaatgctactgcctatccattagttacaaggaacgttttggagtctttcttttatcctaataatttgtaagcttttttagttgacgtttaccccaaagttccatttctcatcacgttatgtaggccccggtacatttacattatttatttagtacttcaacttgggactatgttttcaaaagaaaacatgctgcaattattgtgtagtctct

SEQ ID NO: 6290 - DNA, 1625 bp, Glycine max
atctgagtcagctacgtaggcccccccccatgtttgcttttaagattactagatttttgttggtttgttgttcccctttcccaccagacaaacataacatcaaagtgaaatgctattgctcgagccatatggcaatcctttcttttggctgtattggtgctgtatagataatggattttcactgtggtgagataatagatgattctgatctggagtttgtttcttaagaccccattgtcaagtgcaacctaataaggttactgctgagattacctaatcatgtctctattttggaaatgatgtgttctggtatcaaaatatgctttctatgattttaattttttttttgagtttcgggttgctttaaccttgtgttttgccccataggttatcatcaatcaccaggctcttccttgccttctgaatctgttgaccaataattataaaaaaagcatcaagaaggaagcttgttggaccatatcaaacatcacagctggtaataaacagcagattcaggctgtgattgaggctaatctaattgctcctttggtcaatctgcttcaaaatgctgagtttgatatcaagaaagaagctgcttgggctatctcaaatgctacatccggtggttctcatgaacaaatcaagttcctagtaagtcaagggtgtatcaagcccttgtgtgatcttctcatctgtcctgatcctagaattgttacagtttgtctggaaggccttgaaaacatcttgaaggtgggagaagctgataaaaacataggaaatactggtgatgtgaatctatatgcccaaatgattgatgaagctgagggattggagaaaattgagaacctccagagtcatgacaacacagagatttacgaaaaggcggtcaagattcttgagacatactggttggaggaggaagatgagactatgcctccaggggatgcttctcagtcagggttcaactttggtagcagtgacgctcctgctgtgccgtccggtggattcaactttaattagaagatattcatgctctactggggagttttggttggtctatctgtgaagtcctcctttatgacacgacagcagttgggggacaagtcaacgtcttgtcattgtcctaatgtccttgggttgtacgaggtccagcaagtaaatacatggttgctggactgccttgggtttttgcaatgcctgatatttcatatctcatggtgtaaaatgctttgtggctatatttttttgccaccgtagagaatactagagtcttctttctgccaagtgatcatttcatagaattaatgaatgctcagtctcgtgatttttttttcctttgttatatatgtcctagattggagtaaaaagttacgattgttggtttttttggcaaatgccaaatgctactgcctatccattagttacaaggaacgttttggagtctttcttttatcctcttcctttgtaagcttttttagttgacgtttaccccaaagttccatttttcatcacgttatgtaggccccggtacatttacattatttatttagtacttcaacttgggactatgttttcaaaagaaaacatgctgcaattattgtgtagtctcaaaaaaaaaaaaaaaa

SEQ ID NO: 6291 - DNA, 953 bp, Glycine max
attcaaacgctcgcaaaagaaacccaaaatctcttcggctctctctcttttccatatccatatatatccccaaaccctaccgttaggttccccaattcaacaccccgtgggccggtgcgctgcttctttgttcgtacggtttccgtcgattgcctccgaaacgatgtcgtatcgcccaagcgggaactccaggaccgaggtccgccgcaaccggtacaaggtggcggtggacgcggacgaaggtcggagacgacgagaggacacgatggtggagatccgcaagaaccgcagagaagagagtttgcagaagaagaggcgcgaaggattccaacctcagcagatacctgcgtccgttcactctagtttggtagagaagaagttggaacacctaccatctatggttactggtgtttggactgatgataataacctgcagctcgaggcgacgacgcagttccggaagctgctttcgattgaacgtagtccgccgattgaggaggttatacagactggtgtggtttctcgctttgttgagtttctcatgagggaagactttccacagttgcagtttgaggcagcctgggctttgacaaatatagcttctgggacgtctgaaaacaccaaggttgtcattgatcacggggctgtcccaattttcgtgaagctacttgcttctcctagtgatgatgtccgtgaacaggcagtgtgggcattaggcaatgtcgcgggggattcacctagatgtcgtgatcttgttctcagtcatggggctttgcttcctttgttggcacaattaaatgaacatgccaagctttctatgcttagaaatgctacctggacactttcaaacttctgcaggggcaagccacagcctccttttgatcaggttaaacctgcacttcctgctcttgcccgtcttatccattcaaacgatgaagaagtattgactgatg

SEQ ID NO: 6292 - DNA, 754 bp, Glycine max
acggctgcgagaagcgacaggtgcttggtgcgaccaaatattcccgttcctcgggccttgaccattgagccatatattcccattcgtgtgtttccttcggcgcttgcttccgtgacttgagaaaaagagaattagggtcacgagggtttcatcctgcggcatcagacatgggaggaggcaatgggcaaaaggcaaagatggctcgcgagaagaacatcgagaagcagaaggccgcctcaaagggaagccagctggattcaaacaagaaagcaatgtcgatccagtgcaaggtgtgcatgcaaacatttatgtgcaccacatcggaagtgaagtgtagggagcatgctgaagccaaacaccctaaatctgatgtttatgcttgttttcctcatctcaaaaagtgaacatattggagagtgcaaatggagaaaaactttatatcatcatggcctcttccttaaacctattgacagagatcttccccattttctatctatataaaatgtgtttttctgtgtttgtgccttgggaatttaggagggacaaggagaggaagactattttattatgatttcccttgatgacaggacaagaaactgtgtgatgcttgtcaaggtgtaactgtttaatgatggttcgtgttaatattaaagtgttacagaaacttaaattctagtcttatcagaggaaatgttttactatcggtaatttcgtctcagagtctggaaccaaaatggaatttttggtgtcctga

SEQ ID NO: 6293 - DNA, 1584 bp, Glycine max
aacattcaacactcttccttctcctccctcctccaacaaagcaaccttttttttttttttttctctctttctttccatttccccctcaaattaatttccatcatatataatagtgtcacccaccaccacagcctaaacaacagaagcagcaggttcaaacttcaattcatggaagtgtgattctaatctccacaacaaacctaaccctaaaaagctaacccttttttttttttttttaaatattggttctttttttacttaccctagatgttagagccatggacataaccccaacaacaacgatcaacaacaacaacactactcccagtgcaacaacaaaatccccagaaaatgaaacagaaacaccgaccaggatcaccacccccatcactcccacaacgacaaaaacctcatctttctcgaatggtgtcctcaaacgcacccaccaccaccaccacctccaccaccctatccctccggtggttacctacaaagaatgcctcaaaaatcacgccgccaacttgggtggccacgccttagatggctgcggcgagttcatgccctctccgaccgccaccgctgccgaccccagctccataaaatgcgccgcctgcggctgccaccgcaacttccaccgccgcgagccggaggagccccccatcgcctccaccaccacgcacgtcatcgagtatcagccccaccaccgccaccaccctcccccgccgctgcacgcggcggcggtagccacccgcagccccaattctgcttccccaccgccgatctcctcgtcgtactacccctccgcgccgcacatgctcctcgccctctccgccggactggcggctccgccggagagcaccgccgcgcctgccgccgcgcccacgagaaagcggttccgcacgaagttcagccaagagcagaaggagaagatgcacaagttcgcggagaaagtagggtggaagattcagaagcgcgacgaggatttgattcacgaaatttgcaacgaagttggcgttgatagaagcgttctcaaggtttggatgcataacaacaaaaacacctttgccaaaaaggataacaataatattgttactagtaatgatattaatattactactaaaaataatatttctactgataatgatgcaaatgggagtgatgtcaaggtttttgaaaaccctaacaatgatggtggtgaagatcgcgctgaagatccgagtagtaatcactatgatggggtgaacgttgttggtgctaatggatcttctagttcttgatctaagggggaagaaaataataatgtattagataggttaatgatgattatgatgatgatgatgatgctacaaggttaattaatcagctgtttttaatttcttttcttttctatttttgtttttaattgtttagtttttatattgttaatgagagcatgatgatcaatcagtttaatgggagagaatgttatatccggaagagaatttattttgcttttaatggttttatgctgaattaagttagcttttagttgttaccacttgttatgaatgtatattatgtttatctttaaaaaaaaaaaaaaaa

SEQ ID NO: 6294 - DNA, 942 bp, Glycine max
ctcgagccgctcgagccgattcgcccccggggccgccggcccgcgcttacccttaatttttttcttcaacaaacgccacaatggccgtcacgaaaagcctctccatcttcctcttcatcgccataagctgcgtggccgtagctcaggcagcgaacttcaacatcacaaacaattgcacctacacggtgtgggccgccgccgtgcccggcggcggctcaaggcttaaccctggcgaatcgtggaacatcagcgtgacgaacggcacgacaggaggacgcatctggggtcgaacaaactgcaccttcgacaacgcaggacgcgggaagtgcctcaccggcgactgcgacggtgttcttgagtgcaacaaaacaggtacacctccgaacacgttggtggaattcgcgttgaaccagtacaacaacctcgacttctacgacatctccctcgtcgacggtttcaacattcccttgcaggtgagcccgacctacaactgcagctccgtgaaatgcgccgccgacatcatcggagagtgtcccactcagcttcaggttcccggcggctgcaacaacccgtgcacggttttcaatacgactcagtactgttgtagcaccggtgctgcgggttgcggtcccactgattattccaagttcttcaaggagaggtgtccagatgcctttagttaccctatggatgacgcaagcagcatgttcacttgcatgggaggatctgattataggcttgtgttttgcccttaattaattcatcatcaactgcttttaaatttcgtgattcctattcgtcttattgttgtatactttggtttgtgtgttattattttatcaccaaataaaagagttcttgggggctttgtgcgcgcatctctctggcgggatgtgctctctttctcctaaaataactaataaacttttacatcgttgaatt

SEQ ID NO: 6295 - DNA, 1085 bp, Glycine max
  misc_feature (1068)..(1068): n is a, c, g, or t
gcccttcgagcggccgcccgggctggtccccggggaacatttttttctttaacgaacggcaattaatttacaatggccgtcacgaaaagcctctcaatcttcctcttcatcgcaatgagctgcgtcgccgcagctcaggcagcgaacttcaacatcacaaataactgcacctacacggtgtgggccgctgccgtgcccggcggcggcgcaaggcttaaccctggcgaatcgtggaacatcagcgtgacgaacggcacaacaagaggacgcatctggggtcgaacaaactgcaccttcgacaacgcgggacgcgggaagtgcctcaccggcgactgcgagggtgttctggagtgcaacaaaacaggtacacccccgaacacggtcgttgatttcgcgttgaaccagtataacaacctcgacttctacgacatctccctcgtcgacggtttcaacgttcccctacagctgaccccgacctacaactgcagttccgttaaatgcgccgccgacatcatcggagagtgccccactcagctccaggttcctggcggctgcaacaacccctgcacggttttcaatacgactcagtactgttgtagcaccggagctgctgggtgcggtcccacagattattccaagttcttcaaggagaggtgccctgatgcctacagttaccctatggacgatgcaaccagcatgttcacttgcatgggatccgattatagggttgtgttttgcccttaattaattcaacatcatcaactactttttttttattttttatttttattttccttctctaatttcgtgattcctatttgtgttattgttgaatactttgatatgtgtattatttatcaccaaataaagacgttcttaattgggggctttgggcgcggatctctgcctgctgagatgtcccaaaataagtaataaacatttacataaattaattcacatgtcccaaaagagttcttgttattagagtcctagggagttgatttatgattcattacaaaaagttcgaataatgttcatttgttattatccagttttgttttgaaggtnaaaaaaaaaaaaaaaaa

SEQ ID NO: 6296 - DNA, 1767 bp, Glycine max
  misc_feature (1763)..(1763): n is a, c, g, or t
  misc_feature (1767)..(1767): n is a, c, g, or t
tcagctacgtaggccccccccccccgaatgaaagtagtaaccaacttcaagtagaatgagagatagagagtagccaaaatgggcatatggagaaacgagatttcagaagaagcaaagaagcagctatggctatcagggccaatggtatttgtgagtgtgtttcaatacagtttacaaatgatatctctcatgtttgtaggccatttggacgagttgcttctagctggtgtttctctggctacttcatttgtaaatgtcactggtttcagtgtgctgctaggtatgtcaagtgcacttgacacattttgtggtcaatcatatggagcacagcagtatcatatggttggcatacacatgcagagagccatagtgatcatcatgcttgctactataccaatgtcttttatttgggcatacttgaggcctattctggttgttctgcatcaagacaaaacaattgcagcacaagctcaactatatgccacatacttgatcccaagcctttcagccaacgctcttcttcggtgcattactaagttcctacaaaacccagaacattgtccttccaatgatgctagcttctggattcactaccttagcacatgcccttctctgttggcttttggttctaaaatttgggcttggcatcaaaggagctgccattgcattttgcatttcaaattggcttaacacggtgctactagcactttacatcaggttctcctcttcctgcaaaagcacttggactggtttctcaagggaatccttgcagaacattcctcaatttctcagtcttgcttttccttcagcactcatggtctgtctagaacaatggacttttcagataatggtactcctatctggggctcttcctaatccaaaattgcaaacatcagtgctttctatatgctttaatacaactggtctgttttggatgataccatttggggtcagcgttgctgcaagtacaaggatatcaaatgaactaggggctggctgtccaaaagctgcatatttagcggttaaagtcaccttgttaatgtccttcgtggttggggctttaggatttattcttctcatggtcacaagaaacatttgggggcatatttttaccaatatacctgaagtaatccgttatgtggcatccatgacaccaattcttgcaagctctgtctttgtagattcaattcaaacagcattatcaggtattgtaagaggatgtggttggcagaagcttggtgcatttgtcaatcttggatcttattatcttgtggggcttccctttgcaattgtgttggcttttgtcctccatatcaaaggagaggggctccttttagggattgtgattgcacttactatgcaagtggtgggtttccttgtcatcacgttgcgcaccaattgggagaaagaagcaaataaggcagcaaaaagaataagaagcaacggagtgccaactgatgcaaatgcactgccaagtgaccaaaatgaaaatcttcgacagttgaacagtaattatgcttagtgattctgattatttagaaaagcagtttttagtgaacattttttttggtacaactattttgtatataaaaggaaagtgccctcgtagattcataattgggctgttaaaatcaaaccaaagactaaattagcagtgggagaatgaatggttcacaatttaatagaatttcgtatgatattaataaaaaaaaatattatgttaatctaaaaaaaaaaaaaaaaaaaaagaaaaaaaaaaaaanaaan

SEQ ID NO: 6297 - DNA, 645 bp, Glycine max
aaatcgccagcaattattattcccctcacgaacccctctctccccacttaccaaactccggctcccaacgcccaaagcctccgcatccagagctccaaaccctaggcgaggcgaggcgaggcgaggagggagaggccatggatcccgattcggtctcgaaggcgttcgtgcagcactactaccacacgttcgactccaaccgcgccgcgctggtggggctgtaccaggacggctccatgctcaccttcgagggcgagaagttcggcggccccgccgccatcgccggcaagctcggatctctccccttccagcagtgccagcacaagatcgacaccgtcgactgccagccctcggggccccagggcggcgtcctcgtcttcgtctccggcaccatcaccaccggccccggcgagcaccccctcaagttctcacagatgttccatttgctgccagctggagggagcttctacgtgcagaacgacatgttccgcctgaactatggttaaggaagggcgaccgctctggcggcaaagaacttgttcagggatttatggtttgaacaatggacatcaaatgatgatgctgcagactctttggttgttcgcccgcttgtgcatttatcccaaaaaatggcagactggatag

SEQ ID NO: 6298 - DNA, 801 bp, Glycine max
cgacctccccctcgaggtcgaccggtatcgataccttatttttgttttttttatcataaagcattttgatatttaaatgtaatggcatgtaaacaaatgctctagatttcttcttgacgacatgaagtgaagaacaagacacaagattctctctctctcttgtttagagatccaaaaagaaagagagggataacaaacatatgactcttaaggtaacggctagtaaaccagaaggtaagactcaaatagacacttttgcatcaaaggaatgcttattcgttgacagatattgaaaaataaatcaaggtagtggcaccggaggaacttggccgttggttccagcgccagctccagtggccggggttggagtttcaaatccggggtttgggacaagggtatcatcgccaccagggagctgggtgcgagttccgcctccttgtcccccaccaaatgatgggatttggccaccgatagacccgccggtaaggggagctccagtgacgggattgtaagggtagaatggtttcttacatttgggaggaagcaagaaccttccaacaccggggatgagaatagttggtttgggctcaatggtgacaagaaactcagggtgtttgacatcagtggtcttatgggacttgggaacatgacgcagtccgctaacttgctctgcaggtccaagcagtaggctaagaagcatgacagtgactgctgctgctgcgagtgttagcagagacgaagccatttgtttttttacaaattgtagtgagaaaacttggggaaggtagtgtgtttgttttt

SEQ ID NO: 6299 - DNA, 537 bp, Glycine max
ttttttttttttttttgaaacaaggagtttttttttttaagttttgagcatagtacacaccaaagtttcattaaacgatacaaaacatgaggcacaacacattaacaacaatgaagataaaatatagcttgctagcttcttaggttctcttgacagggtcaaagttggagacaccgacgacggcaccaatgatgacggtgagaaccacgccaccagacgcaatgctgagcaagaaattcttgagagaaggagagattcctggaccagcagcttcagccatctccgggatgaccattgaagcggtgagagcggccgcagagagtccggttaaagccttgccgaacttgatcttagaagccctaacttcgagcctctgtgtcctgcctccaggtgcagacatggccttggatggtttcagaggtaacgggttgaagaaggtcgatgagcgggtctggttaagtggtgtgaccaatgacattgtggaggtacaagccatgatccttcgagtccttcggtctctggttctttaggaatgtt

SEQ ID NO: 6300 - DNA, 675 bp, Glycine max
cgagctgctacatcaccaaattcaaaactactcaaaactctgtacaaagctagctttgctgctttcctggaccatggccactcgcacaggggaaaaaggtaaatagaggagtaaaggtagtaaacaccttacaaaacgacgtatttacacaaatgcgcagttagcccagtgggccgatcgacctgatcactcctaccgattccccgtgatctcctccctcctccgcttgccgccggcgtccgtgcgcttaagcggccgcgtggcgtggtagagctccgccacccgccggtaccgcttcctggccctcctgtccagccacggcgcgccgtcatcgcagccgcccttcctccccgccgcctcggtgttgttcaccgactgcaccgaccgcgtggacgacgtcggggatgtcgcctccgctcccccgctcacgctgagctgcaccagctggtccgccgccgccaggtcggcctccgtgaagaacccgtcggccaggcctggcatcatggacacgggcctctccaccttcatgctccctccctctctagatctcgaggctggtgctggtgaagacgaagagagaagcagattgcttgtagaaatggttggatcgatttaaaaagttttcgagtaggaggttctcgtaaatgtctcgggcgattcctgcagcccggggat

SEQ ID NO: 6301 - DNA, 1126 bp, Glycine max
ttttttttttttttttcgtttgaaccgttgttgttcaccaaggtctttgaacaatcgttgtattgtaatgacaacggcataagcctaatactactacattgctttaaattccaggtaaaaatgaaattacacaaaattatttataatactagaagatctaaagtttacatacaatgcttccgcacaattgtgtcaagcctaaaatttattattaccataagacgggcgcagcaacgcgtgcctttcatgatctagtagtagtagcaagcaagcacactcctgagtgtcttcctcttcatcttccatgctgcagtagttccctggtctcttggtcatccttggtcacatcttcactcaatcccaagccgcttctttgtgtgttcaagtagaaattgtgggtccagtttcgtttgcgtgtacgcatcgatcttgttcacttcctcgatgaatttctgaatattaggtctgtccttggtgatatcatagtttttgataccagaaaagaatatctgaaacctttcgataaatggcacatatgcaatgtccaccaaactgaactggccaaggaagaaagggccatcactgaactttcccagggccgcttctattttatccagcgcagcaacagtttcctctgccacatctcccttggaggttatggatgagtatagtgctttattgaactcatcgatgtacacaagcagctcctcggcaaactgcttctttgcagaatcatcggggagcaatgctgggccatcgaaattgctgtcaatgtacttgaccaaatccaagctttctcctttcacctcgttgttatgctccagtgaaggcaccttgttctgtgggtaaaccttctccttgtaccaagccggcctgtctgcgagatcgatcccgactatcttgatcttgtcttgcaaacccttgtagttcctggcaatccaagcgcgctgcgcatatgggcagtgatatgcaacatacaacctggtggtgccgtcgaagagtggagggggctcggaggtggaggtcagcgaagggggcagattttctttcggggagatgactggtgcggcagccatggcgacggttcggggggaactcgaactcctggcggcgatgaggcggcgat

SEQ ID NO: 6302 - DNA, 878 bp, Glycine max
ttttttttttttttttgtcgattataaaaccaaattatagataagtttcagggcatctgctattaagagattgaagaaacctcttctgcagataccataaggtttgtttacattatactaccactctccatttatttcctctgaaccagtaatctctaaaccgatatagttaaaatataatgtgtttggaggggattattagaaaacatcggtcaggtaaatgagactaccggaggagagaatgaaagggtggtttctttagattacttccacttcttgaatttgcctcctcctcctccaaacataccatgtttcccatgctttccatgcttgaacttgcctccatgcttgcctccatgctttccgtgcttgaatttgccatgaccatgaccaccatacccatgagaggcatggccaacgtggccaaatcctccgtggccaaatcctccgtggcctgcatgaccgtaagggttgtgtgatgcatgaccaacgtggtgagttccataggctgctgcggctgcaccagctgcaccagcgatcatacctccgagtccaccactagagtgtcctgagtggtgaggagcaggatagcctgcaggaggatagccaccgtgacccggagcaggaggataacctccaggtccaggagggtaagcaccgggtgggtaaccagctggtggatagcccccagctggaggatacccttgttgtggagggtatccagcgggtgggtaatgatgtccacctcctgggaacccatgaaaccctttgtcttgctcgtcatgatgcttgtctttacctcctcctattttctttttaactcagattataataaccgaaaggaattgagaagattgtttcggaacgaattggaacag

SEQ ID NO: 6303 - DNA, 1278 bp, Glycine max
ccgggtcgaccaacgcgtcctcccacgcgtccgatgctgaaaggagttaaagagtaaaagcaccgtctccgtctccactctcggcttcttcttcgttgcgctttttcccaaaaccaattgcatcactctcgtccgttaccgccgctgccctagaccaccgcaagcgacgtcgcacaccgccttcatccgttagggcaaaaatgagtcgaggaagtggaggtggatacgatcgtcacatcactattttctcccctgaaggacgtctctttcaagtggagtatgctttcaaggctgtgaaggctgcaggaatcacctcgattggtgtccgaggaaaggattcaatttgtgtcgttactcagaagaaggttccggataagcttttggacaacacaagtgttacacacctctttccaatcaccaagtaccttggattattggctactggcatgacagctgatgctaggacactggtccaacaagcaagaaatgaagcagctgagtttcgctttacatatggatatgagatgcctgtagatgtattagctaaatggattgcagataaatcacaagtctatactcaacatgcttatatgagaccactcggagtagttgctatggttttgggtattgatgatgaatatggacctcagctatacaaatgtgatccagctggtcattactttggtcacaaggcaacaagtgctggattgaaggaccaagaggcaattaatttcttggaaaagaagatgaagaatgacccttcatttacatatgaggagacggttcagactgccatttctgccctgcaatcagttcttcaggaggattttaaggccactgagattgaggttggagtggtgcggaaggataatccagaattcagagttttaaccaccgacgaaattgatgagcacttgactgcaataagtgagcgtgactgagttcttgataaggatgtagttgttcaaactttctgatggtagagattatattatgtacttgtttctggaatcatcgaattgatttccttgtgatatttgagtggtgagttactcaagaatgatgttgaagatggtatttgatttcctattacaagtttacttgggaaaatatttcatgtttctaccaatacttttttttttattattaaaaaaattgtttacaaaacgaagtcgtgtgtatacccataatactgttaaaatttgttgggccttgcgtagggatttgagcttcggtgccggatgttctgtctttttaaaaaaatgatattttatgaga

SEQ ID NO: 6304 - DNA, 1155 bp, Glycine max
taggtcagctacgtagggacgctttaagaccaaaagcaccgtctccgtctccgtctccacctcctgtccttcgttgcacttcgctttttccaaaaccaatcacatcagcatcactctcgtcgccgccgtcgtcgaccaccgcaagagccatcgcactccgccgtcatccgttagggcaaaaatgagtcgaggaagtggaggtggatacgatcgtcacatcactattttctcccctgaaggacgtctcttccaagtcgagtatgctttcaaggctgttaaggccgcaggaatcacctcaattggtgtccgaggaaaggattcgatttgtgttgttactcagaagaaggttccggataagcttttggacaacacaagtgttacacacctctttcccatcaccaagtaccttggtttattggctactggcatgacagctgatgctaggacactggtccaacaagcaagaaatgaagcagctgagtttcgctttacatatggatatgaaatgcctgtagatgtattagctaaatggattgcagacaaatcacaagtctatactcaacatgcttatatgagaccacttggagtagttgccatggttttgggtattgatgatgaatatggacctcagctttacaaatgtgatccagctggtcattactttggtcacaaggcaacaagtgctggattgaaggaccaagaggcaattaatttcttggaaaagaagatgaagaatgacccttcatttacatatgaggagacagttcagactgccatttctgccctgcaatcagttcttcaggaggattttaaggccactgagattgaggttggagtggtgcggaaagaaaatccagaattcagagttttaaccaccgaggaaattgatgagcacttgactgcaataagtgagcgtgactgagttcttgataaggatgtaatggttcaaactttctaatgctagagattaaattatgtacttgtttctggaatcattgaattgatttccttgtgatatttgagtagtaagtttatttaagaatgatgttgaagacggtatttgatttcctattacaagtttacttgggagcaattttatgtttctaccaatgaaatgaaatgaaaattttaaaaaataaaaaaaaaaaaaaaaaa

SEQ ID NO: 6305 - DNA, 825 bp, Glycine max
ttttttttttttttttcacaaaaaaaagacatattttgaagaagatactgtgaacgacaaactgacccacaacaatctaacacagattcatcacctagaacaacacacttgatacaatcataccaccttttcctaagatggagcggatccggagcatccgcagtcaaagagtaccacagctaccgccgacccaaacaaaacaaaccacacatagtcacgtccacacgaccagcacatcgcgaggaagcagagaaaacatacaaaaatgaagcaagcagctaagcttaggcacgcttgcacttgaggttcctcatgcaggagagatgcatctcggcgaccttcacgaccttggcaatgccacggctcgggcagctccgcccgggcacgcaccggatctcggcctcccgctccacctggcagaagcacctggggttctccaccatggcgcagcacctctcgccgaacccgcgccgaaggcagttgatgaagtagctgccctgcgtcgcgcagctctcgggcgggaacgccgtggccggcgtcgccgcgagcgcggcgcacacggcgacaagagcgagcgcggcggcgagcttcacggacgccattgatgtttctgtggactgggatcgatctggatggagtcacaggccgagggaatgatggattttccgataagatgtcctagggaatgcctccggcgaatcctgcagccgggggatcccttattctaaacggccgccccggggggagtccagctttggttctttagggagggtatttgccgcctggggaaccgggcatgctgttcccggggaaatgtatccgccc

SEQ ID NO: 6306 - DNA, 530 bp, Glycine max
  misc_feature (19)..(19): n is a, c, g, or t
tatgtgggtgtgcgtgtgntgacctcaacgtactaagcgtagatccagcaacgatggcgtggcggacgatcgcaacagcgatggcagcaagtgctcgatcagcgaatcttagagcagtcgaccgaagagctgatggcgtaggggacgctaacgccgcactttgtggggatgccggcggccttgccagcgttgagcccagcagcagcgctcttgatgcacttgcacgccgcttgcttgtcagcggtgctccgggctgagctggctagactcctaacgccgctgcagcaggccgcagatgggctggcgccgttgccgcgtgcataggagatgcaggggctcaaggcagagctcacctgaccgcacgatacagccgcctctgtgactgcgaggagcatagcagccaccacggcgacgagcacgacctgagcaacagcagaacgggccatctcgatcaagctagcaatagtagtggtagtgagctcaggcagagatgatgagatagctagatttgctaagtggttgtaatggtt

SEQ ID NO: 6307 - DNA, 740 bp, Glycine max
ttttttttttttttttcgagactctattgacattttatttattggtgattacatgactcaaaggaacggccctgggagctcgatccttctcacatcccgccacgccattgtcgcgtccatccccacgacgcaggacgtgaagagcgagtccaagaccggaagctagactcggtactgcgagctacctattctcgccaccactacttgcacggcgtcacacaactcgtgagctcatgcacaccacgtacctgacagtacacgctaacaaactaacagactcgatacttgaacagagcttgttgatcatgagcaacaagctagggaccgaacgcagaacgcgatttattgtgacacagatgcgtgataagctaataataaaatggacacgtacgtgcagttcattcctcacaccgcgtgccgtagcaaaccccggcaggatataaacaaccgcagttaccgcagcaatccataggacgaaacatgcaaaaaccgcctgctgggaggcaagccagctttgactctgccaagaagacatccatgaggcgaggcatctgcaactttcttgccgccagcatgctgggcggcgtggccgaagccggctccacagctgccatcagcagcagcgccgccaggatcgccaccaccgccatcttagtggtcgccattgcctctcctctctgcctgtgcctgtgcctgtgtgtgttctttcctgggcgcttcttgcttttggctttttttga

SEQ ID NO: 6308 - DNA, 879 bp, Glycine max
aaatccaaacattcgagatttatcaattgccatataataaaagagggtttacaccaacagccagcaggttacttattctggctatgccatcgagcgctgtctagtgcccacaacagttcgctcacttggaattagcactagccgccttcagaacgccgtcattcttgacgctgaactccacgaacctgtccacgttaggcatggcgttcgccaccgccgggtgggcgcagaaccgatccgcccacgccgccagcttaggaaccttggccgcgtcgagcagcctgatttcagcgatcctctctaccgccctgacccatccgaggtgcgacccgagagcaatgtccaggtaaccgacgccgtcgccgccgaagtaatccttcccttggccgcactcgacgaaggccacctccaggtgctgcagagcggcgcacacctgagccgccgcttcttccttgtctccgtccagccttcccctcaggacccggatcgccgtaggaaacttgtcgtcgacgtactgggcccagaaccgctcggccgcgcgggcgtaggggtcggacgggatgagcgccggggcttgggaggcccaggcctcgtcgacgtactggacgatgatgagggactcggagacgggcctgccgtggtgcaggagcacggggatcttcttgtgcacggggttggaggcgagcagcagctcgctcttgttgcccgccgcctcctccacgagctcgtggtccacgcccttgagcccaagagctatcagcacccggatcacgaacgggctcggccacctgcccagcacgcgcaccgccgccgtctcctgcttccccgacgacatgttctgtcggttttttcagatcgtgtggtgtttctgcagtgagg

SEQ ID NO: 6309 - DNA, 1759 bp, Glycine max
  misc_feature (7)..(7): n is a, c, g, or t
  misc_feature (1740)..(1740): n is a, c, g, or t
tcgagtnagctacgtaggcccccccccgaaatactttaatgctcctggaagtgttctagaaagtacgactcctccaccgttcgctattttaaaattcgcttgtctcccccccccccctcaactctctaagctgaaatctgaagctaagtttcgttgccactgaggaatgaaatggccaatggtaacaacattagtcatttcttcaagctcttgcttttccttctaactttccactcttgtctcgctgagattttcttccaagagagattcgaagatggatggaagagccgttgggtgctatccgattggaaaaggagcgagggaaaagcgggtaccttcaagcacacagcagggaaatggtctggggatcctgatgacaaaggtcttcagacatataatgacgccaagcatttcgccatatctgcaaagataccggagcttagtaacaaggacagaaccctggtggtgcagtattctattaggtttgagcaggacattgaatgcggtggcggttacatcaagcttctttctggttatgtcaatcagaagaagtttggtggtgatactccttacagtttgatgtttggaccagacttatgtggttcacagacaaagaagctccatcttatactatcataccaggggcagaattacccgattagaaaagatctgcaatgtgaaacggataagttgactcatttctatacatttattctaaggcctgatgcctcttatagtatccttgttgataatcgggaaagagattctggaagcatgtacatggattgggacatccttcctccaaggaaaatcaaggatgtcaaagcaaaaaagccgtcagactgggatgatagagagtacattgaagaccctaatgatgtcaaaccagagggatatgattcaattccagctgaaattcctgatccaaaagccaagaagcctgttgactgggatgacgaagatgatggactatggaagcccccaaagattcctaatccagcgtacaaaggaccatggaaatgcaagaaaatcaagaaccccaactacaaaggaaagtggaagattccatggattgataacccagaattcgaggatgatcctgatctgtatgttctcaagccaataaagtatgtgggcattgaagtgtggcaggtgaaggcaggttcagtttacgacaatatcttaatttgtgatgacccacagtatgcaaagcaagttgtggatgaatatatggctagcaacagagaggctgaaaaagaagcttttgaagaagcagaaaaagaaagaagggctcaggaagacgaggaggcacgaagagcaagagaagagggtgaaagaaggaggaaggagagggatcataaatatggaaaaaggaggcatcgtcgaaggccggatccccatgatatggaggattaccatgatgaactttgaagcgtgcattaagagtaggtggcaggtaattgcagcaataaaatgcatctttgaagttgtgaattgtaggaccaaagctgctattggactgaccatgccgagctgtactgaactgtaacatctgaaatattagcgtcagtcattatgttcaacttcatttctcttcgattattatgtgacagctggtctgctactgctactgtattcaaggatggaattaaaactttctctatctgtaaccgaaaagggggaaaagaaacaaatttttcttggtacaaaaaaaaaaaaaaaaaaaaaaaaaaaaaaaangaaaaaaaaaaaaaaaaaa

SEQ ID NO: 6310 - DNA, 497 bp, Glycine max
gctccttgccctccttctccgcggtcctcttggggagcagcaccgggttgatcttggggatcacaccgccgtgcgcgatggtgacgccggccagcagctttccgagctcctcgtcgttccggacggcgagcagcaggtgccgcgggatgatgcggctcttcttgttgtccttggcggcgttcccggcgagctccagcagctcggcggcgaggtactctaggacggcggcgaggtagacgggggcgccggtgcccacgcgcggggcgtagcggcccttcttgaggtagcgcccgatgcggccgacggggaactgcagcccggccttgacggaccgcgtcaccgacttcttcctggggccgccggccttgcgcccggccgcgcccttcttgcccttggctgcagcgcctgagacatccattgctaacgacggggcttttgaagaaaagctggagaggggcagagagatttggtgatggtggattgcggggtgagttggt

SEQ ID NO: 6311 - DNA, 457 bp, Glycine max
cggcggcgggggacttcttggggagcagcacggagttgatgttggggatcacgccgccgtgggcgatggtgacgccggcgagcagcctgccgagctcctggtcgttgcggacggcgagcagcaggtggcgcgggatgatgcgggtcttcttgttgtccttggccgcgttgccggcgagctccaagacctcggcggcgaggtactcgaggacggcggcgaggtagacgggggcgccggagccgacgcgctgcgcgtagcggcccttcttgaggtagcgcccgatgcggccgacggggaactggagcccggccttgacggacctggtcaccgccttcttcctgtcgccgcccttccttccggccatcttgcttgctacttctccggcgagctggaaactactcgagatgcgtgggcggcggtgcgggatcggaatgcgctctgctctgtgtttgtgggt

SEQ ID NO: 6312 - DNA, 432 bp, Glycine max
agcagcacggagttgatgttggggatcacgccgccgtgggcgatggtcacgccggcgagcagcctgccgagctcctggtcgttgcggacggcgaggagaaggtggcgcgggatgatgcgggtcttcttgttgtccttggccgcgttgccggcgagctccaggacctcggcggcgaggtactcgaggacggcggcgaggtagacgggggcgccggagccgacgcgctgggcgtagcggcccttcttgaggtagcgcccgatgcggccgacggggaactggagcccggccttcacggagcgggtcaccgccttcttcctgtcgccgcccttccttccggccatcttgcttgcttgctgcttctccggcgacgagggctctcgaggtgtggtgttggcggcggttgcgctagatcgggatgctctgagtttgtgt

SEQ ID NO: 6313 - DNA, 488 bp, Glycine max
ttcctcctgcgcggccgacttgcctccttctcggcggcggcgggggacttcttggggagcagcacggagttgatgttggggatcacgccgccgtgggcgatggtgacgccggcgagcagcctgccgagctcctggtcgttgcggacggcgagcagcaggtggcgcgggatgatgcgggtcttcttgttgtccttggccgcgttgcctgcgagctccaggacctcggcggcgaggtactcgaggacggcggcgaggtagacgggggcgccggagccgacgcgctgcgcgtagcggcccttcttgaggtagcgcccgatgcggccgacggggaactggagcccggccttgacggaccgggtcaccgccttcttcctgtcgccacccttccttccggccatcttgcttgctgcttctccggcggcgaggactcgcgaggagtggtgttggcggcggttgcgctggatcgggatgctctgagtttgtgtgtt

SEQ ID NO: 6314 - DNA, 498 bp, Glycine max
tggcggcctcttcttgggcgacttagccccctccccgccgccgggggggacttcttggggagcagcacggagttgatgttggggatgacgccgccgtgggcgatggtgacgccggcgagcagcctgccgagctcctggtcgttgcggacggccagcagcaggtggcgcgggatgatgcgcgtcttcttgttgtccttggccgcgttgccggcaagctccaggacctcggcggcgaggtactcgaggacggcggcgaggtagacgggggcgccggagccgacgcgctgggcgtagcggcccttcttgaggtagcgcccgatgcggccgacggggaactgcagcccggccttcacggagcgggtcaccgccttcttcctctcgccgcccttccttccggccatcttcttcttgctgcttctccggcgacgaggtgtccctctcgaggtgtggagctggcggcggtggtgctggattggaggaatgctctgggtttggtgg

SEQ ID NO: 6315 - DNA, 697 bp, Glycine max
ttttttttttttttttggaaaaatcagagagatttctgagttgtttttccttggcagcagagatgtacatcgacgccattagtaaagaaaacatcgatcactgttacagcaaagcttaagctaatcgacgcgcgcctctctctaagccttcttgtcggccttcttgggggacttggcggtcttcttgggcgacttgccctccttgggctccttctccgccatcctcttgggcagcagcacggggttgatgttgggcagcacgccgccgtgcgcgatggtgacgccggccagcagcctcccgagctcctggtcgttcctcacggccagcagcaggtgcctgggcacgatgcgggacttcttgttgtccttggcggcgttcccggcgagctccagcagttcggcggcgaggtactcaaggacggcggcgaggtagacgggggcgcccgtgccgacgcgcttcgcgtaacggccgttcttgaggtagcgcccgatgcggccgacggggaactggagcccggccttgacggaccgcgtcaccgacttcttcctggggccgccggccttgcgcccggccgcgcccttcttcgccttcgctccggctccggtggctgaggcgtccatgtctggtggctggtgctcgtcgggacgcgggagaggaggggaggggatttgcttggtgatttgggatttgtgttct

SEQ ID NO: 6316 - DNA, 1000 bp, Glycine max
  misc_feature (653)..(653): n is a, c, g, or t
ttcgcacaagatcattaccgacagcatacccagtcgaagagagtccctcgaggttttagatctcgccgtctcgccgtctcccctctccgagaaccctagtttccctcttcgtgcggcggcggcaaccatggacaagagcatgctcggcgacctcgacaacctccccgacgaggacaagatgcgcatgtccgccatgatcgaacagctccagatgcgtgacagtctacggatgtacaatgcgctggtggagacatgcttcaaggactgtgttgacacattccggaggaagactctggacaagcaagaggagtcatgtgtccgccgctgcgctgagaagttcctgaagcactccatgagggtcggcatgcgatttgctgagcttaaccaaggcgttgccacacccgactaatcaaatgatgtgttcctgccccttccaagtttctaacattgcccatctggtcaggatcagtttgtaatccttgaaagttttcagtacttaatgaacccactgctgcttatcatgttaaataaaattacttgaactattgtatcgagcccttcctcccgttaagcgccacattgtgctacttaatagatcgaaatatatccttcctttgataaaaaaaaaaaaaaaaaaagcttaatcgataccngtccgaaccctcgaggggggggggccccgggtacccccaatttccgcccctaataaggggaagtccgtaataaaacgcgcgcttcacttgggccgttcctttttaacaaccgtccgggaactggaaaaaaaccctggggggttaacccaaatataaattcgccctttggaaaaaaaattcccccctttttcccccaggttgggggaaaaaaaaaaaaaaaaagcgcccccccacaatttccctctttcccccacaaaatttgcccccccccctgtgggggggggaagagaaaattttgccccccccataaatttttttttttaaaaaacaccgccgcgctaaatttt

SEQ ID NO: 6317 - DNA, 487 bp, Glycine max
atgggaagacacactatcaactgaaacaccaagaatttcagtgtttatcttctcgaactcctcatgtctgtcgctgaaagccgtaatctcagttgggcagacgaaggtgaagtccagagggtagaagaaaagaatcacatacttcttcccaatgtaatcagatagcttgacgttgatgaactcctggtcgaacacggcctctgccgcgaagtccggcgccttgttccccaccagcggcaggtcgtactcggctgcggcgcgggcgacgaagctgcgggccctggccgtcctcgagccggcggcggcgaggcgggagggcctggcggcggcgcggggaaacgacaggcactgcggcgccccggctggcttcggggacgcgacgagcgcggcggccgtggacacggtggaggcggagaaggcgcacgccatggccgcggctgtcaggcggggagtgccggggaggggattaggtagcctccagatagat

SEQ ID NO: 6318 - DNA, 1137 bp, Glycine max
tcgataacctttttttttttttttttcgccagcaagttaaattgttgtcatagatatcgccagattatgatatatcgaggtctcctttaagtcgaaaatacgacagtacgtactcgataacgcattcaacagctcctaaggctaagttccagctaagtcaaacacaaaacgaaacagtctcgaaacggtcacatgacttcacccttcagacacccatagcatctgcagacaacgattcatcaggacccaccaaagccaaccaaggcctcagttctcctcgtcgtcgtcctcctcagcatcctccccatcagatccctcttcatcctcgtcatctccttcaaactcttcaacctcattgttgaaatatttcaatgggttcggccacaaatcttctttgatgatctctgccacctcatcttgcaccccatcagcaaggctcttgtgctctgtatcagtgaaccaggtgaagaaactttcttcaaccaatgggcgcttgcttcctttcttcttaatggcattcccattaatttccattccctccttccacttaatggaagtggcatttattgtggttgttccatcatcagcaaaggcatatgacttggtaagctttctgtcttcaaagtacggattctcagagaagttaagagtgatggagtagcctgacttgacatctttagaatcatcaacatcaacagattccaagtacttgaacatcttttgatcctcttcagtcaaaagctcactgagaagaggatgacttagaaacgctgtcagccaaaagtctggaattgttttgatgatgtcacacctccgaagatagacaggtctgcgaatctcactgtacttctgctcaacctccaaaaccttatcacttgcttcttcattaaccttctcgagctcgtcctggatctcctggagcctctcgatggagaggacgagggcaccgtcgatctgctcgttctcctcgccgacgtcggtgtcggtcttggccttcttccccttgtccgccggcgccgtcatagtcgcctgtctctagggttttagcctccgacctgcgccgcgagagcgagagggagtgtgcgcgcgtttgttagaagcgggtagagcagaagggaggcggagctgggggggggt

SEQ ID NO: 6319 - DNA, 664 bp, Glycine max
atgtctgggcgccccgggctggagtatattggcccgtcgctgcgccagtgctggacgcttttcttcagacagagttggcaagcaagcgcagacagacagagcttgagagagcgcgcgcgagatggcagcctccatgatcacctcgccgattgtggcgccgacgagcctgccgtccctctcccgccggggctcctccttcgccgtcgtctgcagcggtggcaagaagatcaaggtcgacaagcccctcggactcggaggcggcttgacagtcgacatcgacgccaacggcaggaaggtcggcaagaagggcgtgtaccagtttgttgacaagtacggcgccaacgtcgacggctacagcccaatctacacgccggaggaatggtctgaatctggtgaccgctacgccggcggaacgaccgggcttcttatctgggccgtcaccctcgccggcctcctcggcggcggcgtcctcctcgtctacaacaccagcgctctcgccggctaagagagcatctacgtgtaacacagggccgggtctctgcttgcatgcacgtctctgtaatctacgtagctacctcctgtgaatgtatgtcatcaacgatgcaaagtaattgattcgaacagatggtttatgtatgtacgtaacgcaaaaaaaaaaaaaaaa

SEQ ID NO: 6320 - DNA, 1003 bp, Glycine max
aaaaacacatgtataactaagcgccacaaaatctcacgaaccagatcctcatcatgccacatcggcatatgcaatcttaagtctcgtagatttgcttatttcttcatcacatactgaagtcgttttgatttttgtttctcaaaaacaatggcagcaagtgcatctccaatggcgagccagctaaggagcagcttatcctccacttcaattgctaggcgtctagccgtccctaagggaatctccggcccttctttcggcgtatatccgaccaagagaatctcttccttcaccgtccgagctgttcagtccgacaagccaacatttcaagtggtccaaccaatcaacggcgatccattcatcggaagtttggagactcctgtaacgtcaagcccattgattgcgtggtatctttccaacctcccggcttaccgcaccgccgtcaaccctctcctccgtggtgtcgaagtgggcttggcacatggtttcctcttagtgggcccattcgtcaaagctggcccattaaggaacactgcttacgctggttctgccggctccttagccgccgctgggcttgtagtcatcctcagcatgtgcctcactatctacggaatctcttcgttcaaggaaggagagccttcgattgctccgagtttgacgttgactgggcggaagaagcagcccgatcagcttcagacagctgagggatgggcaaaattcacgggagggttcttcttcggagggatctctggtgtgacttgggcttactttctcctctacgttcttgaccttccttattacgtcaaatgaatgtagttcaaaatatgagcttcaccagtatgttatctacagagactctcttgcaccattgtttcttttttacttttgtctgagcaagaatcttgaatctcagggtcgtctttgtataatactatggatctcctcttaaatatttcttggtctttattcacataaaaaaaaaaaaaaaaaagcttatcgataccgt

SEQ ID NO: 6321 - DNA, 626 bp, Glycine max
ctcggtttcctgtccttggttcagatcgtcttttcagatcaggaaaaaaaaggagagatgaaggaggcgacggcgtcggggggcggcgcgacggcgacggcgaacgacccgaggcagccggcgacggcgaggccgtacgcgccgcccaagctgtcgtcgcaggacctgcccgtcgactacgcgggcttcctcgccgtcgtcttcggcgtcgtcggcgtcatgctccactacaaggtgtgctcgtggatcgccatcatcttctgcgcgcagtcgctggcgaacatgaagaacttcgagaatgacctcaagcagctctccatggctttcatgtttgctgtcatgggtttggtgacgaactatttcgggcctcgcccaggcggcacaaaacgctaatctgcacaccatgcgccatatgaagtttcctgttaaatttttggtgcctcgaagctactggcatggtggcgcccacccacacttccgaatcattgagtcgggcacgcgtcaaatgtaccacctcatttgtagggaccaagacatgtatcatgatgctcagtaatctatttgcacggtacttgttcttccagttttattataaagatagttgaagggtctttgcctacatcacc

SEQ ID NO: 6322 - DNA, 971 bp, Glycine max
gcatttttttttttttttttagacaaaatcacatgctatcgaatccgaagggaacaacacaatacgatacaatgacataccgtccgaaaaaagagataaaccatttatttagtataccattatcagaactacttaaaaggacaatgcctctcatttttaaatagtagataactcgcaattaagcaaacacgaaaaaaactaacaccaaatcataactgtccattaggacaagcacatcataacatcaagaacgtactacgtggggctagccacgtgattcatctagctggttgatcatgtaaagcgcgttgcttgtaaccctcgccactttcgtcatccaatgcttcacctccgttttaaccttaccctcgacccctttaaacccatcgagacacgtgtcgtcatccgtcaacgccgcactagcccacgtctgcgcgttgctcatctgccacctgaactcgttcgccgaaacgcccgaaacgtgtagatgctttaaaacgcctagcgtgcggctcagctcgtccaccgagtctccaatcatctccacgcagtccacaaccgccgctttcacccgtttctttcccacggtttctctcacagccgcgagtttcttagcggctgctcgagcgtgggagaggcttatcttgacggcggcttgagctagctcgcgacggtttgtgatggttggaccagagtaggtagagagtgtacggacgcatagcgatggatagctcgcgtgcacgcatgaggaatgcacaatatcttccgcagcactattaggtgcatatccggtggtggcggctacaatgacggcagcgacaatggcggcgagaaagagcttctgtggaggagccattgtttgaactttgaactggagtgtgtgtgagagagagtgactaagttagggctatctctgtaaatgaaaaagagagcggtgactggttttttcgattaggatgtcctaggtaatg

SEQ ID NO: 6323 - DNA, 537 bp, Glycine max
  misc_feature (8)..(8): n is a, c, g, or t
  misc_feature (10)..(10): n is a, c, g, or t
agatactncncatcaaatgtgaccaccacacgatcttttccatcagccccttgaatcttgtcaactgaacagtagaagtctatagccgacatgattccatcaccaaaatcctcattgatgatctccttgatgctctctccaaaatgcataacagcttcattcaatctgtatatggcgggctcgtggacgatgtccgggtggtaggaccggaaaggcggccgcatcatgagctccacgagctcgtcggtgagcgccgggacggccgcccggaacgcgggcgccatgtcgggcttgagctgcgcctggcggcgcagcagctgcgcgacgtagacgttggtgagccccgtctcggccgcgatgtccgagaagcttttcccggactcctccttcgccgccaacagccgagggactacggccgccgcgctcgcgccgctctcctccatgatttgtccgtccgccgtctgcctgctttgcccgcgaggtgctcgacgaaatcgttggggtgggagggtgaggcacgggacgaatctctgattg

SEQ ID NO: 6324 - DNA, 498 bp, Glycine max
  misc_feature (10)..(10): n is a, c, g, or t
cagctgcatngtgcggctgatggtgctgccgctggtgcggccgctggctcggcttctggttttgctgccagtttagatggagcacctccaccaggaaacacctttctcaagacttttgacatgatttttggcggctccttgcccgttactcgcttgatgacccaaaggatgagggagacagccattgcaccggagctaccggcggctgctaaacccgtggccagtaagccagtggcaacacccgctggtacgagaatcggactgaatactacgaatagtggcatgctagcgataaatgcgacggctgtgccagcgagggaaacaccggcgagcaataagaggaatattgcggcttgtgtagctaatattgaggttaaaacactcttaaacgacggccttctggattttttattgtgtttctttctgagtacccccatttttcactagtttgaatggtcaaaagagatgggtatgattctttggtccgatcgttgtgag

SEQ ID NO: 6325 - DNA, 1255 bp, Glycine max
ccacgcgtccgcgaaggcgttgatgactccctcaccgtatgctgagaagttcttgagcttgaaaacccgggttaggaaccgcgagtggagccagatttatacagaggctgactcgattttgcgcgagcttgtgatcactcgcgaggatttggttgagaaggcaaaagggtttgccttcaaaggaatggatgtgtctcagcggattttcgccagtagtagaactgtgcttggaagcagtactaagtttatgttctccatcgcgaattccataatctctggagccgcggaggttttcaattttgtgtcccagtcgatggtgtttatttgggttttgtattacctcatcacatcagagagtggtggagtgacagaacaagtgatgtgcatgcttccaatttcgaactccactagggacagatgtgttgaggttttggataaagctatttcaggagtccttttggccactgctgagattgcattttttcaagggtgtcttacttggcttttgtttaggttgaacaaaatacatttcttgtacatgtcaactgtgcttgcattcataagtcctctcctgccaatatttccatcttggcttgcaacaatcccagcagccttgcaactagtgctggaaggcagatacataatggccattgtgttgtctattattcacctttttctcatggactatggtgcatcggagattctagaagacgtgccggggaatagtgcatatcttactgggttgagcatcattgggggaatgacattgttcccatctgctctggagggagcaattatggggccattaattaccacagttatgattgcactgaaggatttgtatgctgaatttgttttgcaagaacctaaggacaagtccaagcagaaagccagctagctaagcttctactacctgtgtctataaaaactacttatttgcagttgaagtttggtgtaactgcatgctctttgccattgttgatggagtttgcctttagatttttgagttgcccatatagttatacaatttcattttagggtcttgttgactagtgttcctagactattggttaaggaactaaaaggagaagtttttaatatgtaaatcataggaaagtataaaaaaaaatcatgaagaacgcaattttatgccttccaataaaaaaccttagttccttgagaaaaaagaaaaatggagaaagaaaatactattatagagttaatattgtagaggttttacaagtataatttttgg

SEQ ID NO: 6326 - DNA, 654 bp, Glycine max
agtgctggaaggcagatacataatggccattgtgttgtctattattcacctttttctcatggactatggtgcatcggagattctagaagacgtgccggggaatagtgcatatcttactgggttgagcatcattgggggaatgacattgttcccatctgctctggagggagcaattatggggccattaataactacagttatgattgcactgaaggatttgtatgctgaatttgttttgcaagaacctaaggacaagtccaagcagaaagccagctagctaagcttctactacctgtgtctataaaaactatttatttgcagttgaagtttggtgtaaccgcatgctctttgccattgttgaagtttgcctttagatttttgagttgcgcatatagttatacaatttcatttttatctgtatcattagattattataattgaaaaaaataggacccactttttacgtcattttattcattttattaggtgtcatcaaatattttctctcggtggcagtcaaaattgtacacagtttgtatttgtattttattcctgtaacaatttttcttattctttgtaccaaaagagaggagactcatgcaagcttttcagaaatatgatgtcaccttcattattggtggatttagtcaaaaa

SEQ ID NO: 6327 - DNA, 913 bp, Glycine max
ttttttttttttttttgcaactaagatcatttggtttattctaaatacaacacagaaccaatatctcattacaatgaagacaaatttgagaacatcatatcaaaacaaatctgccactttgggatggctgttgaggggacgggtacagccaaaggttcacccagaagggttgtggcattgttgacagctgtagcacagaacatattcaagctatctggaaaaaaataggaacgaaacggggcagcagaaacgagttagacgccttgccgtttccagaggagctcctcaagccattgcagctttcttttctgcctctatctgctttagctctgccaacctttccacccatgcccggtctcttgccactgcagccatctttctttctgtccgttctgcctccttcctcttcacagcaacagaatactgtgctttgcgcttcctcttctcagccatgatgaagtccttgcgctgcttgatccgcttcttctccttcctcccctgcacgctgcccttgttcggctggctcgaagggataggctcccccggcgtgcacttcacccagtagtgcggacctttgggtcgcaggctggccctcttgcgccgggacacgaaccccgggcgccgcttggggaacctggtctccgtgagccctctgaagaggctggcccccatttccggcgcccgcgcgacggcggtggcggtggcggccgcggcggagaacggccggaacccgatcggatccaggagccggagaggacggggagggagcgcaggaggacctggtgcgcgccgggaaagaggcgccgccggagagtagagcggcgggagggctcgccggagagctcggaggaacgccatcgtggagaaggttctagaaggttgctgcgtggcgtcgggctagggttttagcgga

SEQ ID NO: 6328 - DNA, 1017 bp, Glycine max
  misc_feature (15)..(15): n is a, c, g, or t
  misc_feature (17)..(17): n is a, c, g, or t
  misc_feature (34)..(34): n is a, c, g, or t
  misc_feature (39)..(39): n is a, c, g, or t
ggttgtcggctaccntnacttagatgatgaatcncccgnccgtaaatcaaagactgattttactccacatgatagatgtttcgccattacaaaccgctcagcagttcaactatttaaaggtagcagacattcaagaccagggcatcactcaaaaacaaaaccagtagcatttctgtaagaggggtaactaaatgggacgacataatgttttccagatcgaccaatcccagtaccaagaatccagcaggtgggagaacaaagattctagatcttgttgaaggcaacgatgtcacacgactggacatattcgttgatgggcgcctcgcaaagcacttcctcaataagagtgtcgacggacacaaggtcatcgatgatcgtcagcatgatctggagcttcttgatgccataacccacaggcataagcttagatgcaccccaggtgagaccctccatttgaacactgcggacagcctcctccaacttcttcatgtcagtctcatcgtcccatggcttgatgtccatgaggacggaggatttgccactttctttcttctttgcaggcttggcagcctcacgctcagctgcagctttcttgtcctcctcggtctcatcgccaaacagatccatgtcatcatcgtcatcttcatccttggaagcggcaggagcagctgcagcaggagccgatgatgcactcaccccagaggactggccagggaaccttgaagcaacagccgcggcgacggtgtcgtaccagcgggcagcgttcgggaactcggcgctgggcttcacgggcaccgccgcgaacaccttgacgtcgtccttggtgatcccatcgccggagatgtaggtcttgccggcgaggtgcgcctcgagggccttgagcccgtcggcggtgtggaggtcggagaacgtgacggccatcggatccggcgagctcgggggcttgtcgaattcgctgggcggcggcggcggcggcgcaggaggctaaagtcccaaaaccctagagaccgagagggt

SEQ ID NO: 6329 - DNA, 1452 bp, Glycine max
caaacttcaaacctgacgttcgacattaaatctagttttcactcaaatcacttttaaaacagcgattatcgagctcaccgaagtcggcctcccccccagactaccattgctacgccccaaaagcacttttcctccctctgacttttgctacaactactaccagtacaagcaatagttggaatggctcgattttcattggatgagatatcagacactggtgcctttgtgagatctgcttcaacattcagaaattggatttcgagggacccgaattcgctgtttccaccggaatcagggaggtatcatctctatgtatcatatgcttgtccttgggcttccaggtgccttgcttacttgaatatcaaaggacttgacaaagccatcagtttctcggctgtcaaacccatctttgagagaactagagaatcagatgaatataagggatggatttttcctgaatcggaaaccgaggtgcctggagctgaacctgataggttcaatggagcaaagactattagggaactttatgaaattgcaagtgaaaactatgccggaaagtacactgttccggttctgtgggataagaaactcaagacaattgttaacaacgagagctcagagataatccgcatgtttaatactgaattcaataatattgcagaaaaccccaccttggacttgtatcccactgatttaaaagcccaaattgatgataccaacgagtggatatacgatagtataaataatggtgtttataaatgtgggtttgcaaagaagcaagaaccatacaatgaggctgcaagacaattgtacggggctttggacaaatgtgaggatatactaagcaagcaacgctatatatgtggcaatacactaactgaagcagacattcgtttgtttgtcactcttattagatttgatgaggtttatgctgttcacttcaagtgcaacaagaagctgctacgcgaatacccgaatcttttcaattacacgaaagacattttccaaattcctggcattagtagcacagtgaacatggaacatataaagttgcattactatggaagtcatccttctatcaatccatttgggatcgttcctgtagggccaaatattgattattctgctcctcatgacagagaaaggttttctgcataggtggtttatagcatgtttgtataattgtaagagatttatgaggaattttctgtatcttctaagtgaactgttttgttgaataactgcagaaacaatagtgctttgttgaaaaacatattttcaaaataaactggcataggtgtgtgcttgtgtctactatctatacttttaatgttggaattttttttctgtgatttagcttcattgattcctttgttaaaactggttgaattatttgcagctagacatatcctacattacatacaatatactatttcctttgttcctatttat

SEQ ID NO: 6330 - DNA, 624 bp, Glycine max
agtttttttttttttttttgttggatctctagaaagagatatatttaggaatgaggggagtatcactgttcgacaagttgtgctgctcgcagccaataactacatgcagtacggtacgaagtctgatacacagtgctgaaacgaagataagtatcagagcttgatattgctagggaagtatcgcaggttcagagagcaacggccacacagtgcctgatcgaagataaagtttactacagctttgatatggatggggaaatagttcagctcttctgagtgttgcctccctccagctctttcctcagctgcagtgagaaatcgtcgttcacgtcgtcgtcatcccagtcatcctcccattgctggacagcttcgttgccatcttccttgtcatcccattcttggtcgatctcgaactcctcgaactcgtcgtcgtcctcgaggaggtccatcttggcggcctccgccttcgcgtccgccggcgctgccgccgccatcgatgctggtgctagtatctagctgattcgcgtggagaagaagaaagggggaaccctagacctgggcgcggctgctcgtcgggagagatgccaggccagcctgatagggtcgaaagttaaaacagaggct

SEQ ID NO: 6331 - DNA, 1608 bp, Glycine max
ggaaatttttctcagctacgtaggccccccccccggattaggggagagcgaagctcagcaagtttcaaatccacacgcataacagatttcaaccactgaagaaatggcgctgccccattccatcattctgcccttctcgtccatcatttcaccatgttgtcttcccaaacataaacctaccaatttcacccttccctttaagctgaatggtgatagctgtagatcaataagaatcccaagcagagttcaagcactcaaatctgatggtggtaaatggaagaagagagggcaagaagcatctagtgacactgatgacgacgatgacgatgacgatgcacctcagcggtttaataaaaatgacccttaccttatgagtcctgaggagagactggaatggaggaggaacataagacaggtgttggataggaaacctgatgttgaagaggagttagaccctctggaaaagaagaaaaaactggagaagcttttggaggattaccctcttgttgtggacgaggatgatcctgattggccagaagatgctgatggttggggattcagcttgggccagtttttcgacaagattaccattaagaacaagaaaaaggatgatgatgatgatgacgacaacgatgatgttgatcgtccagaaatcatgtggcaagatgataattacattcgtcccatcaaagacataaagactgccgaatgggaggagactgtattcaaagacataagtcccttgattattctcgtgcacaatcgatataaaaggccaaaggagaatgaaaaaattcgggatgaactagagaaggctgtgcatatcatatggaactgcaggttgccctcaccaagatgtgttgcgattgatgctgttgttgagactgaactggttgctgcacttcaagtatcaatattcccagaaattatctttactaaagcaggcaagattttgttccgtgataaagccattcgcagtgcagaagagtggtcaaaagtcatggcttacttttactatggtgcagcaaaaccatcctgtttgaatagtttgacatattctcaagaaaatattccttctattgtcactgacaatccagtgtcctgaaaaattcagggtccaaattttgaatccatccatgctgctgaaatatttccatataaagatgcctctcgcattctgcctttgtataataaaatgcaaggagaatgtatagctctattgactgcatataatgtgataaaataacttgcataaaagatgcaacataattgctagagttggcttgtttgatttgtgtccatggaagccatcagaggaaatgggcatcagacttggcttttgggatgaaagaaaaattgaacgtggaagatgaaacttggtgaccagattgctaatttgctactagaagtcaaaactcgacttgatgtatcattgaggcaatgtgtatatttagaacttagaaggtacaatgagtcacctttttctagaaatgaaaggttatttgtaatagacattagaacgtggtatgcgaatgaagtaaagtagtattggcaatggaatacattactatggaaaaaaaaaaaaaaaataaaaaaaaaaaaaaaaaa

SEQ ID NO: 6332 - DNA, 749 bp, Glycine max
aactcattatcatcatttgttcattccgcttctaccgagttgtcaccacccaccggactcagtgaatcaccataatgggaaactgcagctcctccgattcgactcaggttgccacggcgaagcttgtgctgcaagacgggaggctgcaggagttctcgtacccggttaaggtttcgttcctcttgcagaagtatcccgcgtgcttcatatgcaactccgacgaaatggaattcggcgacgtcgtttccgccatcgacgaggaccaagttctgcaacccggtcagctctatttcgcgcttccgttgagccgcttgaggcaccccttgcagccgcacgagatggccgcattggccgtcaaggccagctccgcgctcatgaaaactgccgacaaatgcggctctcgccggaaacagattttgttctctaacgaatatgactctaaccctaagcgcgtgtctcccgcactcgctgctggcggtggaagaggaaggaccaccgctggtgccggtggtaaggggggatttgcagcgttgttgagctccattccggagtaggggcagtttccgaagaaaattatacgccggtgattttgttcgtttgtatataaatagttttttttctattaaaaagtaatattataaaattttggacattgtagagcttgttttaggaaacaatggaagcgattagattctaatcttggagagttgaaccaaatggatattcatattcatattctatcttggagg

SEQ ID NO: 6333 - DNA, 922 bp, Glycine max
  misc_feature (922)..(922): n is a, c, g, or t
ccccctcggcggcttgggccggttcgatcagcttttttttttttttttttggtttttttttttttttttttttttttttttttttttaaaaaaatgaaacaagctggctcattataagcacaccattcagaacatcaaccacctttgtagcttacattagacaactaaacgacattctagaatacttagttttatatgccggcacatccatatcatgttcagcacaaaagggtagcctactgaacgacaagtgtccgcgcactaagagacatgaagcagaagtccagaccacaaacaatgatcagtaagcatctatgacatatcttcatgatagagatgaagtccaagaccaaggcgggcacaagctcggcgaaaagccattccttcagccttctggacaggatctccaaagcctttttcctcaacagaagcagttccagtagcctctctatagatctctgcatcagttccatagagagtcacacgatagacaacagatacagatttcccatcagatgagtagacaatgttgcgaacctccccagaccattctggagcgtgcatattcagaattttgttagcaaggtgccatgggatgtacttgagggcgaatccattgtcctcgaggcgggtcttcaggagggactcggggaccctcttcccgagctccttgaggatgccggcgagcggcttgctgatgccctcggtggggatgggggcggcctccccgccgctggtgaagtcgtcgtcctcctccgacaggggctccggctccggcgcccgctgcggcgcgcgggccttcgcggcgaaggggcgcgccaggagcggggacgctgcgcggcggccgatgatgaggcgggctagggcaccgggagccatggtggggaggcggagggggagaggggtttggttgggttttttn

SEQ ID NO: 6334 - DNA, 629 bp, Glycine max
aaagaaaggtcgcagctgctcgcaaaggtgagttttttctggaacccacagatcttacgagccatcctcctcgaagaactccagtgctcatcttctactcgcccctggcctaatccatccaatctttcggttcagaaggcgaggagggtgcggtgcctggtccagatctcgtggccgccatggcggagcagttcgcggagtcagcgaacaatgtaatcatcgaagaggtgaacaagggcctgaaccctggaatgatagtcctgcttgtggttgcgaccaccctgctgcttttctttgttgggaactatgcgctgtacctgtatgcgcagaagacgctccctccgaagaagaagaagccagtctccaagaagaagctcaagagggaaaagctgaagcaaggggtttctgcaccaggggagtgaagagacccatcgatttctcatgtcgattgctttatgctgggctcctttttttacctgataaaaaatatataccagctggagctgcagtgttgagcgactgtttatgtagaagccttgtcttgagtggtacatcgtcggtattggacaccttatttaagcgactgataaaccttagcctaaattaagctgccaaaaaaaaaaaaaaaa

SEQ ID NO: 6335 - DNA, 1592 bp, Glycine max
  misc_feature (1381)..(1402): n is a, c, g, or t
  misc_feature (1496)..(1502): n is a, c, g, or t
tctatcgcgtccgtacggctcagctacgtaggcccccccccctaattcccaatttaataaagtagataaatatgcttgaaacggtggtgtgtgggttttagggtttttggcagcaaggatggcgtcgagaccagaggtagttgcgccgcctgagattttctacgacgatgccgaagctcgcaagtacacctcttcttcccgtattgttcaaattcaggcgacgctgtcagagagagctctcgaactacttgctttgcctgatgacagcgttcctaaattactccttgatatcggttgtggatcgggacttagcggtgagacactctccgagaatggacaccattggattgggcttgacatttcagcatcaatgcttaatgttgcggtggagcgagaggttgagggtgaccttttacttggtgacatgggtcagggtctaggaattcgtcctggagttattgatggggccatcagtatatctgcggttcagtggttatgcaatgctgataaatcctctcacaaccctcgattaagattgaaggccttttttacatctttatacaaatgcttatcaaatggagctagagcagtatttcaagtgtatcctgaaaatatagaccaacgtgaattgattttaaatgctgcaatgcatgctggatttgctggtggtatagtggtggattttccacacagttctaagaagaggaaggagtttcttgttctcacttgtggtcaacgctcggtaaatgtgtccatttccaaaggtaaaaatgaagatagggagagttgctctgatgaggacagtgaagatgaagaaaaacagacagtatgtatatcagacaggcatagaccgcggaagaaacagaagaataataagagtggcaagggaaaggaatggttactaaggaagaaagagcagatgagaagaagaggaaatgttgttcctccaaataccaagtacacgggtcggaaacggaaggatcgcttttgatcttgtctggcatttgcctcagggtcgtgagtatgaaaagctagtcctatttgttatttgttaattgccgttaccaattgcatcttgctcgggtcttgaaggctactcatacatgcacgttcctgcagtcaaaggtgtttgatggaagccttgaaggatatgtggtatgttggaatcagttttgttttttcttttcttgaggggaaatcctcagccattggggctatgattttgtacgtgtttttaaaataccgataaatatcatttttgctttagttgtatctatttggccaacttatgcatttaaatgtgaggcgcacaattccagaatacaagtagcttttcaagttatgagtgataaaaaaaaaaaaaaaattttacattcatccnnnnnnnnnnnnnnnnnnnnnnacaggattatttctgtgtatcacatttatcacacttaataccttctgactgcaatggaatcttactgtaatgattatttgaattgatcattggnnnnnnngtttgcctcatgaaacgaccaccaatagaaatgaacgctttcgattaatggtattattattgaagtagaattaacatccatagaatttat

SEQ ID NO: 6336 - DNA, 751 bp, Glycine max
gaccattacctaggaccatcttaatcgaaaagaatttctagtttctcccctctcgtaaaaccctagcaaacaaaaaaaccaaaaatggcttggcgcaatgcaggatccgctgcccgttctttcgccgccgccaccgcaagagcaccgtctctccgttctcctacggcggcgcttcctcgcctccgtccttccccatcctcttcacccggccgtcgcttctccttttcatcgccttctaggaatctgggagcgcttggttgcacgcagtctttcttgcctctgtacagtgttgtggctgcttctcagctcacctctcatcacaatgttaatttgcgtgctttctgcgagctgacaaacggtacttgaagaggcataggagcgtattatgcaacagtgtatgcatcagttactttgaagggggtgtgagagatccaaggattgggttacctcagaaaaacttaaatcattctgttacttttcggttccatattgtgtgggatccctttgatttttaatagctgtagagcttttcgtttgcttagcacaatattttacccctcctagaactttttgttttgtttttgaaagatgaataaagttctgaaactacttggcattgtttaaataaagtgtattggattacaactaaaaaaaaaaaaaaaaaagcttatcgataccgcccacctcgaggggggggccccggtacccaaatcccccctatagtgaatccgaataacgcgccgctcacggg

SEQ ID NO: 6337 - DNA, 1662 bp, Glycine max
ctgccagaatcagcatatcttccaggctcatgctgagacaaacaaataatagatgttgtcagcatcccagagtataccttggaggaaacaaccggcagtaggatagaatgaccttttttttttttttttttacgaactacaagatattcacactttgataaacatattctgactgcactaaacagttttgatttcaacattgtcaaaccagaagagaaggcaggagtggttaaaacgagtggaatcatcatcatacatgtcacaccattggctccaaggcaccatgttttacacaagtaacaaaccgcatgcataattggcgtacccaatccttcgtgactcgcacagcaccaagtggaaaggaacccatctaaagtggaaccaaataattatcacaaagaagccaagtccatattgtaggaggaatattacactatttggaaacacagatcgaatataggcaaacacttagacaactctactcatttcctaagtttaaagaaccgtctttcatcaactttaagctcaagctattgaatcttccacgtgagtaatgccttgatgcttttctccaatctgttccagttttcatcatagcaacaaattcatcgtagctgatacgtccatccttgtccgtgtctacttctaggaaaatgtcattcgctacatctgtacagtcatctgctccatcttccatcaaagcattccgtagctcatctggttcaatatatccattcccatctttgtcaaaataggagaaggccttgtgaagatgatcgtcattagccatccttcttaaatgaagggaaacagcaacgaattccccgtagtctagtgttcccttaccattactatctacagcttcaataagcaactgaacttcagagtcagccagtagagacccaaagtttcggaatccagcttttagttcttcaatggagacaatgccatcattatcattatccatcttcttgaacatatctttgatgtcttcaacttcttcattggataagaaatcagcaatgaccctaagggcttttcttttgaatctgttcatcatcgaaaattgcttaagccttgacttgacaacatctccaagtggaacattaggagccttcttagcattttgaatccagggatgctcaagcacttgtttggcagttaatcgaagcttggggtctggttctaacatttgcctaacaaggcttttagcactttcagaaatactgggccatggttcccttttaaaatctataagtcctcgaagaatggcctgtgcaactccttgctcagattcagcccaaaatgggggaacaccacacaataagatgtagagaattactcctgcactccatatatctatttctggtccataattccgcttgagcacttctggagccatataatatggacttccaacaatttctgagaacctctcacctggcttgaagaatatggagaggccaaagtcaatagccttgagcggcgaattctccttcttgttcgcgaacaagaagttctccggcttgaggtctcggtgcgggcccccgggccggcgccggggctgcccgacctcgacgatcgtccgcgtgactgccgcggcggcgcgctcggtgtagtgcccgcgggcgacgatccgcccacgcgtccgcggacgcgtgg

SEQ ID NO: 6338 - DNA, 960 bp, Glycine max
  misc_feature (66)..(66): n is a, c, g, or t
  misc_feature (104)..(104): n is a, c, g, or t
gctgagcacttcggagcattatatatgacttccaacatttctgagacctctcactgggctgagaantatgagaggccaaaatcaatgcctggagcggcgattcntcctctgtttcgcgaacaggaagtcctccggcttgaggtcgcggtggatgaccccgtgcttgtggcagagctgcacgacctcgacgatcgtccgcgtgacggcggcggcggcgcgctcggtgtagtgcccgcgggcgacgatccggtcgaagagttcgccgccctcgcagagctccatgacgaggtggacggcattgtcgtcctcacaggcctcgcggagcgacacgatgctcgggctctccggcaggtggcgcatgatggcgacctcgcggcgcacgtcctcgacgtccacggctgtccggagcttcctcttcgagatgctcttacacgcgagcagctcgcgcgtgtcgcggtcgatgcagaggtacgtcacgccgaactcgccgcgcccgagctcgcggtccacgaggtaccggtcctcgatgttctctttcggcacgccggcaagcaccgtgatcggggccttctgcttggcggcggcggaggcggagccacctccgccgcgcttgccgtggtcggcgttggagaagctcgatttgacgtcctcgcgggccacagcggccggggatctgcagcagttgcccatgggagcagagatcgcggcggaggagaggttttatagtaagaggctggaggcgtgctagggtttcacatcataatgcggaaaccctaaccctagaaaaaggaggtgatgaaagagtgtcgtggttttgagagaaaaaagagtgaggttgaagctggtgactggtgatggagaaggagaagtggaaatgcagctgtgagcggccgcggccaagtgggtgtacggtaacggctggggatgcgcggacgcgtgggtcgacgcgtaattccggac

SEQ ID NO: 6339 - DNA, 692 bp, Glycine max
cgtccgtacggctgcgtgcagatggcccttcttcaattcagagagagcgagacggcagcacgcgcaaaaatggtgaagtttctgaaaccaaacaaagccgtcatcgtccttcagggacgctacgccggcaaaaaagccgtgatagtgcgaaccttcgatgaaggcacgcgcgagcgcccctacgggcactgcttggtggcagggataaagaagtaccctgcgaaggtgatcaagaaggattcggccaagaagacggccaagaagtcgcgtgtgaaggcgttcgtgaagctcgtgaactaccagcacctcatgcccacgcgctacacgctcgatgtcgatttgaaggacgcggttacccccgacgtgctccaagccaaggataagaaggttactgctctcaaggagaccaagaagcgcctcgaggagaggttcaagactgggaagaatcggtggttcttcaccaagctcaggttctgagcataatattatgcatttttgttttcaaaatgtttttggatctcgctttgtttttcgtaattgatactttataatgatgtgttgagattagattttggttatattggatgtttaatgtggtttctggagatgataggataaagttgtttaaatttaattgctgaatttgagcccttaagaaaaaaaaagaaaaaaaaaaaaaaaaagaaaaaaaa

SEQ ID NO: 6340 - DNA, 501 bp, Glycine max
ttttttttttttttttttttttttttttttttttttttttttgaagtttttcaaacaacttttaaacgagtaacttcattgcatgtgtgcatcaagttcaacttgagtccattataaccatatccaaaatcaaaccattacaataacaaagtctaaaacaccacatatacctcagaacacagccaaaatgatcttaattttgtagaaccaaatgcaatatctaccacctattatcattctacaactgaatgcagcaaatttgttgtcactctgtcattataggtttgttctcgctggctttgggtttctgctcttttggcttctgttcatccgttttcctcttatcggaggagcctcccttctggctgaggaaggatcggaaaaggggagagttaacgtcgtaaatcattgttgtttctgatggcaaagatgaaaccctagttctagttctagttctttctctgcgctaccccccggcgccggcctctgcgcgccgctcta

SEQ ID NO: 6341 - DNA, 580 bp, Glycine max
ttttttttttttttttgcagtaaccaagtaaaatgactggttaatttgctttattgcacaaaatcactccagtgatggacaactcaacatttgaggcctcaaaataggtttgcaagtcacacttactgcatcattgcatatgcaacggaaagagcaaaagagtacaactagaagtgattccgaaaatgttaaatcactcttggtggattatagaacatggaaattccaactgctgcgatattggagaaagctccacctttagtatctgtgggacagcttctcctgctccttgtaccacatcgcatactggtaggtgccgacgacgggggtgatgaggagcgtggcggagatccagttctcggagaccttgtggtggatcttggtggtgatgtccttccacaggcccggcatcacctgctgctggaacggcgacagcgcgtacaccaccgccttcatccgcacgggcatcttccccatctttcgccttgcctcgccgcttctccttcttcctcggtgtggatgctctcctccggctccgatcaaactcagggatggggtgggtggtgggtggcttctgggt

SEQ ID NO: 6342 - DNA, 1064 bp, Glycine max
taatcagaaactcattcagacgactcgagcaaccactgcctcttacacttgtcacgtccctaccacgtactcgcaatggccgcagctgcagcactagccagttccacgaaagaagtgctcccgcctgcactgggcgccgtctccgagccccctaccctcttcgatggcaccaccagactgtacatttgctacacctgcccgtttgctcagcgcgcctgggttacccggaactgcaagggtctgcaggaggagatcaagcttgtcgccatcaatctggaggacaaaccagcatggtacaaggagaatgtttacccacagggcacggtgccttccctggagcacgacggcaaggtcaccggagagagcttggatttgatcaagtacatcgacaccaatttccaaggcccggcactgcttcctcaagatccggctaagaggcagttcgccgatgagctgattgcttacgctgatgcctttaccaaagcactctactcgcccttgatctcccaagtggccatttcagatgaagctgttgctgctctagacaagatcgaagctgccctgtccaagttcagtgacggcccgttcttccttggccaatttagcttggtggatattgcgtacgtgaccatcttggagagggttcagatatactactctcacctgaggaactacgagatcgccaaagacaggcccaaccttgagagatacaccgaggagatgaacaagatcgaagcctataagcaaaccaaaaatgtcccgctgaccttgcttgatgctgccaagaggcatctcaagattgcctgaagaagtggtgattcgccaagaattacggcggctgccagggaacggcggcatttgagtaggccaagactgaactctcgtcaccgggggttggggcttcttttactaccattattatcacaatgagttgtagtagtatatgttctcttcccaataaatgacaccatgttgtaacctgtaagggctatgctttttatgaaacaataatgtactccatctgttctatgtgcattacagttaatacaaaaaaaaaaaataaa

SEQ ID NO: 6343 - DNA, 960 bp, Glycine max
cgaagctgagataatctctgggcacaatttattattaaaccagagcataggaatgctcatttcagtacaagatctagacaggatcgcaagcacaagcctgaacattcaacacgaggagacatcacaagaacacacactcggacaggcacacatcgggggaaacacacttcggcttatttcgcgacgaacgagcgccagaaactaagatcatggcttcatcagcgcagcgaccttctggacggacggcctcgccagcaggtcagtccaccaggccttcacatgcgggtacgcgtcgaacagagacgcgtagggtgtagccgccaagcacagggtgacagacacatggttaaggtccgcaagactgaggaagtctccagccaggtacttggacttgctcaggtgcgcctcgtacaccgccagcacgttcttgatcttaacaaggttagcatcgatgaccgtctggtcagtggctcccccaagcataggatggataaggcactcgaagagaatggggctcagcgcggcggtgtactgatgggcctccacctcgagccacacatccaccatagctgactccttgatgtcgccctccttcaacagctctggcttgctcttgcggcacgcatacttgcaaatagcacgtgattcgaagacgtacaagtcaccatcctgcaaagctggcacctggccaaaggggttcctggcgaggtggtcggggcccttgtgctcgccggtgccgaagttgatggggacgagctcgtactcgacgccggcttcctccagcgccgccacgcacctggtgacgttccacgacagggtcgcgccgtacagcttcaccggagccatctcttctcactcctcactctcgaacgcactcgaacctttttttctctcttcttctcggtaggtaataaagccgctgcggatgggatgggatgtgggatttttcgattaggatgt

SEQ ID NO: 6344 - DNA, 1583 bp, Glycine max
tcagctacgtaggccccccccccccccaatgatcctcatcatctcacacacaacacactcgtctttctcttctcacttttcagttctgccttctaacgaaatcccttctattctattctttctccacctcttctctcccctgtcttcttcttaattaccctccctcattgcgtgcaccccccaaaaaataagaagatatacataaaaataaaacacaccctctacgtgtccacactctctgatcacaacacacccgcttaattaaatctctatatataaaccccttcaggcactccactatgacgggcaaagaaatttttcataagatgaaggaaaaagttttgggatcatctgatcccgattcaggtaaaggaaagagcaagatgaagaagcacataactcatggctttcacttggtaaagggaagatcaggtcatgccatggaagactatcttgttgctcaatttaagcaagttgacaacaaagagttgggtttatttgcaatatttgatggccactctggtcacagtgtacctgattacttgaagtctcatttgtttgataatatcttgaaagagcctaacttctggacagaacctgctgaggctgttaagagagcatatagtataactgattctactattttagacaaatcaggtgaattgggtagagggggttcaactgcggttacagcaatattgatcaactgttacaagctactagtggccaatattggggattcccgggctgtcttatgtaagaatggcgtagccaaacaactatcggtggatcatgaaccaagcatagaaagtgaagatataaaaaacagaggtggttttgtgtcaaacttcccaggggatgtgccacgtgtcgatggtcagttggcagtgtcaagggcatttggtgacaaaagcctgaagatacatttgagctcagaaccatatgtaactgtggagatgatagaagatgatgcagagtttcttatactagccagtgatgggttatggaaggtaatgtcaaatcaagaagcagttagtgctatcagagatgttaaggatgctagatctgcagcaaaggtgcttactgaagaagcaaagaacaggaaaagctcagatgatatctcttgcgttgttgtgaaatttcagtgatcagtaaactcacatagtatatttttatctacgaacttgaaagtgtaacatatactttagtgtaatgttgataccttttaggtgttattatgtcatgccattcagtgtgtgatatttaatcttctttaatttcatacaaatgaaactgctgagaacgtgttgtttgatgtaccaatgttcaaaaggatttagttttggattgtgtagaccaaaataattcgtatgaatgcaaggaagtttggtcaaaaaaaaaaaaaaaaaaaagccttctggaaattcattagccatccatttgtgcctctgaaacacctatgcttgtattttgatacttcacctacttgtattttgagcgaaatatgtgtgaagtattcagtgctagacttataatttatatgttgcttttattaatgttttaaaaagaatatatttaatttg

SEQ ID NO: 6345 - DNA, 962 bp, Glycine max
aaaaccaagaccgaatgctccactcaaaacaagaaattgtattatttgtccaaacaagaaattaaatgcagtacagtttaattgtctagaattatgtaaatctgctccactgaaaatgatgtgtcaaatcatcttgtaatgattgagtagttgatatgagtcatgggacacggctggtgatcggagttcagacggctttgagcttcttggcgatgccggcaaagtacttgccctggtgcgccgcgagggcgagctcggcatcgctgggcaccctgctgccatcggctccagcgaaggtgccggcaccgtacgggctgccacccttgacctcgtccatggcgaacatgccggcgccgtgcgtgtacccgaccggcacgaacagcatgccgtggtgcgtcagctgcgtcacggccgtgagagccgtggtctcctgcccgccgccctgggtgcccgtcgcgaagaagacgcccgcgggcttgcccgagaggctctgtgcctgccagaggccgccggtggagtcgaagaaggccttcatctgcgccgccatcatgccgaaccgcgtcgggaagccgaacaggatgccgtcggcctcggccagctggctcgccgtgatgaccgggtggtcctcgcgccccggcgccgcgtgcatcttcccgagcacctcctctggcagcgtctctggcacccgccagacggtgacctcgacgccggggacggagtcggcgcccttcttcatctcctccgccagcgtcgcgacgtgtccccaggtcgagtagtacactatgtagatcttggtcgccattgctgatcagccgcggagttctcttccccttgatctgtgcttctaatttgctctccttattgtcgctgtatgactatggctggtgaaaattgagaagacacggaggcactggtatttatagagaaaattgagaggctgccaggtcctaagtaagctagta

SEQ ID NO: 6346 - DNA, 713 bp, Glycine max
  misc_feature (682)..(682): n is a, c, g, or t
ctaaatcagtgctgcaactagccaactacagtcgcagatcgagttctcctcgtcgctccagccaatgcccccctagataatatcttatcaagccaagaacgacggcagggctgggcacggcgcggtataagttcagctgcaggcggccgccgtctcgatcgacacaaagagagagggagggggatctgattttttgaaggggatggcgcatggcagaggcggttcccggcggctgcatgcgcgtctactcgcggtggtcgggctcctcgcctgcgccgccgtcgcgccgcgctcctcggcgctcaacgtcggcctccagaccctcgacgccgacgccgacggcgtgagcaagcagcaggcgtgcagccgaacgtgcgagtccgaccactgcacgacggcgcccttcctccggtacggcaagtactgcggcatcctctacagcgggtgccccggcgagcggccgtgcgaccccctcgacgcctgctgcatgcaccacgacaactgcgtcctcgtcaagaatgactacctgagcacggagtgcaacgagggcctgctggagtgcctggcggagctgcgggctggcacgggcacgttcgaggggaacaagtgcatgatcgacgaggtcatcgacgtgatcaccgtcgtcatcgaggccccccgcgtcgccggccgggtcctgcancagcctagctacatagtaccacgccgggcgg

SEQ ID NO: 6347 - DNA, 513 bp, Glycine max
caagatctccaccgccgcgaacgcctgcttctttccctcggatttctcctcctctgtcttgcccctcaaccactgcctccatggggctaccagcttgtcgtcaacgtaggccatccagaagcgagcaatggcgcgctcgtaggggtccgctgggagaagggacgggccggtgccggcgaacacttcgtcgatgtactgcagaatgatcatggactcgcagaccggggcgccgttgtggatgagcactggtatcttcttgtgcaccgggttggacttgaggagaagctcgctcttcttgtacaggtcctcctccacgtcctcgtagctcaggcccttcagggcgagtgccagcttcaccctggtaacaaacgggcttggccatgtgccgagcagcttcaggtcatctcgtccggccatctctaactacctcgatcgatgttttgtgtgtgtgtgtgtgttttgaagaccactgagattgctttagctgcttgtgcttgtgcttattttcgatgg

SEQ ID NO: 6348 - DNA, 1034 bp, Glycine max
ttttttttttttttttaaaaaaactgtcgaactcatctcttgaatcagaaagagaacctcagctaatacatgcacgcattataaaatttgggaactccacacaaaagcaaaatattaaaaactcaaggacataatcaatactgaataaatggatgacatgagttactgctacattattacatcaagcagccaaacaaacaacatttaaaaatagcaaattttagttattctggatgtgtgctggctcagttagacggtgcagcggcagcctctcgtgccttggcgaactcaagcagcctgcccacgtctggcagggccaccttggccgcgtcgagctcgctgaagcgctccacccatgcggccaggagcggggtcttggcggcatcgaagatcttgtcaccggacaacacctcgatcaccttcatccacgacagcacgcctcccagcgcaacgtcgacgagcccgaggccgtcgccgccgaagaagccccctcccttggagcattccctcagggccccttcaagaatctccaccgccgcgaacgcctgcttctttccctcggatttctcctcctctgtcttgcccctcaaccactgcctccatggggctaccagcttgtcgtcaacgtaggccatccagaagcgagcaatggcgcactcgtaggggtccgctgggagaagggacgggccggagccggcgaacacttcgtcgatgtactgcagaatgatcatggactcgcagaccggggcgccgttgtggatgagcacgggtatcttcttgtgcaccgggttggacttgaggagaagctcgctcttcttgtacaggtcctcctccacgtcctcgtagctcaggtccttcaaggcgagcgtgagcttcaccctggtaacaaatgggcttggccatgcgccgagcagcttcaggtcatcccctccggccatctccaactagctcgaagcctagaacgatggatgtgcgtgtgtgtgaaggctgagatcgttttagctgtttctgatttgctgggtactggcttgatt

SEQ ID NO: 6349 - DNA, 1261 bp, Glycine max
  misc_feature (1260)..(1260): n is a, c, g, or t
attatttgcaattaaaatctcttcatttttctctctttattacattttcattatggtgaccaagatatgatctgttatcaatatatattcaatgacattcacagtcccgagtcctaacctgagttgtgtctcaacttgctcttcttcttcttctctttcaccctccaaattttctcactctctctttatcttcaccttttcagtttaaagcttcagatcacaaccgatccaccattcaccactttctcttcacaagctcaagttactgacaggcaaatctaacaagaaaagtagtctctgaagtcgatccagtgccttgtgaatttggaattggtggtgaatttagatctaaaagccatagcaatgtcttttatcggtacccagcaaaagtgcaaggcttgtgagaaaacggtttatcccgttgatcagctttctgctgatggtactgcttatcacaaagcttgcttcagatgctctcactgcaaaggaacattaaagctgagtaactattcctcaatggaaggtgttctttactgtaagcctcactatgagcagctcttcaaggagagtggctccttcagcaagaacttccagtcacctgcaaagctagctgataagacaactcctgagctgacaaggtctcctagtaaagctgcgagcatgttttctggcacacaagaaaagtgtgccacatgtggcaaaactgcttatccattagagaaggtaacagtggaagggcaggcctatcacaaatcatgtttcaagtgttcacatggtggatgtcccataacgccatcgaattatgcagcccttgagggcattttgtattgcaagcaccacttctcccagctttttaaggagaaagggagctataatcatcttactaagtctgcatcagtcaaacgggcagccgcagccacagcagcagcaacaacagctgcctctgttccagaatcttgaatgttggttccttcaattgccttttctttttcaaatacattttggtttgtgaagcaggtgtttgtatgtgtggcctttttggtttttgattgttctctcgtgactttgatcatttctgatatttttacttacacatgcgtggcgtgcaaatcttgtgtggtttattcatataatggacatttagtaaagacgagactaatgagagcgtgatttgcaagatatatcattccaggatgatgaaagtgccccccagcccgttttctaccaaatgctatcctatattttatattcattatcatnc

SEQ ID NO: 6350 - DNA, 1250 bp, Glycine max
aaggatatttgtatcctggttcctaatagacatgctagtagctattatttccaattaaaatctcttcatttttctctctttgttacattttcattatggtgaccaagatatgatctgttatcaatatatattcaatgacatacacagtcccgagtgctaaacctgagtttaaagcttcagatcacaacagatccaccattcacctcaccactttctcttcacaaggcaaatctaacaagaaaaagtagtctctgaagccgatccagtgtcttgtgaatttggaattggtagtgaatttagatctaaaaagccatagcaatgtcttttatcggtacccagcaaaagtgcaaggcttgtgagaaaacggtttatccagttgatcagctttctgctgatggcactgcttatcacaaagcttgcttcagatgttctcactgcaaaggaacattaaagctgagcaactattcctcaatggaaggtgttctttattgtaagcctcactttgagcagctcttcaaggagagtgggtccttcagcaagaacttccagtcacctgcaaagctagcagataagacaacacatgagctgacaaggtctcctagtaaagctgcgagcatgttttctggcacccaagaaaagtgtgccacatgtggcaaaactgcttatccattggagaaggtaacagtggaagggcaggcctatcacaaatcatgtttcaagtgttcacatggtggatgtcccataacgccgtcgaattacgcagcccttgagggcattttgtattgcaagcaccacttctcccagctttttaaggagaaagggagctataatcatcttactaagtctgcctcagtcaaacgtgcagcagcagcagcagcaacagcaactgcaacgaccgtggcctctgttccagaatcttgaatgttggttccttcaattgcccttcctttttcaaatacattttggtctgtcaagcaagtgcttgtatgtgtggccttttttggttttgattgttctctcgtgactttgatcattttctgatatttttacttacaacatgcgtggcgtgcaaatcttgtgtggtttattttatacaatggacattcagtaatgacttgactaatgagagcgtgatttgcaagatactatatcattccaaggtttggttatcttgctgcctttagtttcttggatgttttgattcaccgcatctggaaagtgatttcttattaaatatattgatcataaat

SEQ ID NO: 6351 - DNA, 1587 bp, Glycine max
tcagctacgtaggccccccccccgaagtacaaaggttttggaaggaacaaacatcttggtggtaaaccctacagagtacagacatcatttaggaagcagaatcagatatttgaaggttagaacgaaaaagaatcatcgatggcagagacgaaagaaggttcaggttcggagatgtctctgaaggatcagggcaacgagtttttcaagtcaggaaagtatctcaaagctgctgcactctacactcaagccatcaagctagacccttctaaccctaccctctatagtaatcgtgctgcagcactactgcaattggataagcttaataaagctctagatgatgcagagatgacaatcaaattaaaaccccaatgggaaaagggatatttcaggaagggaagcatattggaggctatgaaacgatatgatgatgctttagcttcctttcagatagcattgcagtataacccacaaagtcaagaagtatcaaaaaagataaagaagataaaccaactggtgaaagatagcaagcgagctcaagaagtggagaatatgagatccaatgttgacatggccaaacatttagatacattcaaaactgaaatgtccgggaagtatggattagaagaaggctggaaagatttgttctcattccttgttgagactatggagacagctgtaaaatcatggcatgaaacttcttcagtggatgctagagtttactttcttcttgataaggaaaagacagacaccgataagtatgccccagttgtgaatattgataaggcctttgaatcaccacatacacatggcaactgctttgcatttcttaggcagtatgctgaggagtctttctccaaagcagcctgcttggtgactccgaagaacatcattgcttatccacaggtctggaagggccaaggaccaagaaagtggaaacatgcacaaagtgatggtttctttgttcaatttgagtctccttccctgcgaaagctgtggtttataccaagttcgaatgaaaaggggcagacattatgcagggatccagaggttttggacattggtgctcatgaagttcttccccggttattaaaagaaaatctgccccattcttagtgtactacttcattagtacgtggtgtatttcttaaggtaaaaatgtcaggctcacacgaaggtttgcatgttcaacgaatacagacgcaatatggtgccgatgttttgtcgtcttaggatgtgaaaaatgctggcaaaaaggatgtgtgcttcataattttgttagatccgtatatttatttattaaattattttaaatcatccaagccatcgaggagttgcattttggtattattttattgtgtttgctcttctgttcttgaggtttggagaccttggcctttagtttgtttatttgagatgtgacacttttatgttgccaaggcaaagtattcaagtagttagcatagatattttatctgttttttttgtggttcagatatgaatattgaatttggctgttaatgttcattttgatcaatttatttttgtatccaaaaaaaaaaaaaaaaaagcgctctaaagggatcaagc

SEQ ID NO: 6352 - DNA, 1016 bp, Glycine max
aaaacaaatccgaaaaccccaacctatcgtctcttggctcttcttcaccttcagtcttcactcacgcgcgccatcttctcagtcgccaccactccacgcccacgctgagaaaaggaatatgggtgatcggcaagtagttgaccaacaacacatgggtgatccacaactgccatcttctcctccctcaaaggatgatatggtttcatgtgttatggctttggaggctgctttgcttccctgtttgccagccagagaacttcaagcaatagaccgttctccccacccctcacatcaaattgatgtggataggtatgcaagagacttcatggaggctgccaagaagcttcagctttattttatcagcctgcaacgtgaggataagccaacaaaagttgaaatgcttagaaaggagatcgctctgatggaagaggaacttaacataaagaatgagctgataaaaaaacaagaaaatttaattcaggagtggaaaaaagagttgaaagatcagttggacaaacacaagattgagttggatagggtttagctaggggtgtgcaaaaatccaacacccgacccaagcccgaagaaaccgaagaaaaaacggttcgggagggtgcgtcatggtggcgtttgagttcggtgagtgaattggagtttgaaactgatctcttgctaatccgaaacccctcctatccaaaaaaagcaatgattggattttgccaagtcattttgagcctgaatctgcccgcccgatgaacacccctaggtttagtgtatgcttgtgctcctatgctcttcacatatttaaagactcggtgccacatttttggcatttattttttctttctccttcctctatagtctttattattgctcatcccatagcatgaaatcatgaattccaaccacacttaactggcttcgaataggtgtgcgattaaaaaaaaaaaaaaaatatatgatcattcaaaccaatttaattaaatttatttagtttaattaaaaaaaaaaaaaaa

SEQ ID NO: 6353 - DNA, 1264 bp, Glycine max
ccgaacgagttgtgtggttgtttctggataaaactagaaatttggcagaaacgaaccctaacacaaaaaaaaaaaaaaacgcgcactctatataagtgcattttttccctttctctttcatcaaattgtgcttgtgattgtctttgtatcacgaaaactatacgattcgattccttgttttcaatggacaccttcttcaattctcaatcttcttcttcttcgagaagccgctggagttacgatactctcaagaatttccgtgagatctctccgctggttcagaatcacatcaaacgggtttattttacgttatgttgcgctgtggtggctgctgctgttggagcttttcttcatgttctgtggaacattgggggttttctcaccacgttggcttccattggaagcatggtttggttgctatctacaccccctgttgaagagcaaaagaggttgtctctgttgatggcttcggccttgtttcagggcgcttccattggacctctgattgatttggctattgccattgatcctagccttattgttagtgcatttgtggcaacttctttggcttttgcttgcttctctgcggcagctttagttgcaaggcgtagggagtacctctaccttggtggtttgctttcttctgggctgtccattcttatgtggttgcactttgcttcctctctctttgggggctcaattgcactcttcaagtttgagctgtactttgggcttttggtgtttgtgggctacgttatagtagacactcaagaaattattgaaagggctcactttggtgacctggattatgtgaagcatgcattgacattgttcactgatttggctgcaatctttgtgcgaattcttattataatgttgaagaattcatctgagagaaatgagaagaagaagaaaaggagagattagtaggctgaccgaccgactcgagctcaggcttctctacagtaatttagtttgtggagaatacataattagctgtttagatgatgttggtcccttgtgtagttagttagctatgtgtttgctgtaatggtaaatgtcaggatttcttttaaacatcttcatatgtatttgccaatatcataatgtgtcgtataacatcataccttggtttaagcagcatgttgacgaaaccttcactaaattttatttttgggtttagtttattttatacattaagtggacaatgcagccgacatatattttgcgtccatccgacagccctttcaggatgtgctatttt

SEQ ID NO: 6354 - DNA, 948 bp, Glycine max
cggccgctcgaggcggcgggccgggtttcaaaaaggaagcgtgttgcaaaattccggctggccccagggccacgccggcaaactcaaagcctaaacacatttcattcccaaaaaactcactcacgagagtgcatcattcctcatttgatcctctcttcccccatgaccttccaaccagtccccactctccttctccttctcctcctcgcgtccgcaaattcccattttgccctcgccggaaagcgcaaggttcacatccccgacgagttggacgacgtgttcgacgacgaggaggacgacgcgtggcgagaatggggcaagaaacccgaaccccctttcccttcctccgatatctccaagctcgatccctcgcagatccagcaggagatgatgaagcgccacgccggacccgtcatcggattcgtcaagctccggccagggtctcgccgtactccggacatggtagctgaatttgcaatgaaatggacacatgttctgagaactggagctgttggagtaaggtttatgggtgttgatctgaatacaattatgtttaacttggaaagcatcaaagacttggaagagttgaaggaatttgtcttggaccaatcagaggcatatgagatcaaaatgggggatcaattttttcgaagatctggagatccacctcttgatgaagttattgagaagtacaatagtgagaaagccaaagcagataatgctgattcagaggaaattgatccgaatgttaaaacagagttgtaattaaacggtatatagacataaactatgtttggttttgcgtcagttttaggaaaattgtgtcaaatttccatgttaacagtgaagcaacttcatataatttttcacttttccacgtttttcatgcacattatgtgttatcaacgcaacaccgaacattctaataattctctagaagttgacatg

SEQ ID NO: 6355 - DNA, 1701 bp, Glycine max
ccacgcgtccgcggacgcgtgggcggacgcgtgggcggacgcgtgggctgtgttagtggtaaaattttgatacatagcgttctgcttcggttcacaaggcaccagctgctccgttctgcttcggcttcagagtttgtgtaacattctccttccttcttccgatttcgaagatggctgaagcagaggatgccgtaagacgccgtaatgcggtcgccgagtatcggaagaaacttctccagcacaaggaattggaatccagagtccgatccgtcagggagaatttgcgagcttcaaagaaagagttcaataaaacagaagatgatttgaaatctcttcaaagtgttgggcagattattggcgaagttctcaggcctcttgacaatgaacgcctgattgttaaagcaagcagtggtcccaggtatgtggttggttgccgcagtaaagtggataaggaaaaattgacttcagggacaagggtggttcttgatatgacaacactcaccataatgcgagctcttcctcgagaagttgatccagtagtttacaatatgttgcatgaagatcctggtaatatcagctactcagctgttggtggcttatctgatcagatcagggaattgagggagtcaattgaactgcctctaatgaatcctgagctcttccttcgagttggaattaaacctccaaagggtgttctcctttacgggcctcctggtactggtaaaacattgttagccagggctattgccagtaatatagatgctaacttcctaaaggttgtttccagtgccataattgacaagtacattggagaaagtgccaggttaatcagagagatgtttggttatgcacgtgatcaccagccgtgcatcatttttatggatgagatcgatgccattggaggtcgccgtttcagtgagggaacaagtgcagatcgtgagattcagagaacgctaatggagctgcttaatcaactcgatggatttgatcaacttggaaaggttaaaatgataatggcaacaaaccgacctgatgtacttgaccctgctctcctgcgtcctgggagattggatagaaaaatagaaatccctctgcctaatgaacaatcaaggatggaaattcttaagattcatgctgctggtatcgctaagcatggtgaaatagactatgaagctgttgtgaagcttgcagagggatttaatggggctgatcttcgaaatgtctgcacagaagctggaatggcagcaattcgtgcagagcgtgattatgtgatccatgaagattttatgaaggctgttaggaaactgaacgaggcaaagaaacttgaatccagtgcgcactacagtgctgattttggtaaagactagaatctattgcaaaattcttgcagagccatggatatctaggcagtgcatcttgagttggaaatacctcgagcaagttactcaattcgtagagctaagcgtgatgttccctttgggttatggcttgtgttttccgaattctaaaattggaagggtaacttaatcaaacggtaaaagggatgttcaatttaattgtattattgttgcccccaccccacccaaaccccttttttttctggactgtagaagggcaactcatattttatactggatcttgggatgtgcacaatttgctttatattttaaaaaaattaaaattgtctaattttacacattt

SEQ ID NO: 6356 - DNA, 1623 bp, Glycine max
attaagcagctactctgcttcagcgtgttgacaacacaagagaagatacgaagctctctcaatcttattttctgattaacactaacaaataacaatgacggatgctgctgaagacgctacacgccgccgtaatgcggtggccgagtaccgcaagaagcttcttcaacacaaggaattggagtccagagtacgatccgtccgagagaatttgcgtgcctcaaagaaagagttcaacaaaactgaagatgatctgaagtctcttcaaagcgttggacagatcattggcgaagttcttaggcctctcgacaatgaacgcttgattgttaaggcaagcagcggacctaggtatgtggttggctgccgcagtaaagtagataaggaaaaactgactgctggtacgagagtcgttcttgatatgacgacgctcaccataatgcgggctcttccacgtgaagttgatccagtagtttacaatatgctgcatgaggatcctggtaatatcagttactctgctgttggtggtttatccgatcagataagggaattgagggaatcaattgaattacctctgatgaatcctgagctcttcattcgagttggaattaaacctcctaagggtgttctcctttatgggcctcctggtactggtaaaacattgttagctagggcaattgccagtaacatagatgctaacttcttgaaggttgtttcaagtgcaataattgataaatacattggagaaagtgccaggttaattcgagaaatgtttggctatgcacgtgatcaccagccttgcatcatttttatggatgagatcgatgccattggtggtcgtcgtttcagtgagggaacaagtgctgatcgtgagattcagagaacactaatggagttgcttaatcaacttgatgggtttgatcaacttgggaaggttaaaatgataatggcaacaaaccgtcctgatgtactggatcctgctcttctgcgtcctggaagattagatagaaaaatagaaattccattgccaaatgaacaatcaaggatggaaattctcaagattcatgctgctgggattgctaagcacggtgaaatagattatgaagctgttgtgaagcttgcggagggctttaatggagctgatcttcgaaatgtgtgcacggaagctggaatggcagcaattcgtgcagaacgtgattatgtgatccatgaagattttatgaaggctgttagaaaactgaatgatgcaaagaaactcgaatccagtgctcactacagtgctgattttggcaaagactaaaagctattataaaattctgagccatggatatctagggaaaacttcatgcaattaggttaactcagacggtctgaccttaagatgaagtggtctcttttagctatgccttctattgtccgacttatgcagttccatagagaagatgtttagttgaatcatttgcctaagctaattgaattattattatttttgttttctttgggattatgctatacaaattactgatctttgaatttagagtttgcgtgcctccccatttatggttaaagactgcttgttgagtgaatttgcgttgcaagcttcaataaatctgatttggtgtttaatct

SEQ ID NO: 6357 - DNA, 665 bp, Glycine max
cccacgcgtccgcccacgcgtccgtacggctgcgagaagacgacagaagggggatgcatacaacacaacacaaaataagagacttctctcatctatcgttataatttactttgatacgaagctctctcgatctaattttccgactaacactaacaatgacggatgcagctgaagacgctacacgacgccgtaatgcggtggccgagtaccgcaagaaacttcttcaacacaaggaattggaatccagagtacgatccgtcagagaaaatttgcgtgcctcgaagaaagagttcaacaaaactgaagatgatttgaagtctcttcaaagcgttggacagatcattggcgaagttcttaggcctctcgacaatgaacgcttgattgttaaggcaagcagcggacctaggtatgtggttggctgccgcagtaaagtagataaggaaaaactgaccgctggtacaagagtggttcttgatatgaccacgctaaccataatgcgagctcttccacgtgaagttgatccagtagtttacaatatgcttcatgaggatcctggtaatatcagttactctgctgttggtggtttatctgatcagataagggaattgagggaatcaattgaattacctctgatgaatcctgagctcttcattcgagttggaatt

SEQ ID NO: 6358 - DNA, 2039 bp, Glycine max
ctgcaggctatcactatgcaaatgcaactgcctcacctctttcaggcactgctgattcggttcctggattaaatcatggtgacaggattgtccaagctatgaactcaaaactgaatctgatcggctgcgttcccccccccccctatgaagccttgccaagttttcgtgatgttccaaacccagagaagcagaatttgtttataagaaagctgcaaatgtgctgtgttctatttgacttcactgaccctacaaagaacatcaaagaaaaggaaattaagcgacaaacactagtagaacttgtggattatgtttcgtctgctaatgggaagtttacagatgttatgatgcaagaaattgtaaaaatggtgtctataaatttgttccggacatttatttctcctccgcgagagaataaagttctagaagcatttgacgtggatgaggaagagccttccatggatcctgcctggccttacttgcaaattgtgtatgaactgcttctaaggttcgtcatgtcaaccgagactgatgcgaagttggcaaaaaggtatattgatcattcatttgttctgagactgttagacctttttgattcagaggatcccagggaacgggattacttgaagacagttcttcatcgtgtttatgggaaatttatggtgcaccgaccattcatcagaaaagcaatcaacaatatattctaccgcttcatttttgaaactgagaaacacaatgggattgcagaactcttggaaattttgggaagtataattaatggatttgctttgccactgaaagaagagcacaagctatttcttgtgcgagctcttattcctcttcataaaccaaaatgcataccaatgtaccatcagcagttatcttactgcatctcacagtttgtggaaaaagattgcaagcttgcggatactgttatacggggactattaaaatactggcccattacgaatagttctaaggaggttatgttcataggggagctagaggaagtcttggaagcaactcaacctgcagagttccaaagatgcatggtacccttgttccgccaaataagttgttgcttgagcagttcgcatttccaggtagctgagagggctttgttcttatggaataatgatcacattgagaccttaatcaagcagaactacaaaattatacttcccgttgtcttacctgctctggagtataacgcccgaaaccactggaaccaggctgtccagagcttgacaataaatgtccgcaagatattcgcggacactgaccctgaattctatgaagagtacatgatcaaagttcgggaaaatgaagcgcaagagaaggatatgaagtcaaagcgtgaggccagatggaagcgtttggaagatatgggaggcatgaaagctacaaccaacgaagcagttctagtttctcccagaactgcttctcataccccttctggcaaggcaagtagagctcagttggagtgataattgatttttggcattgcagagttgaaaagccataacttatgctgcattgcattatgctgcataagaatacaagggatggtgataatgtgttgctttttgttggttccattggccacatgataaaatttcaaggccaaaaaatgtggggtacaaaatagccccaatttggttttacaagcatggaatggatgtatatattgattgcatggacaagaatggttgcctcaagccacagtttatttgggaattttccttctaaaggtgacctttgcagtttgttgttgtgaaaaaatctcaatggcctgagttcaacggtttatctgctttcatactttaactttgatggaagcatgcttcatttttttgttgccaatgtttagtgttaatcttggttcctttgtgtaggtgagttggttgtttaaggaaattgggcaattagagcttatcttatatgaattgcggtggacactgtattttatatatgatatgatgaaagcaaattattttagtggggctctggccacttcaccaccattgccgaaacaatggctg

SEQ ID NO: 6359 - DNA, 1640 bp, Glycine max
tacgcctgcgccctggtccggaattcccgggtacgacccacgcgtccggacagtctctgccagtgcgccgggccccccggccgacccacgcttcttcttttctttttcttttttctctacacacagtgaaggaaggaagagagtatcatccatggcggccaccagagcagtaaccattgccagcaactccacatgctctctgcttgcaaagaaaacctttgtgggtggcactgctctttccctcaacaacctcaaattttgtcgtactaggaggtcttacacctgcagagccatctacaatcccctggttgtcgtcaaggaagaaggccaacccgaaacctttgattatagagttttctttgttgacaaatctggcaagaaggtttctccctggcatgatattcccttgcggttaggtgatgatatctttaacttcattgtcgagattcctaaagaatccagtgcaaagatggaggttgccactgatgagtctttcactcccataaaacaagatacaaaaaaggggaagctccgatattatccctataatatacactggaactatggcttacttccacaaacatgggaagatccatcttttgcaaactctgaagttgaaggagcattgggagataatgatccagttgatgtggttgagattggtgaaagacagaggaaaataggtgaggttctcaaggtcaaacccttgggtgcattagccatgattgatgaaggagaacttgattggaaaatagttgcaatttcattagatgatccgaaggcgccatttgtaaatgatgttgatgatgttgagaagcattttccaggaactctaactgcaattagggactggtttagagactacaagatacctgatggaaaacctgctaataaatttggacttggcaacaaggcagcaaataaggattatgcgcttaaggtcatcacagagaccaatgagtcctggaataaacttatcaagagatcaattcctgcaggagagttgtcacttgtgtagagatgtattgggggaatgtctattgttcatgccattgcttgcattttctacaattctatttatgaagtagcaaatttttctattgagcttcccagttataactttgacatcaatgtccatttggccagccattagttcaataaatccatcttgcttatgtattctacaatttaaaaaaaaaaaaaaaaaaaaaaaaatctaatgaagtaactcaaaaaaaaaaaaaaaaaaaaaaaaaattttaaaaaaaaaaaaaaaaaaaaaaaagggggcggcccccctttttttttttttttttttaaacaccccctttcaataatccaaattcccgttgcccttttaaaaaaatttttacttggaaaagggttttttttttcacccccttttattttcccccaaattttattcccacccccttttcattaccctttttgggggggcaaggcccccattgaaaataaaccctaaatccttaggcttttatccaaactctttaccccaaactctttacccttaggccaaccttagggggttacatataaaaacccttaaacctaaccagttttttttgccccccttgactgtttgtttgttgaaaatttgactttttgccttctttgaa

SEQ ID NO: 6360 - DNA, 1602 bp, Glycine max
tcgagtcagctacgtagggccccccctctccaaaacaaatgataatgcccaaaaagtccacccaaagtagttgagctaaacctccattacattaccccttcttacatacttacatcacccaaagactcattcatccccaaactcttaccaaatccacattaccctctctccctcccttcatgtccggagagccacggccgttggagatccacctgagggtcaactccaagagaggcaccaccatggtgcaccccgtggcggcggcggagacggtggaggttccgattcagtaccccagagaggaagaagtgaagcattacagaaagtggttctcttggctgatacctctctttgtggttgccaacattgttatgtttgtgatcactatgtatgtcaataactgcccgcgtaactctgtctcctgcattgcctccttcttgggtcgcttctccttccagcccttcaaagaaaaccccctcttgggcccttcttcgttgacgctgcaaaagatgggggctcttgatgtgagcagagtggttcacagacaccaggggtggcgcctcatcacttgtatgtggctacatgctggggttttccatctgttggcaaatatgctgggtattctagtcattggaattcggcttgagcaagaatttgggtttgtgctaattggactgctatttgtcatatctggatttggggggagtttgctttctgctctgtttatccagtcaaacatttctgttggtgcttctggtgcactttttggcttgctgggaggcatgctttcagaactcattactaactggtctatatatgataacaagctaacagcactcctcacccttgtgatcatcattgttatcaatctagcagttggaattctcccacatgtggacaattttgctcatattggaggctttcttactggatttcttctcggatttgtgtttttgatacgtccccagtttggatgggttaaccaacgatatgctcccctaaattattctccaggacgagtgaagcctaaattcaagaaatatcagtgcatcttgtgggtcttctccctgatcattctagttgttgggctttctgttgggctggttgcacttctccaaggtgttgatgcaaatgatcactgctcctggtgccattatctgtcttgtgttccaacttcaaaatggagctgccatacagaggcagcatattgtcagtcaaaccaacttggcaaccagttgaatgtaacatgctcaagcaatggtaaatccagtacatacttcatgcaaaatccaaccagttcccagatccagcaattgtgtactcaactttgtagttgagctttgacaaaagtgatgatcgttggaatgagatgttcatttgttcatattagtgtttcaggttctcacgaaaaactgcacactgcagtgctctttcgtttataccttctgccttacattttgcctttgtagatttgttcattttcttgtgtacataatattttgcttgatttaccttttttgggtacctttgtgtgagatcaaagttatacttatagatgattaatgtatcaccctaacttgtgtttgctaaaaaaaaaaaaaa

SEQ ID NO: 6361 - DNA, 895 bp, Glycine max
ttctacttttcccaacagctcttagacttgagtcacattctctctcttctattctaattctgatttctatctctctctacaattccaaaaccctacccccttccaattccaattccaattcatcctctaacatgggttctgaaggttccactgtcgtcgttcctaggaatttcagattattagaagagcttgagagaggtgagaagggaattggagatggaactgttagctacggaatggatgatgctgatgatatctacatgcagtcctggactgggactattattggcccccctggtggcgttcatgaagggcgtatctaccagctgaaattattttgtggcaaggattatccagacaatccaccaactgttagatttcagactaggattaacatgacttgtgtcaaccaagaaactggagtggttgagccacatttgtttcctatgcttgctaattggcaaagagagtgtacaatggaagacattttgatgcaattgaagaaagaaatgatgtctccacaaaatcggaagctagctcagccacctgaaggcaatgaagatggcaggattgatcaaaaggggctggtgctgagatgttgtatcatgtaattcaggtgagaatcaaagaataataatgtaaatagttatattcaatagataatcccttttgtgggttaacacatttataaatgtaattatggaccatttgcttatgtaacatggagcaattaaagagcgactacgtatccttgaaaatttacagtcaatgatgttgaaactgattttacagcggtttctaatttggaagtgtatatgtattcatctgtgtaggtgtgaaccgtatgcacactttgatcctaatattgtgggataacaaaaaaaaaaaaaaaaaa

SEQ ID NO: 6362 - DNA, 762 bp, Glycine max
aaaaaagggttctaaggttgatttggagtgggggggtttaatttgttggggctcccctagtagttggaatagtccagagtgttagagttctggtattaaattggtttaagccctatcgataagtattggttgagccttagtatgtcgttttgaaccaaacgacagttgcgtcagaactacgctgaagaatatcatcaccatcaaagtgtttcgttggaaggggaatttggcagatcattggaagaaaatggcgggtggtggaaaggtttcgttcaaagtcacactcacctccgatccaaaattacccttcaaagtgtttagcgttccagaggctgcgccttttactgccgttctcaaattcgccgccgaagaattcaaagtcccgccccagaccagcgctatcatcaccaatgatggtgttggcataaatccccagcagagcgcaggcaatgtcttccttaaacatggttcagaattgcgcctgattccgcgcgatagggttggtgccttttagatgttacagatgtgtctgactggagttggtgccttttagatgttacagatgtctgactggatattgacccttctcgctagatacatgaactgtagcttcatatgtagtaatcaataaataccattgttactgatttcatatattgatattgagatcaaaggtgtcttcaagcgataaagtttttttcttttttcaataatgatataaatgttttgggaaaaattatgtgaactgctatagtcctgtca

SEQ ID NO: 6363 - DNA, 1588 bp, Glycine max
  misc_feature (1)..(1): n is a, c, g, or t
natttccgaagaagatgtcccaaaaaaaaaactccaaacccctaatccctctttgaaagtgccacgacggatttgatagtggttttaaaccctagctagggttttagtgtactagagatacaaaacgagaacgacgagtgacttatacagatcaaggatgagtttggtagcgggttcatacgagaaattcatctggggcttcacccttcgctccaattcccaaaccctaaaccctcttttttcttacccttcccatctctcctccatcaagtccgtcgccgtctccggccccgtcgtggcctccggcggcgaggacgacaccatccagctttatgacctcgccgccgccgcctccctcggctccctccacacccactcagccaccgtcaccgccctctccttctacgcccctccccacctccccttcccccgcaacctcgtctccgccgacgccagcggcaacctctccatcttcgacgccgacggcttcgtccacctcacgacgctctccgtccaccgcaattccgccatcaatgacctcgccctccacccctccggcgagcgggccctcactgtcggccgcgacgagtgcctcgccgtggtgaacctcgtccgggggcgccggaactgctgcctgcgcctaggcaaggaggcgagtctggtcaagtttgatgcctctggggatcagttcttcatggcggtgaaggagaaggtctccgtccaccagaccgaggatgcgaggattctgttcgaattggaatgcccaaagcctgttctctgtgctacacctgctaagaatggacttctttatactggtggggaggaccgaaatatcacagcatgggacattaagactggaaaaattgcatattgcttggaagaagcacatactgcccgtgtgaaaggtattgttgcactcacagagagtgatggtgctacaggggatgatgacccttacctagtggcatctgcgtcatctgatggcattatacgagtctgggatgttcgaatggctgctagagagaagccactaactgaacataacacgcggtcaagactgacgtgccttgctggatcatctttgaaattcaaacgacaacgaccccaggatggaaaaagtaaatcgaaggtggtcaaacaacagcgtgccctgtctggaaagagtaaatcaaaggtagaggatcaaacaattgaagtttaatagctttctagatggcattcttgagaaaaccattttgcttattgacaaaagtggttttgacaccctttggaggccttgactaacttcccattgtgttgagaaatcaattcgattgctggtttgaccaagttgattctatccatcagttgcaggattatgatactgataaccctccctatcccttgctcccctcattacacccaactactatatgttgctgtgagtctttatcgtgttgttaccctcgcaaattttgtccatacttcagtttggcatgtggcctatttttgaacaagtattataaaagtttgaaacaggaaaagttcatgcacttataatttttcatctatacaatatcttattctcgtttggtccaaaaaaaaaaaa

SEQ ID NO: 6364 - DNA, 1581 bp, Glycine max
aaaaatccgctacgtaggccccccccccggagtgatacaaaacgagaacgaggagcgagtgagtgactaatacagaccaaggatgagtttggtagcgggctcatacgagaaattcatctggggcttcaccctccgctcccaatcccaaaccctaacccctctgttttcttatccttcccacctctcctccatcaaatccgtcgccatctccggtcccgtcgttgcctccggcggcgaggacgacaccatccagctctacgacctcgccgccgccgcctccctcggctccctccacacccactctgccaccgttaccgccctctccttctacgcccctccccacctccccttcccccgcaacctcgtctccgccgacgccgccggcaacgtctccatcttcgacgccgatggcttcgtccacctcacgaccatctccgtccaccgcaacgccgccatcaacgaccttgccctccacccctccggccagcgcgccctcaccgtcgcccgtgacgattgcctcgccgtcgtcaatctcgtcagagggcgccggaactgctgtctgcgcctcggcaaggaggcaagtttggtaaagtttgatgccactggggatcagttcttcatggtggtgaaggagaaggtctccgtccaccagaccgaggatgcgaggattctgttcgaatttgaatgccccaagcctgttctctgtgctacacctgctaagaatggacttctttatactggtggggaggaccgaaatatcacggcatgggacattaagactggaaaagttgcatattgcttggaagaagcacatactgcccgtgtgaaaggtattgttgcgctcacagatagtgatggtgctacaggggatgataacccttacctagtggcatctgcatcatctgatggaattatacgagtctgggatgttcgaatggctgctagagagaagccactaactgaacataacacacggtcaagactgacatgccttgctggatcatctttgaaattcaaacgaccccaggatggaaagagttaaccaaaggtggtcaaacaacaatgtgcctagtctggaaagagtatatcaaaggtagaggatcaaacagttgaaggttaatagctttctggatggcacacttgagaaaatcattttgcttattgacaaaagtggttttgacaccttttggagggcttgactaacatcccattgtgttgagaaatcgattcaattgctggatgagccaagttgattctattgtcagttgcaggattatgatactgatacgctccccatcctttgctcccctcgttacatccaatgttggtattgagtcatttttatgttgttaccctcacaaattttgttcatacttcagtctggcatatgacctatttttgaacaagtattctgagttgaaacaggaaatggtcatgtacttataatttttcatctataaaatatgatactctcgtttggtcaaaaaaaaaaaaaaaaaagagattccatttcatgtggaaatcacattaatttattaagagagtttgccactgtttaagtaggcctttgacctaaaaccc

SEQ ID NO: 6365 - DNA, 1379 bp, Glycine max
tacggagaagacgacagaaggggctctacaattgattcgatgctctaatctatctctttttcttcttatttaaaatttcatcttcaattcaattctctttctgtcaccgttcctcattcgcatggagaacgacactgccgccgccgttaacaataacaccaccgccaccgccaccgctaaagcaggttctggaggagtgaaatcgaacaaccataacctagaagaggagcattccaatttgaatggcgaggagcacatggcagaacaagtggaggcagaagaagaggaagatcgagaagccgatgatggtgaaggagaacaaactggatctcgtcaaccttccagaacccctttcactaatctcagccaggtcgatgctgacctcgctctcgctcgaacccttcaggaacaggaaagggcatatatgatgctgagaatgaataatgaaggaagtgattatggaagttgggaaggcggaagctatttgcatgatgaaggagatgattttgatgatctacatgatggcactgatgtggatgaggatgaagatgatgatgatgatgaagatgatgatgatgaggaggatgaggatgaagatgcatttgatgtccatgctcatgctagtgctggagaacatgataatcccactattgaatttgacccagatgtattttcaagtgatgaagcatatgcaagagcattacaagaagctgaagagagggaaatggcagctagactattggcttttgctgggataaatgatcgggaagaagaggacatagaggagcatggtgctaattctcaggatgcttgggaggatgttgatccagatgaactttcatatgaggaattactggccttgggtgaagcagttggaactgagagcagaggtctttcaactgatactattgcctgtttgccttcagtcaactacaagactgggagtgatcaacatggaagcaatgattcgtgtgtcatttgccgggtggactatgaggatgatgagtccttgacagttctttcctgcaaacatctgtaccatcctgagtgcattaacaattggttgaaaataaacaaggtttgcccagtttgtagtactgaggtatctgcttctgggagcaacttgtaggaggatttaatagatgttttcacttcaaattgaagaaaatttatgctaagttgggggctaatatcccttgttctaatagcatttccacattagggagatagtctgtgctattgtttccagctccttcattttaagtgtaacatgtaacttttggaacctgctctctagattgtctttattttaatggaaaatgaatggcatttaagtggccagttctttaacagggtccgaggggatgacccttgtgatg

SEQ ID NO: 6366 - DNA, 1723 bp, Glycine max
  misc_feature (1697)..(1697): n is a, c, g, or t
actctctcacacaacaacaactagctgcaaagctttttgtgttctgcaactgaaagtgaaggaaaagaagcagaaaccaaatcatgtgttctctactttggagttccattgcattgtgtgtagctttcctactccttgagcttggcgttgtgcacccttcaccctcacaccataggatcactcgcttgccgggtcaaccccatgttcagtttcatcagttttcaggttatgtaaccgttgatgacaaaaaccagcgtgcactttttttctactttgctgaagccgaaaaagatgcactttccaagccccttgttctgtggctcaatggagggcctggttgttcttctcttggagttggtgcattttcagagaatggaccatttaggcccaaaggtaagggcttggttagaaaccaattcagctggaacagagaagcgaatatgctctatttggaaacgccaattggagttggattctcttactcaactgatacttcctcttatgagggtgtgaatgacaaaattacggccagggataacttggtgttcttgcaaagctggtttataaagttcccagaatacagaaaccgaagtttgttcattgtaggagaaagctatgcaggtcattatgttcctcagctggctgaacttatgctccaattcaacaaaaaggagaagttattcaatttaaaaggcattgctcttggtaatccagttctagaatttgcaacagatttcaattcgagagctgagttcttctggtcacatggattaatttcagatacaacgtacaaaatgttcacttctgtttgtaactattcaacatatgtgagggaatactataatggtgctgtttctcctatctgttcaagtgttatgagccaagttactacggaaacaagtagatttgttgacaaatatgatgtgacccttgatgtttgtttatcttcagtgttctcacaaaccaaagtcctcaatccccagcaagtaactgaaaccatagatgtatgtgtggaagatgaaacagtcaattatctgaacaggaaagatgtgcagtcagctatgcatgcacatcttgttggagttcaaagatggtctgcttgcagcaatgtcctggattatgagctgcgtgacttggagataccaacaatcacggttgtggggaagctagtcaaggagggaataccagtattggtttacagtggtgatcaggattcagttatcccactgactggaagtagaacactagtacataaattggcaaaagaacttggattgaacaccactgtgccatacagggtgtggtttgagaagcagcaggtgggtgggtggactcaagtttatggtaacatcctttcatttgccaccatcagaggagcatcacatgaagctccattttcacagcctgagagatcacttgtgctgttcaagtccttcttagaaggaggaccactaccacaagagttttgatatgcatatatatgtcggttgtgtcgataaaatgtgatttttggattgtagtttaattcgtttcactgttaatcaatggtgcccaatttcaagtgtagaaaattttgtaaagttctcaagtaagaagggagggaatttgttgtattttttttttttgtcagtgccttgtttacttttactatttataaagctgcattatgtaactagacgtaactgtctgctcttaantatgttaatcggtaacttagtggaat

SEQ ID NO: 6367 - DNA, 701 bp, Glycine max
acacagcactttgtctctagaaaataaatttccaaacagagaaggggcaacacaaaaatgaagaagggtctctcctttgtgctgctgctgatccttgtgatcatccactacaaggtagtcaacgccaacaacaacaactgtgttacagaggattgcctcattggtcatagtttggagtcagagttctcgtttggctcccatgtggcaagaatgctctatgatgtgagccaatctgtgtctggccaaacagggaatagcaacaatgctgctgttaattgtccagaaagcaatggttatcgtagctgcttgccatctcaaaacggtggtggccctaaccaaaattgcggtgattacaccaggacttgctaagaaatatattaccagcaggtatttcatttctgatttcaaggttgtcatattattgagattgtcataatctgaagatgcgtgtaataattgttgctgtcggttcatacttgtgttgtggatgtattattgtgtatcacatgtagtcttggttattaaatgttgataagaatagtattccattcgagatggaaaagtttgtgagaaatatattaccagcaggtatttctggaattttgttttctacacagtgaaattccagctgttattatcagttatgagattgtggcacataaaataaaatttgtgtattatataccgttttttctaaaaaa

SEQ ID NO: 6368 - DNA, 1302 bp, Glycine max
agctaagccaacaacacatcattaaccaaaaaaagatcatcaaaattaaaagaagcaagcatgggggaatccaatgtcatgaccaagactgaggatggtgcttgtctgtctgcaatgctgcttagtactaatctagtgtaccctgcagtactgaatgctgctattgagctcaacttgtttgagatcattgctaaggcaacaccagctggttcttttatgtcatcccatgaaattgcttctaagctcccaacacaacaccctgacctgcctaataggcttgaccgcatgctgcgtttgcttgctagttattctgttcttactacttccactcgcaccacacaccatggtgccactgaaacagtttatggactctcacaagttggacaatactttgtccctgacggaactaggggctacttggcttcattcacagcatttgtctgttatccaccactcttacaagtttggctgaacttcaaggaagccgtggttgatgcagacattgacttgttcaagaaaattcatggagtaacaatgtaccagtacatggaaaacgatccaaaaatgaaccaaatctttaacaagtcaatggccaacttgtgtgcaacagagatgagtagaatacttgaaatatacactggatttgagggaatatcaacattggttgacgtaggaggtggcaatggacaaaatctaaaaatgataatctccaaataccctttaattaaaggaattaactttgatcttccccaagtgattgaaaatgcaccaccccttccagggattgagcatgttggaggcgatatgtttgcaagagttccacagggtgacgccataatactgaaggctgtataccacaattggtcagacgaaaaatgcatagaatttctgaggaattgtcacaaagcattgtctccaaatgggaaggtgattgtggtggagttcatattgccagaagaacccgaaccaactgaagaatcccagcttgtttccactcttgacaacctcatgtttatcactgttggtggaagggaaagaactcagaaacaatatgagactttgtgtaagctctctggattttcaaattttcaagttgcttgtcgtgccttctctagtctgggagtgatggaattttacaaatagcttagaattttaagataaaagtattaagagcaaactgataataaagaccttcatctgagctctaggtcaccactttcttgttgtactttccactttcatgtgatgtaacgtttatgcatattaaaataaattgattttggtctaaaaaaaaaaaaaaaa

SEQ ID NO: 6369 - DNA, 905 bp, Glycine max
tcagctacgtaggccccccccccctttttttctttcaaatatttccctcacatttctttatcaaaaaaattgaaatatggagagttcttttacgagatctgatctttcacccgtgaaaatcttatctttttgcaggaacttggtataggaaccaccaacacgaagaattgtcactaaatatgctcgactttttgcaggcttaaatattctctaaccatttgatatcaggctgaattaattggcaccactacctacgctttgtttgaactgttatatcggctgacctgggaggtaaacgtgaataaaatagaatagaattgttgtcgaaaggaaagctcgtggatggtgctagacaagttgattgacatcgttgtaccaaatcaaagaccatgtctgggatgcttccgggagttgaatgtgctcgaaggagacgcttgcataacagtgctggtgatgattccaccagcaaccgctctttctgtttgtatactaccaggaacctccaatcctcttcctctttactggaaagaagcatgttaaatcgggcatacccagatgaaaatctcggaggagcggcacgcgaagccaaacggagacttgatcagaagttcatggcacatatcaaatcagaaagccacaaaagaaaaggcctttttcatggtttgtggcgccaactcagatcttagtcttagggaatctagaagaagatcaaaatgataaatcctagaacagtaactggccttttattcttttttcttgttctgtaacgaaattatttattttcattagtcaaaagaaacagagatatgtgaaaactaaacatcctttgatctttttgtcgattgaggaccaaatcaagtttgatccgtccaaatgcttggaaaaaaaatgaatcctattgtcca

SEQ ID NO: 6370 - DNA, 1499 bp, Glycine max
cccacgcgtccctatttgattacacctccgcactctctctatcaccaatcccttatatcccccctccacttagctgaacataattcaccacttcaccatcaatttcccctccaatttcccatttatgatccatttggcatttcatcatatttcaccacttgtcctactccacttggatgatttcctaacgtattgttttcacaaatccttgttcttcatcagctaatagtttgagtccaacgaattcagcaacactatagatatatgctatatcttcctttccctatacattttccttccaaagtatctctagttctctacaaatcaacgtggcacattttttagcctaagaaaagctttagctgcaactcaaattcaaagtgtaagcctttcttgtttttattagtttatcttcaccaatggaagagaactttaagtgtgaacaagttggtctcattgatgagctaatgcaagggaaggagctagcaaagcagctctgtgaccatcttctagtctcatcatcatcatcatcatcttctcatgaaacaaatgaagtcctaattgagaaaatactttccacctatgagaaagcacttgccatgctgaattgcaaggctgatgtaggagaaagtaaggccaagaatggcagcatgatggattcccattgtcctctcacaaatggtagccccaaaagtgaggtcttggagcctgaggttaagaacaaaaatgtctttaagaaaagaaagaccatgtcaaagttgacagaacaagtgaaggtgcgcttgggaacagcacatgaaggatccctggatgatggctatagctggagaaaatatggacagaaggacattcttggagctaagtttccaagaggatattacagatgcacgtatagaaatgtacaaggatgtctggccacaaagcaggtgcagaagtcagatgaagacccaatgatatgtgagataacctacaaaggaaggcacacatgcagccaagcaggtcacttaaacaagacagtggcacccccatcaaagagaaaggtgaattttttgggagcaaataagcaccaaacccatcaaattaagaatcaaatacagcaagagaaaatagaacaaccaccagagacatttttcacttttggatcctcaggccttgaagttaaaatagaggacatggaccacaaggaggacatgttcccatcattttgcttttcttctccattaaaagaagggtcagaaaatggggacaacaacagccttttctcatataccatgatggagaacaacttaatggaaaacttctctcctacattcatatctccaacaagttcagatatagaatcaaacattttctaccactgggggagcactggaataggccaaagtgtgcaaagctcagagtctgatatcactgatatagtttcagcaccaacttcagtcaccaattctccaataatggaccttgatttcttcgataagatcgatttcgacacagatttc

SEQ ID NO: 6371 - DNA, 593 bp, Glycine max
  misc_feature (551)..(551): n is a, c, g, or t
  misc_feature (568)..(568): n is a, c, g, or t
gctgcgagaagacgacagaagggccacaatacaacttcagtttcaacaacaatctctcttttttccattctcatgcctcttgtcttcttgtaacacacccttttctcttttctctctaactcccctccaagaaattctgagagaatagaatagaaaagagggtgagtggttttttgagttttgatagaatagctgcatggggaagctggttgagattcttgaccaaggggtcaggattgctgcaaggtttcactctaattgcccccaaacaggccgtaagtactaccaccctccatccctctccgacaaccacggccaccactaccatggtggtgccaacacaagcagcggcctagtcaaagaggctgtggcggcgaggagccttgacgtaattctttattctgtttgacagaaccatatttgttttttttttggttgttcgattcaatcattgtaaggcgattcatacatgtattttcgagctcaagttgatacccggttaaaatattacaaacacttttctacgttacacttgttgattttaattccgnatcaaaaacattaatcnaactttcctaaaaaaaaaaaaaaaa

SEQ ID NO: 6372 - DNA, 3244 bp, Glycine max
cagaaacagtattataagtggattttggaacgtaattttcacaatttgaacaaaggagttcgtgggaatcaggtttctcttttaaatattgtggtggaattaaagaagtgctgcaaccatcccttcttgtttgaaagtgctgaccatggctatggtggggactcaggaagtagtgacaacagtaaactagagagaattgtttttagcagtggcaagcttgtcatacttgacaagctccttgttaaattgcatgaaaccaagcatcgtgttctgattttctctcagatggttaggatgttagatatactgggagagtatatgtcccttcgagggtttcaatttcagaggcttgatggcagtacaaaagctgagcttcgacaacaagcaatggatcatttcaatgcacctggtagtgatgatttttgcttccttctttcaacacgggcaggaggtctgggtatcaaccttgctacagcagacactgttataatatttgattctgattggaatcctcaaaatgacctgcaggcaatgagtagagctcatagaattggacaacaagaagttgttaacatatatagatttgttacaagcaaaagtgttgaggaagatattctggaacgtgctaagaagaaaatggttctggaccacttggtgattcaaaaactaaatgcagagggtagactggagaagaaagaagccaaaaaaggaggaagttattttgacaaaaatgagctgtctgcaatcttacgatttggagcagaggagctctttaaggaagaaagaaatgatgaagaaagcaagaaacaactcttaagtatgaatatagatgagattcttgaaagagcagagaaggttgaagagaaggaaactgacggggaacaaggaaatgagttattaggtgcttttaaggttgccaatttttgcaatgatgaagatgatggaagtttctggagccgttggataaagcctgatgctgtattccaagcagaggaagctcttgctcctcgatcggctagaaatattaaaagctatgcagaggttgatccatctgaaagaagtaataaaagaaaaaagaaggaaccgctcccgcctgaccgagttccgaaacgccggaaagcagagtattccgctcctgcagtaccaatgattgagggagcatctgtccaagtgagaaattggtcatatgggaatttatctaaaagagacgcacttcgtttttctcgttcagttttgaaatatggcaatgagagccaagttgacttaattgttgccgaggttggtggtgctgttggggctgctccacctggagtacagattgaacttttcaatgctcttattgatggctgtacagaagcagtagaacttggaaatcttgatgcaaaggggcctttgctggatttttttggtgtaccagtgaaggcaaatgatctacttacccgtgtccaacaacttcaacttttggcaaagcgcattggtcgatatgaagatcctattgcacaatttcgtgtgctgtcatatctcaaaccatcaaactggtccaaaggttgtggatggaatcaaattgatgatgctagattgcttcttggaatacattaccatgggtttggtaattgggaaacgattagattcgatgaaagacttggccttatgaaaaaaattgctcctgtagaacttcaacaccatgaaactttcttgccacgagctccaaatttgaaagaccgtgctaatgcccttttggagcaagaacttgctgttcttggtgtgaaaaatgccaacagcagagttggacggaagccttccaagaaagagagagaaaatatgattaatttatcactgttacgtgggcaggagaaaaagaaaaaatcgagttctgttaatgtccaaatgagaaaggatagatttcagaaaccccagaaggttgaatctatagtaaaggaagagggtgaaatgtctgacaatgaggaagtatatgagcagtttaaggaggtaaaatggatggaatggtgtcaagatgtgatggttgaagaaatgaaaactttgaaacgtcttcacaggttgcagcaaactagtgccaatcttccaaaggaaaaggtgctttcgaaaatacgcaactatttacaacttcttgggagaaggatagatcaaattgtgttagaacatgaacaggaaccctataagcaagatagaatgaccgtgcgactgtggaaatatgtctccactttttcccatctttcaggggagaggcttcatcaaatatattccaaacttagacaggagcaagatgaggcagaggttggcccctctcacacaaatggatcggtatctgtttcatttagcagaaatggaaatccattccgtttccatatggagaggcaaagaggattaaaaaatatggctacctatcaaatgccagaaccagttgataatactgggaaatccgaggcatggaaacgaagaagaagaactgaaagtgacaatcacttccagggtcagccaccacctcaaaggaccgttagtaatggagtccggattgctgatcctaactcactcgggatcctaggtgctgggccgtcggacaaacgctttgctagtgagaaaccttataggacacaacctggtggttttccttcaagacaaggcttctcttcaggtataaagtaaccagcttggtgggattagagaggctgattacaagagtgttggctttcactctgcatttatacagcttcagctattgtacattctgtggaatttttttcttccacccatgcgaataagaccttgtgggatcccttttgggtgtgttttggcggatatgaggaatatccctacactgggattcgcatccttgaagatggctgaagccaaaaagatctaatgcaagatgaaaaattagtcttgccaattgtttctttttcctttttgatttctactccttcgaagatgaccaagcaaagtgacatggcgaacatcttgaaaagtgaagagttttacccaattctatagagacatacttaggaaactgtacattgtcaattctgcaatttattggattttactactcacttcataaagtattatgttagctgatgtagacaaaaatgtatttgatttttgtggtaattatagctttaatttccgagattttgtagctccttcaagtgagtttccttggtgaatagtgaatgaaaagtgatttctcggcttctggcctaaagtttctttccaaaaaaaaaaaaaa

SEQ ID NO: 6373 - DNA, 1591 bp, Glycine max
aaaggggtccgagtcagctacgtaggccccccccccgagaagagacttggcgaaactctggcacccactcgcagtggagagagagtgttagcaccaaaaatgtcgaagttaatcttcgtgttccttgcactaattcctcttctctgcacctccttctcgccagagaaaccctcagatcggcgcatcctcgttttgctcgatgacttcgccatcaaatcctctcactctctcttcttcaactccctcaaatctcgcggcttcgatctccaattccacctcgccgacgaccccaaaattgcgctccagagatacggccagtacctctacgacgccctaattctcttttcccccaccattgaacgttttggaggatccattgacgcggctgcaattttggattttgttgattcgggtcatgatttgatcgttgctgctgatagcaatgcatctgatttaatcagggaaatagccaccgagtgtggagtggactttgatgaggatcctgctgctgtggttgtggatcattcggcatatgcagtctctgctactgaaggagatcatacattgattgctagtgatgattttatcaagtctgacgtcatatttggaagcaaaaaaattgaggctccagtacttttccaggggattgggcattcactaaatcctaccaatagcctggtgttgaaagttctctctgcatctccttcagccttttctgctaacccaaaatctaaagtgacaagtcctccatcactcactggaacttcaatctcattagtttcaattatacaggcaagaaataatgcccggatattgatctctggctcattgagcttgttcagcaaccgatttttcaggtcaggtgtgcagaaggctgggagtccaaccaaacatgagaagtcaggtaatgagcagttcttgaatgaacttagcaaatggattttccatgaacgaggtcacctcaaggcggtgaatgtgcaacaccacaaagttggggaagctaatgaaccagccatctatcggatcaatgataatttggaatactctgttgaagtttatgagtggtctgggacagcatgggaaccttacgtagctgatgatgttcaagtgcaattttacatgatgagcccctatgtcttgaagactttatcaactgatggcaagggccgttatttcacatcatttaaggttccagatgtctatggggttttccaattcaaagttgagtacgaaaaacttggatatacaagcttatctttatcaaagcagattcctgttcgtccctttagacacaatgaatatgaaagatttataccagcagcctatccctattatggagcatcattttcaatgatggtgggtttcttcatcttcactgcagttcatctatacagcaagtagatgtaaacctttgctttaagatactgtagtttgtagtgcggggttgaacttattttgagatcgaaaattttgatttggcaatgatactaactgacgtttctaatttattatagatgcattactttttccctttttacccctcgttaaaaaaaataaaaaggcccgctcttgtggttcctggcttgcgtac

SEQ ID NO: 6374 - DNA, 1577 bp, Glycine max
acggctcgaggcgaaactctggtattgactcacagtagagagagtgttggtacgaaaaatgtcgaagctgatcttcgtgttcctttcgcttattcctcttctctgcacctccttctccccagagagaccctcagatcgacgcgtcctcgttttgctcgatgacttcgccatcaaatcctctcattctctcttcttcaactccctcaaatctcgcggcttcgatctccaattccacctcgcagacgaccccaaaattgcgctccagagatacggccagtacctctacgacgccctaattctcttttcccccaccattgaacgttttggaggatccattgacgcggctgcaattttggattttgttgattcgggtcatgatttgatcgttgctgctgatagcaatgcatctgatttaatcagggaaatcgccaccgagtgtggagtggactttgatgaggatcctgctgctgtggttgtggatcattcaggatatgcagtctcggctactgaaggagatcatacattgattgctagtgatgattttatcaagtctgacgtgatattgggaagcaaaaaaattgaggctcctgtacttttccaggggattgggcattcactaaatcctaccaatagcctggtgttgaaagttctctctgcatctccttcagccttttctgctaacccaaaatctaaattgacaagtcctccatcactcactggaacttcgatctcattagtttcagttatacaggcaagaaataatgcccggatattgatctctggctccttgagtttgttcagcaaccgatttttcacgtcaggtgtgcagaaggctgggagtccaactaaacacgagaagtctggtaatgagcagttcttgaatgaacttagcaaatggattttccatgaaagaggtcacctcaaggcggtgcatgtgcaacaccacaaagttggggaagctaatgaaccagccatctataggatcaatgataatttggaatactctgttgaagtttatgagtggtctgggacaacatgggaaccttatgtagctgatgatgttcaagtgcaattttacatgatgagcccctatgtcttgaagactttatcaactgacggcaagggccattatttcacatcatttaaggttccagatgtctatggggttttccaattcaaagttgagtacgaaaaacttggatatacaagcttatctttatcaaagcagattcctgttcgtccctttagacacaatgaatatgaaagatttataccagcagcttatccctattatggagcagcattttcaatgatggcaggcttcttcatcttcaccgcagttcatctatacagcaagtagatgtaaacctttgctttaaaatactgtagtctgtagtacggggttttggacttattttgagataaaaaattttgattaggcaatgatattaactgatgtttctaatttattatagatgcattacttttctccccgcgtcaaaaaaaaaaaaaaaatactcgactcttgctttacggtaagcatcatagcttagcatttcatggtgctggtgatattt

SEQ ID NO: 6375 - DNA, 1331 bp, Glycine max
atttctttcacttcccttcaattttccaacgcaaaagttccttcaagctcagagcaaggttaaagttattgcatggattgggttggtggctttaattctgcacattggaatgctctggttcttaatttatgtgttagattttggcttagctggtgcagctttggcatttgatatcacgagttgggggatcacagtggctcaacttgtttatgttgtgatctggtgtaaggatggatggaatggattgtcatggctggcttttaaagatatttgggcctttgttaggctctctcttgcatcagctgtaatgctttgccttgaagtttggtatatgatgagcgttatagttcttgctggccaccttgataatgcattggttgctgttgattccctctctatatgcatgaatatcaatgggtgggaagccatgctcttcattggagtaaatgcagctgtcagtgtcagagtttccaatgaacttgggcttggacatccaagagctgccaagtactctgtctatgtgatagtctttcagtcacttttcttgggaatctttttcatggctattattttggcgactagagattattatgccattatttttacaaacagtgaggttttgcataaggccgttgcgaaactaggatacctcctttctgtgacaatggttctaaacagtgttcaaccagtggtttcaggtgttgctattggaggtgggtggcaagccctggtggcctacatcaacataggttgttattacttatttgggcttccactggggttcgttcttggttatacagcaaatttgggggttgagggactttggggtggtatgatatgtggaattgttctccagaccttgctgctcttgttgatactttacaaaaccaattggaagaaagaggtggaacaaacagctgaacgcatgcggatatggagtggacaagacattggagttgataagatagtggcttctgcataatcttgtatatcttccacctccactcgagtcaagttctcaaagtctttttttcatgtgttcctagtctgtccattttacatgtaatgttgctctcttccaattaggtacagaacatagtttagctgtggtgtctgatgagatggtgaagataaaaaaacttcgttatttttccaatttagttttcattttttagttattgaatatctcagtgaaaaatgaaaaacatcaatcttttcttttactttggcctagagatgagttgatatatctctatgcaggactagattagttaataaaaattatttatagcaaaaaaaaaaaaaaaaggggcggcggccgactactgagc

SEQ ID NO: 6376 - DNA, 1516 bp, Glycine max
gagagaagagaggagaaagcaatgggcattgatagtgaatacgtgatatctcacaaggcctatgcgagggtgggattgcttgggaacccgagcgatgtctactacggcaaaacgatagcgttaagcgtcgccaacttcttcgccaccgtcacgctgcgtccctccgaccagttaatcctccaaccccaccccctccacgatctccttcatttctcatcgctccctcaattggtcaacaggttgagctcccaaggttactatggaggcgtgcgattgcttatggctatttgcaatgtcttctacgcgtattgcagagagaacgccatcgatcttggcgacgacaatttcactctctcctacgacaccaatatccctcgccaggctggtctttcgggttctagcgggatcgtgtgtgctgcgttgaactgtttgttggatttctacaacgtcaggcatctggtcaaggtggaggtcaggcctaacctcatcctcgctgccgagaaagaactcgggattgtggccggtcttcaggatcgggtcgcacaagtttacggtggccttgtttacatggactttagcaaggaaaacatgaatgagctgggccatggagtttatgtaccagtggatttgagtctcctccctcctctgtatctcatctatgcggaaaatcctagtgattctggcaaggttcatagtaaagtacggcagaggtggcttgatggtgatgagttcattgtgtcttccatgcttgaaattgctaatatcgcccaagaaggaaagactgcattagaagaaaaggactactccaaatttgcagctctcatgaatcgaaattttgacctgcgaaggttaatgtttggagatgatgccctcggtgatttgaacctaaaaatggtagaggttgccagaaaggttggagctgcgtcaaaatttaccggtagcggaggagctgttgttgcattttgtcctgaggggacttctcaagtgaagcttctcgaggacgaatgtcaaaaagaaggatttgtgatactacctattgaacctcttccttctcgtctaaatgaaattgacttgaaaaccttgcaaataaagtaatctatattgagggtttgaaaaatagttctcaacaaaataaaaatttccatttactcaagaacgcgggtttaaagctggtgggagttggcatactcaaagcgcaatgtaagtttgttccgtttcgttgagagaggatcaaactttgaagttgcttttgatgagggtggatctgagagtttggtttgtggtatattgcttttggggtgtttctaataccgtatatgagacgtacatgttaccttcgtatcacttgtctggtcaatttcgtaaatcttgtgcgcaagttggttacgcggaataagaattgtttttacctatcaaaaggaaaattcaatctgccatttgttttttgcgaaaaacaaaattatggattgaatttgttaaataaaagctgcattttaatgtaaaaaaaaaaaaaaaa

SEQ ID NO: 6377 - DNA, 747 bp, Glycine max
attaataaatttagttaacacaataagattgatttgacaacttgtttctatttccacttatctcattttggttatcgtagaaatccgcggtggaggcagatcacatagatggaggcacagtctcagagcaacaatcctaaccctaaccctaaccctcatcggaataattcggtagcgtcatcgatgccgctgtggccaacgatcgacggcccattgggcctgtcggaggaagagtcagtgggctacgctcgcaggttctacacgttcggcttcgctcttctccctctcctttgggccgtcaattgcttctacttctggcccgtccttcgccactcccactccttccctcgcattcgcccctatgttgttggatctgcaattgggtttgcagtatgtgcgacacttctcagttcttggagtctaacatttgccattggaggggaacgcctcttcggccctgtttgggatcaattggttatgtacaatcttgctgataggttaggcttaacaggttggagctagttgtgtggcacctctgatacaaatattttgatcttttattaccacacttaccttcttccctgttttttgaatgcatctgcattacctttacattttactatattctatcatggaactagtagtgaattttatcttgctgccaccagttgatagataacatagcaatgttttggccgaggaaaaaaaaaaagaaagaaatagcataatatataaaaaaaaaaaaaa

SEQ ID NO: 6378 - DNA, 915 bp, Glycine max
gcacgatgagccaatcagtttgagagtcccttatccaaacaaataccctcttttcgtgccatttgattttccgtcgttcaaaatcccttccaatccacagatcaacatttttttttttggtgggtagcagtgaggataaaaaatggctatggccacagctgtcgtgtgtcctcagaacatcaccggagccatcgtgagctcacctagcaagaccaagaagagagtggtacacgtgagaggcataaattcatttgggggactgaaggctagcaatggtgttgtctctttggggattcctatgagcactgagaagtgctttgctaaggttgtgagctcagtgaaagcagctacatcaaatgggaaaggaaaaggaggggctctttcttccacgtgcaacgctgctggtgagatattcacgattgctgctatcatcaatggacttgttcttgtcggggttgctgttggctttgtgctcttgcgagttgaagcatgggtcgaggagtccgaggcagagtgaaaattcaatcagataagcaagcaattaattaatatccagaatagttgtatgttcctatattgatgatgtggctgttcttgttttcgttatgacttgtatatttatttgtcaagtttcatcattttcctatttcattcgcaattggatctctcgtcaataatctgccaatcctaaacttctgcattgaacctggaagtcacagcctctgactgttctaatatctctccaacgagaaatcatttgtaattcttgcaaaaccagcaagtcagtaactatgagaaagaggtatatatcaaatttacttttgaaattacagacacgtcagtttaaatgttattacaaaatgcatttaattttaaagttgttaaatattttttttcaaaaaaaaaaataaaaaa

SEQ ID NO: 6379 - DNA, 1285 bp, Glycine max
tttttttttttttttttttttttttttttttttttttttttttggttctctaacacatacactggaaatcaactagaggagggagtgaatacaattttgtgttactccattaaaccacaattggtaacaatgacctttgaataagggcggttgaatcctctttctggtacaacaggtctctggtctcctattagcttggccaccctaaaatatggagatccggtgttctcttgtacggttttaactagaccgatcctctggacaagctccatccctcctattactcttccaattaccagagtcgatgcatccaattctggcgaatccttcgtagctatgacaaattctgtcccattgggatcatttcctacttcttcttcatcaatctccagcttccctggtttgggaataagcttcaactttggaggcgggattgaagggtttctcacaataatggctaaacttccgggcacatttttagtcccaggacatctctcatactccctttcccattcctcaccaagtctaccagctcccaagttgctacctgtcttcgaagcaagttcaacatccaccccataggatctcaggccgccatgttggacgtaattgggcattattttggccaactcctttcttctggagttaatgccagcagctccgctgcattcttactaacctgtcactcctgcaggaacatcatctccatagagccctatagtaatgcgaccaacaggttcgccgtcaatagatacgtctaagaatgcttgtttggtaggttttctttcagtgcagctgggagtggtagccacattctcttctggtttatcactacctgtgttagcaacatcttctgctaaagtcagattctcttctggttgatcactgttccttgtgttaccaacatcatcttctgccaaagtcaaatcctcttctggttgatcactgctgcttatgttagcagcatcttcttcagcaaaagccagattctcttctagttgatcaatgttacttgtgttaccaacgtcttcttctgctcttgctctggatccatccactgcctgagaacccaagagtagtagcaagcaagagttgctaaagattgtgagctctctacgtgagaatctgcattgctgtttgaggattggaaaagatggagaagtgggtattaattggaatggagaaagtgatgatgctgccgtgcgagttggaggattgaatggctgagcggaatatcgcaatactcttgggttttgcagcatttctgcgttgtggtacttggcac

SEQ ID NO: 6380 - DNA, 2126 bp, Glycine max
cacgcgtccgcttccctcccgcccccgtaagccgagtctagggtttctgcctttcaaaaactccgtttttgtgaacaactccaccaccgatttccaattccttcgtcccaatcaaattcacgaaatgggtaagaagaaacaaaagaacccgcaacaatcctccgaaaccgacgccgtttcaaccccttccagcattttcagcaaactcttcgccaacgcgccggaacagaccaccgcaaccgccgctgcctctctattttccgatgacaatccctttcgaagaaaatccgctccactttcttactcaacaaaccgcactcaaaaccctaacaatggcgaccaccccgtgaacaccgattccagcgaggagaagaagcggaagaggaccaaagacaaaacctcagccccagcccccgacaccgtttccgtaatcgaacctttggaggaaccggggaagaagaggaaacgcgattccgacgagggaaaagaccttagtgtgggtgcagaagcgatagggaagaggaaaaggaaaagggacgaagttgagaaagagtgggaggagaagaagtatggggctgtggaggaagggattgagaataaaaccgttgggattaagaggaagacgttggatgacccagctgatatgatggtttcaaaggagggttttgataacgaggataagctcttgaggactgttttcgttgggaatttgcccctcaaggtgaaaaagaagactcttttgaaggagtttaagaagtttggtgaggttgagtctgtgaggattcgttctgtccctatacaagataccaagaaaccctaggaagggagctatccttgcgaagaaaataaatgatgctgctgatagtgttcatgcgtacattgttttcaaaaccggccacgcggcccaggcttctttgtcacacatctggctataggttgaaggaaatcacattcgtgttgatagggcatgcccaccccgcaagaaacataaaggggagagcactccactttatgataataagagaactgtttttgtgggcaacctcccatttgatgtgaaggatgaagagctttacaagttattttgtggtatatccaacctggaatcaagtatagaagctatcagagttgttcgagatcctcatcttaatgttggaaagggtattgcttatgtgctatttaaaacaaaggaagctgctaaatttgttgttaagaaacggaacttgaagcttcgtgaccgagagttgagactctgtcatgccaaagcagatgctaccccgtctaaaaggccaaacccatcatcagcacatgctcctagtacccccgcaaaaaggccaaacccatcagcacatgctcctagtacccctgcaaagaagttttccgtggcttcacggtctccatcaagcagtaataacatgtcaaaatcaaacagaaaaaccaacacatcttatcagggtctacgtgcaaccaaatctgatgtgcacaagaaaatccaaggaggagaaaaaccaaaagaacgcaagacaaaaagaccttcagtagctgccagaaaggctaaagcaaacttggtcaagcagagtgatctaccaaaacaagcagggatgaaacgcaaggttgatagtcgtactccagacagcaccctacgtaataggaaagtaaaaaagaacaggtagcatgtttcttatgtaagggatttgttagctctggttagaatttggctctaatcgttgatagtgaaaatagtttgtcaacactggcatggttttaaggcaatgttctcagcagacttgaaggcacatttgacagcgaatggtgaagaattaagaaaaatcagtggatagggatacaatttactcatttaaaaggatttaacattatcgtttctcttcattttattttaaatttgttgtgtaattttagtttatagtatgctcttattggtaggttgcaacttccactattaggccttgttaaagcttgtagcatttcctgccttggaaaggagcattcgtcaattcttttctccttatctttttttcttatattgttttacacttcaatatgacaatgaattcaggtgaatttaattttatcattttatcatctgaatggattggtaggcagtg

SEQ ID NO: 6381 - DNA, 2689 bp, Glycine max
tatggatatatatatatatatatatatatcttagcttagctacaatggtcgtaatgtaaggcatattctctatctgttgatttatcaatttgacttacccacttttagttttcaattgaaaagcctaagataatatgaattatttgtcgattatatccttttcgtatcttacatatatattactatttaagaaataaaagtgaaaatgtttcataagacacatgatatttacgcagccaagtccatgaaaaaatttgatacaaaatttatgtattgatttgttaactaatgtactcgccataatgtttaaaaatatatatgtttgacgtttagagagttattttatatttatacaatcaatcaaagcagccaaacattgaatttgtaatattttttattttagaaaatcaaacattctcatccgttgaaacatatataatttcactgtcaaagcctaagaaaggcaaagaagaggcgcgggagcggagtgagtgagccagaaaaaaaggagaggaaagatatctaaatgcgtacggttgaggaggagccaacgaatcccgaactcaatctgtaggattccgacgcaatatttgaggaggatttactcgcgcgtgtgattctgcggctcgagattccctctgcagctctcaaaaccactaaccctaatagctgaactccaaagagataaaataacagcaagtggccctcatcaattctaagtatatatataaaatcattgccgccatcacttcttctccatactcttgtctcactctaacagccaaagcatggcttctctctcttgctccgccaacgaccttgccccactcttcaacgacaccgccgccgccaactacctctgcgcccaattcgattccatttctagaaagctcgacgaaacaacctacgccgtcgacaacacctaccttctgttttcagcgtatcttgtcttcgccatgcagctcggcttcgccatgctctgcgccggctccgtcagagccaaaaacaccatgaacatcatgctcaccaacgtcctcgacgccgccgccggcggtctctcctactacctattcggctttgcattcgccttcggcggcccctccaacggcttcatcggccgccacttcttcggcctacgagattacccgatgggctcctctccctccggcgactacagcttcttcctctaccagtgggccttcgccatcgccgccgcaggaatcaccagcggctccatcgccgagagaacacagttcgtggcttaccttatctactcttctttcttaaccggtttcgtttaccccatcgtttcgcattggttctggtcctcggacggttgggccagcgcgactcgtagccacggaaatgttttattcgggtctggagtcatcgacttcgcgggctcaggcgttgttcacatggttggcgggatagcgggcctgtggggggctttaattgaaggcccgagaatcggccggttcgaccgttcgggccggtcggttgctttacgtggccacagcgcgtctttagttgtgcttggtacgtttttgttatggttcggctggtacggcttcaaccctggttcgtttctgacaatagccaaggggtatgaaagtggagggtattatggtcaatggagcgctatagggaggacagctgtcacgacgacattggctgggagcactgcggctctgacgacgttgttcagcaagcggttattggctggccactggaacgtgattgacgtgtgtaacggcctgcttggcgggttcgctgcctgtacattcgggctgtgcccttgtggaaccgtgggccgcgtttgtgagtgggtaagtgacggagtggcatttgtactgggcttaattagccagccgcgaaggtatagtactatgatctgttggagcgcggcgcagtttcatggtgggtgcggagcgtgagggatctatgtcacgggattgtttgcgaagaaagagtacgtggaggagatttacggtggtggaaggccgttcggggctttgatgggtggcggagggaggctgctggcggcgcaggtgattcagatattggtggtgtgcgggtgggttacggcgaccatggcgccgttgttctatgggcttcataagatgaaactgttgagaatttcgagggatgatgagactgcggggatggatttgacgaggcatggtgggtttgcttatgcataccatgatgatgaagatggttcaagcaggggagtagggttcatgctgcgtagaattgagcctgctgctagtaccactccctctccccccgctgcaccacaagtttaatcaaaatgtggtttatgattttcaagcgttttttagtttcgtacctgcacatagctatgggcaaagctagccttgtcaaaaccatatacaagcaagacacgagggatgcatatatgaagtataaaaattaatgcgtgggggtcaacatttaggaaatgtcttctagagttactgtacattttaaaatgtttgttggcttggtttattattttcatctttgaattccaagactagtttggtcgactgttgtcacgttagtttgtatcctgctgcagaataacttgcttgtaattgtatactgattagttggtatatagtgatatattatatatactaaatgcattaatgcaggttatgattttgctaatcttgttaaaaaa

SEQ ID NO: 6382 - DNA, 678 bp, Glycine max
ccatgatgagcaatgtaacgttgagtcagatttgcaagccataggggttttgttgatacatcttctgacgggaagaaattgggccgggctcgtcgaggaggtgatgacagtggatatggataggaaggctttgggtagtgttcttgatgagatggctggacaatggccatgggatcttgcaagggaacttgctgccctggctatgaggtgcatgtccatcaaagccaaacccaactcagaactcagcattgctagggttttagaggaactcaatgagataagaagaaacggggatgaaatagttgaaagggaagggccaaagacaattattggtggatgtatagatagggagggttccagtgatatgcctagtgctttcctttgccccatacttcaggaggcaatgacaaacccacacgtggcagcagatggattttcttatgagctagaagcaatagaacactggctgcagtcggggcgtgacacatcaccaatgacaaatttgaggctgaagcacacattcctcacccctaatcacacccttcgttccctaattcaggactggcagaccaacaaatcaacctagagttacacattagtactgaattctttttaggttaaattagtattgttgtcctttaatttattatttaagtttaatttagttttttaattttt

SEQ ID NO: 6383 - DNA, 1105 bp, Glycine max
ggctcgagctcgagccgaatcggctcgagcggctcgaggtcaaagataaagaaaagcgtataacattggaagagataatatactgctcaattgtacataaatttttagagaacaacatttctatgatcccaaaaatatcagcaacatcagatcctactggtcgagtggatttatggccaaatcaagagctgaaactagaagcggttcattctccagaggcattggagatgattcagagtcactcccccccggtactaggagatcgccttgtgggtcctctccagacagttgttcaaattagtaaaattaaactgggaaagttgtatgctgcttctataatgtatggatactttcttaaacgagttgatgaacggtttcaacttgagaggtcaatgggaatcctccccaaggattttggaaaagctaaaagttacgatgaaccatcaccgggtatcaagctttgggatcctgattccttgatcacagtacaagattatgacgatgagggttataatgacagtgattacatggatactgatgaagacaaatctttcagactaagagcttatgtgatgcagttggacgcagagacacttcagagacttgctactgtacgatcgaaggaggctatatcattgattgaaaagcaaactcaggccctgtttggaaggccagatattcgtgtctccgacgatggttcaattgaaacatccaatgatgaattgctttcactcactttctcgggcctgactatgctagttttggaggcaattgcttttggatcattcctatgggacaaagaaaactatgttgaatccaagtacccttttcttaatgagtagactagatgacagtacacagattctttcctttcactgcatggaacttggtaacttagtaatatgttaggcggcgtttgggtggtcttgctatcttaactggtgtgctttcaaactattatagaacctgaaacaaatcatgggcgtggagttatataggaaaatgtacatatttagcatgtagacatgataataatctatgcaagcctggactttgtaaatgatacagaatctcaacctagtaaatattttcatttttggtcttt

SEQ ID NO: 6384 - DNA, 852 bp, Glycine max
  misc_feature (647)..(647): n is a, c, g, or t
  misc_feature (668)..(668): n is a, c, g, or t
  misc_feature (678)..(678): n is a, c, g, or t
  misc_feature (703)..(703): n is a, c, g, or t
  misc_feature (705)..(705): n is a, c, g, or t
  misc_feature (712)..(712): n is a, c, g, or t
  misc_feature (718)..(718): n is a, c, g, or t
  misc_feature (727)..(727): n is a, c, g, or t
  misc_feature (735)..(738): n is a, c, g, or t
  misc_feature (743)..(743): n is a, c, g, or t
  misc_feature (755)..(756): n is a, c, g, or t
  misc_feature (761)..(761): n is a, c, g, or t
  misc_feature (767)..(767): n is a, c, g, or t
  misc_feature (769)..(769): n is a, c, g, or t
  misc_feature (771)..(772): n is a, c, g, or t
  misc_feature (778)..(778): n is a, c, g, or t
  misc_feature (781)..(783): n is a, c, g, or t
  misc_feature (788)..(789): n is a, c, g, or t
  misc_feature (791)..(791): n is a, c, g, or t
  misc_feature (795)..(795): n is a, c, g, or t
  misc_feature (798)..(798): n is a, c, g, or t
  misc_feature (808)..(808): n is a, c, g, or t
  misc_feature (810)..(812): n is a, c, g, or t
  misc_feature (818)..(818): n is a, c, g, or t
  misc_feature (821)..(822): n is a, c, g, or t
  misc_feature (825)..(829): n is a, c, g, or t
  misc_feature (833)..(833): n is a, c, g, or t
  misc_feature (844)..(844): n is a, c, g, or t
  misc_feature (851)..(851): n is a, c, g, or t
tcagctacgtaggcccccccccccccccaaaaaaacaaatctccttcttgaactcaaggagatggctctgggaagaggcagtgcagtggttctactactttgcttcttgctgcttcactctcagatggctcgtgctgccacctacacagttggagattctgggggttggacctttaacactgttgcctggcccaaaggaaagctctttcgggctggtgacacacttgctttcaattatagccctgggactcacaatgtggtggccgtgaacaaggctggatatgatagctgcaagactccaagaggagccaaagtgtataagtcagggacggatcagatcagacttgccaagggacagaactacttcatctgcaattatgttggtcactgcgagtctgggatgaaaattgccatcaacgctgcctgagtttaataatatggttaacttcccatacatattgtattgtaatgcaaattgcaccctttagtgggaagttagctcctttaaataatgttaagaaaaaaagtagctatgtgtgctcttctataaatgtcacttatctataaagaataaatgtcggcagtcggtgatcaaaaaaaaaaaaataaatccctcgtgcaaaaaaaaaaaaaaaagattcctgcancccggggatcactagttctanacggccgccncgggggactccactttgtccttaangngtattcngctggngaacatggntatggtcnnnnaatgnatcgtccattcnnactanaccgantnannaaaccnggnnnaaaannanaaanaantggccccccncnnnaaaaanccnnttnnnnnaccnggggggggtgngtttttnt

SEQ ID NO: 6385 - DNA, 1370 bp, Glycine max
ccattaatataataaaggatataagttaaaaaaagtaattaatgtaacattgaaaaattaaaatgataatttttttggaataatttttttcttatacaaaaattataatggaacaaaccaagtattaattttgaaagctaaataagcaggaagaggtgaaaagagatggattgagatttgagcctgccatatatgaaccaagccataggcctttagcgacgaatagataaacaaacacacagtattgatacataacaaagtatttgtgattttaattattatacatattaagacaacattgaacagtatagagaacgtatgagtatgtgggatcaactgtcagctgttgtaaaaccgaaagaagcataagacatagaaccaccatcccaactatcatgtacaactttggcctttgaattttcaccagcagctcccatggccacatgcaatgggaagaagtgatctggccagggatgagccatttttgcatatggggccttctcttcgtattcatttacttcctcgtatcttccatcaagaagagaggtttttagccaggacataaatgcggaagcccatggagcaggaggggtaccacgaggtgcaattgctctgaggttgtgggtggcactcccagacccaacgataagaacaccctcatccttaagaggagccaaagcctttcccatgttgtagtgataggtaccacctttgtttgatgaaatagagagttgacacactgggatgtctgcctctgggtacatcaacaagagtggcacccatgcaccatggtcaagcccacgtttcttatcttcatccacatggctaaaccctgatcctaagagtagctccttcaccctctttgctaagtgtggagcccctggtgctggatacttcagcttgtacatggatttggggaagccatagaagtcgtagatggtatcattctggtgaacgacgttgacggtgggaacatgggtgtcccagtgggcggagataataagaatggaagagggtctcgtcggaaactgctccttccacgaattgaagaagttccacgcagggattgaatcatctacggcaagagttggtgctccatgggacaagtagaatgtctccttcaatctcaaccccatatttctctcttcaatattcgaagaatcaccactttctatgatcttttcttctctccttgccacagaataatttgaaaaactgtaacaaaatctgaagatcttattcatagaagactataagacattaatcaataagctatttaaagattgaataaggtggttgtggagggttattcaacagagagagagagagagtaatgaaacttttgtattatattctccgtgtctgtgccg

SEQ ID NO: 6386 - DNA, 3448 bp, Glycine max
tcgagtcagctacgtaggcccccccccatgggtaaacgtgtaaacataagcaaaaatgttatgtaaacatcatgtcttcctttgcaaaaggcaagttgaagaagcctgaacgttatgtaaaaaaagaagaaaagaaaggtgtggttgagggagtgaggaaatggtgcacagcgcgtacgattgtctggaactggtgcgcgagtgcccagccaagatcgaatccatcgaatcctacgattcgaagcttctcgtgggctgctccgatggatcgctccgaatattcgccccggaaacggaatcttcctcctccaacgggtccaagtcctacgcgttggagaagaacctcgccgggttcgcgaagaagtccgtgctctcaatggcggtggtggagtcacgagagttcctcatctcgctctccgaatccatcgccttccacagactcccttccttcgagaccatcgcggtcatcaccaaggccaagggcgccaacgtcttctgctgggaccaccgccgtggattcctctgcttcgccaggcagaagcgcgtttgcatcttccgacacgacggtggcaggggatttgtggaggtgaaagattttggtgtggcggatacggtgaagtccatgtgttggtgcggtgagaatatatgtttggggattagaagagaatatgtgattctgaatgctacaaatggagctttgtctgaggtttttacttctggaagactagcgcctcctctggttgtttctcttccctccggagagcttcttcttggaaaggagaatattggggtttttgtggaccaaaatgggaagcttcttcctgaaggtaggatttgttggtcagaagctcctttggaagttgtaattcagaagccgtatgctatagctttgttgcccagatttgtggagattcggtccctccgagctccttatcctctgatacagacagttgttcttcgaaatgttcgccacctttgccagagcaatgattccgtgatacttgctttggataattctattcatgggctctaccctgttccccttggagcccagatagtccagttaacagcttctggcaactttgaggaggccttgtcattgtgcaagcttcttccacctgaagattcaagtctccgtgctgcaaaggagggttcaattcatataagatatgctcactatctttttgacaatgggagctatgaagaggctatggaacattttctggcatctcaaatagaaataacctatgtgctttccctgtatccatccattatccttccaaagacaactattgtttatgatccggagaagttggacatttatggggacgcttcatatctctccagagcttcttcaggcgtgtcagatgatatggaaccctcatcaacatctcatatgccagaatctgatgagaatgcagcacttgaatccaaaaaaatgaaccataatatgcttatggctctcataaaatatttacagaagaagagatttagttttattgagaaggccactgcagaaggaactgaagaagtcgtttttgatgcagtcggggataactttgcatcttacaataggcttaagaaaacaaacaaggggcgtggtaatgtacctgttagttcaggagctcgggagatggcttcaatgttggatactgctctactcgaagctttgcttctaactggacagtcttcagtggctttagaattactgagaggagttaactactgtgatttgaaaatatgtgaggaaatacttcgaaaaggcaaccatcatgttgctttattagaactttacaagcacaactcattgcaccgggaggctcttgaacttcttcacaaattggtggatgagttgaaatctagccagtctgaaattacacaaagattcaaacctgaggatattgtggagtacctcaagccactatgtgggacagaccccatacttgttctagagttctcaatgcttgttcttgaaagctgtccatctcaaactatagacctctttctgtccggaaatattccagcagatatggtgagctcatatttgaagaagcattctccaaacatgcaagctaggtacttggagctcatgcttgcaatgaatgagaatgcagtatctggcaatttgcagaatgaaatggtgcacatctatctttctgaagtactcgattggcatgctgatttaagtgctcaacaaaaatgggatgagaaagatcattccccaacaaggaaaaaattattgactgccttagagagtatagcaggatacaatccagaggctttgctaaaacgtcttccaccagatgctttgtatgaagagcatgctatattgttggggaaaatgaaccgacatgaactggcattatctttgtatgttcttaagcttaatgctccagaattggcattgtcttattgtgatcgggtctatgagtctatgcatcagccatctgcaaaaaattccagcaacatataccttgtgcttttgcaaatttatttgaatcctcgaaggaccacagcaggtttcgaaaatagaattacaaatctattatccccacagaataagactattccaaaactcactcctacaccatccataaaaagcagaggccgagggtcaaagaaaattgctgcaatagagggtgcagaggacacaaaagttagtttaagcagcactgacagtggcaggagtgatggtgatgcagatgaatataatgatggtagtcctactatcatgcttgatgagatccttgatttgttgagccgcaggtgggatagaataaatggagctcaggcccttaaacttttaccaaaagagacaaaattacaggacctactttcatttcttggaccccttctgagaaaatctagtgaaatgtaccgaaattgttcggtgataaagagcttgagacaaagtgagaaccttcaggtgaaagatgaactctatagtcagaggaaagaagttgtgaagataactggtgatagcatgtgttctctgtgccataagaaaatagggacaagtgtttttgctgtctacccaaatggtagcactctcgtgcactttgtctgtttcagagattctcaaaatatgaaagcagtgggcaaagggtctcaattgaggaagcgattatgaagctgaaatgccataccaattggtggtccagttgtcttgttttagcgtgcttttacccacggtacctgttggtaggtgtggattatgatgaaagtggcaccgtaatttatcttcagaggtctctctttttctttttttgcttttttgcccagtcaattcgtgtgaaaagtgagatttgatatgtgaagagcgtgatgtgtctatctttttcttttttgtgatgtaaatattggcaaaacttgccacaagtaaaataagactacacgaaatttacattttttttttttttacagaaaatggcaagcttttgtcatggag

SEQ ID NO: 6387 - DNA, 571 bp, Glycine max
tacggctgcgaggttgttgtggttctttgcgagatagaagagaaagccgtcgctatcctagtctcttcttcccctctacccatttcagtttcaggatggaatctcaggtgaagcacgcccttgttgtcaaagttatgggtcgtactgggtctagggggcaggtgactcaggttagagtgaagtttttggatgatcaaaaccgacacatcatgaggaacgtgaagggacccgtgagagaaggagacattctcaccctacttgagtctgaaagagaagcaagaaggttgcgctagaggatctcttcatggtttggctcaggacttaaacaaaacatcgttgtttttgttgtagttaaaggatgtcaaatgttaattgtcatggacctgaattatgcacctactatgtttgacattatgccattatgtttgtggctgagttatgactaaatttatgctttgactatatgaagtgttttctattctatgggctatattgagatgtggttagtagttagttatgtataattatggaaatgtttatgatctaagaatggcggcatactttttactct

SEQ ID NO: 6388 - DNA, 480 bp, Glycine max
ctcgagccgaagtctggtctcgtgcaagtgtaacccaaaaccctagcggcgcctgctttcttcgttcgtcttttgcatcagccatcaggatggagtctcaggtgaagcatgctcttgttgtcaaagttatgggtcgtactggatccagaggacaggtgactcaggttagagtgaagtttttggatgatcagaaccgtcatatcatgaggaatgttaaaggaccagtgagagaaggagacattctcaccctactcgagtctgaaagggaagcaagaaggttgcgctagagggtatttttttcttgatctttatggtagttagttggtgctaaaggttatagcaccctgtcttgttgtcttggatctattttcattcaaattatgggttgaattttggatgtttggagtttaatatatgattttgaattatggcttaaattttggattaaaatatttgtcttctataaaaaaaaaaaaaaaa

SEQ ID NO: 6389 - DNA, 486 bp, Glycine max
cctcgtgcgaaaaaccctagctcgcgttcttcgttcgtcttttacatcaggatggagtctcaggtgaagcacgcacttgttgtcaaagtaatgggtcgtactggatccagaggacaggtgacccaggttagagtgaagtttctggatgatcagaaccgtcacatcatgaggaatgttaaaggaccagtgagagaaggagacattctcaccctactcgagtctgaaagggaagctagaaggttgcgctaagagggtctttctttcttgatctttatggtagttagtcggtgctaaaggttatagcaccctatcttgtcttggatctattttcattcgaattatggcttgagttttgcatgttttgagtctaagcttcaaggttgaagtatgttttggcttaatatatgattttaattatggcttgagttttggattaatatgatttggcttctatatagtgatattcctgctacgaaaaaaaaaaaa

SEQ ID NO: 6390 - DNA, 512 bp, Glycine max
gatcacagagcccgaagccaaaggtaatccaatccgcacagaaatccccatctcaaaaccctagccctcatccccgatcccggcgagcgagatggccaacccgagggtgttcttcgacatgaccgtcggcggcgcgccggcggggcgcatcgtgatggagctgtacaaggacgcggtgccgcggacggtggagaacttccgcgcgctctgcaccggcgagaagggcgtcggcaagagcggcaagccgctgcactacaagggcagcgccttccaccgcgtgatccccgacttcatgtgccagggcggcgacttcaccaggggcaacggcaccggcggcgagtccatctacggcgagaagttcgccgacgagaagttcgtccacaagcacaccaagcccgggatcctctccatggccaacgccgggcccaacaccaacggctcccagttcttcatctgcaccgtcccctgcaattggctcgacggcaagcacgtggtcttcggcgaggtcgtcg

SEQ ID NO: 6391 - DNA, 1057 bp, Glycine max
cacgagaccattacctagaacatcctaatcgaaaaatctactgcccccgccgtcctcgcctcctcccccgatccaaatccgaaatttttcccctccccgcagcccgctccctcctccgcgcccgcactgtagcccgagcgctcggctccaccgccgtgggctgtagccgccgtcgctgccatggcgaacgacgggtcccccaagtccggtgacatcccgccctaccccgagatgattctcgcggcgatcgaggcgctgggcgacaagaacggctcgagcaagtccgccatctccagctacatcgaggagaagtacgagggcctcccctcggcgcacgcctccctcctcacggccaacctcgccagcatgaaggaggccggcaagctcgccttcgtcaagaacaactacctcaaggctgacgctccctccgccaccccggcaaagcgcggccgcggccgcccgcctaaggaccctaacgcgccgcccaagccgaaggctgcgcccaaggaccccaacacgcccaagcgcggccggggccgcccgcccaaggctaaggatcccatggccgacgccgtcaaggatgccgtcgccaaggcgaccaccggcatgccccggggccgcggccgcccgccgggtccctcctcggccaagaaggccaaggtcgccaaggaggctgcctctccggctcccgcggacggctccgctcctgccaagcgtggccgtgggcgcccacgcaaggtggcggtgtgaggcctgcgtgctgatgcctttcggtctgtgtatctcgctgtggttgcgacggtggtaagctcctaggtgtgaccgtgcttcttcgatttgtgctccgtactaattgttccgtcggcttagttgctcagtatgtgttgtaacctaatcgagatgagtgtgcacaatggatggatggatgtttttagcttcggttgtagttgactgtgctgctgtgagtgaacatgttcattttttttatcgccatctctgttgcttccgcattatgatgaagatgtttgtcatgttgttgtgaaaaaaaaaaaaaaaa

SEQ ID NO: 6392 - DNA, 2299 bp, Glycine max
atgcggaaagctgtacgcctgcggtcccgatccgcaggtcccgcctcgacccacgcgtacgcccactcgtttggttttctcattcattctatgaacctctccccccctcccccttcacttgcctagtctcgtaggggttagttaccactccgtttcttcacactctctctttcttgatccttccaaatggaaaagaagcagggtttcttctccgctctcaaagacgaggtggtccgcggactctccccctcgcgttctcgctccaccagccccgcccgaaccgtctcccccatcacgggcctcctccgccgcaagaagcgcagccccagcccagactcctccgtcgcgagatccgtcagcctccgcccccttggggagacgctcacgcctctcatggagggccccgacccggacggaaccgaaaatggggatccgaagcgaatcgggtcgggcttaggacactggatgaaggggcagctgtcacgtgccccctccgtgtcgtcgtacaagaggtctgatctgagactcctcctcggcgtcatgggtgctcctctcgcccccgttcacgtctcctccaccgaccccttgcctcatctcagcatcaaagacactcccattgagacttcatccgctcagtacatattgcagcagtatacagcagcgtctggggggctgaaattgcagaactctatacgaaatgcttatgccatgggaaaggttagaatggtggcttctgaatttgaaactgcaactagggtagtgaagaaccggagtaggtgtgcagagtctggtggatttgtgctctggcagatggatcccgacatgtggtatgtagagcttgcagttgggggaagcaaggttcatgctggctgtaatggcaagcttgtttggaggcacacaccttggcttggggctcacacggcaaagggacctgtgaggcctttgcggcgtgcacttcagggtattgaccctagaaccactgccagtatgtttgccgatgccaaatgcataggagagaagaacatcaatggtgaggattgcttcatcttgaagctttgtactgaccctgaaacattgaaggctcggagtgagggtcctgctgagatcataaggcatgtcttgtttggctactttagccagaagactggacttcttgtacacattgaggactcccatctgacccgcatccagtctaatgggggcgatgcagtttattgggaaaccacaatcaattcattccttagtgattataagcccgtggaaggtataatgattgcccattcagggcattccgtggtaactcttttcaggtttggggagatggccatgagccatactaaaacaagaatggaagaggcctggacaatcgatgaggttgcattcaatgttcaaggcctttcagtcgattgcttcattcccccagctgatttgagaacagcttctgtcagtgaagcttgcgaacttcctcaggatgaaagagcaaagaactcactagcagtacatcgggccaaagttgttgcgctggagaaatcacataactgcagcattgatagcatgatctggaagatggaaatctaacagacggcagtaggatcaattcaaggcaattgttaatagcagtcactagtttttgactactaacgtttagatgttagattaggggttcagttggttctatgtgaaagtttgtttatgcctctatatagttctgtaaatagagcataaaaattcacgggtattatgcatacagacctgagtgaatgttttattctcaatgcaggatccaactatggagttggagctcgtttttccacttcggaatagagcaatttgaggttaaaattttagtttaccttccttgaatgagggaaggtggtgaagctttggtatagtggacccattaaacttttgttacttagcaagttatctaagtgtcgatggtggtaatattaaagagtctaccatcgaccacagccagtttggcactaacagcttctacatggtgtggaagttctgtgtttgaaaaggtaacgtggttgtttttgatagccgagataatggagtagagttacagggacaatactcaatgtaccgaacatctcttgtaagtttccggttgtgttatgatgttattttgccagtgctcctgataatgaaactgtcagataatgaatgcttgtgatgggacaaaaaaaaaagaaaaaggtatgttactctttacattatcttttgacggagttgctgtctgacttgtaaatagtaaccataatttacttgtcgacgtttatttgcatttgtc

SEQ ID NO: 6393 - DNA, 775 bp, Glycine max
ttttttttttttttttctaaataggcatcacaagcaaacactcttgtgtatcacagtacttagcaagtcggtgatattgcgataataattgtatcgagcaggagcagtcacaacaaggcatgatctttctcccccaaaacagactagtgataaaattctcgacaacttatgatactagcaaaacgaaatgtgatcgcatcagcagcagcggcaggcaacaaagacggacgaaagaggagggatttatttggcgaggggcggcggcgagccgagaagagcctgctgctgcaggtcgaggtcgaccatctgctgctcgcggtccatctcgatgatgagcggcacgaccagcaccaggaaggtcgtcccggcgatccacgccgccttccccgtgctccgcagcagcttccccgccaccgccgcggcctcgcggccgtgcgccgccaccgaggaccgcgagatcgcagacaggacgccgccggcgtcgccgcgcttgctcacagcagaggacgacgccatgctcgctcccttgttttgatctggactggaggattcgattcggttcgattagcgtttccataaggaaggtcctaagcaacggcccccctggcaaatcctcggcccccccgccgattccacaacgctccaaaagcgggaccgccccccgccgtcgggaactttccacctcctgatctcccattcataatgaccctaaagtacgccctcctgccccaaaacaacgtgggctcacatccttgacactccggccccccccctc

SEQ ID NO: 6394 - DNA, 1006 bp, Glycine max
ttttttttttttttttgtataatgtataatattctcagtaataactctgcagttaagacattgcagttaagacattgcaacctttgtattaattaactaacctttttattataaaagagcttaaagattagatagatagtttttgattcaacaaagatctctcaagaacacacacacacataactgagaaagaaaaacagattaatgagaaattgggcagtgaagcagccacttatttagtctgagcattattactgttactgaagcagagccttttagaaattcctcactgaaggatcttctgtgaagctggcctcttggtgatctcagccacccacttgttgacatgtggacgctcggtgaaaagcttcttggtgggagtttcaagcaagtattgaaccgcaggaatgtggtgaagatcggtcaaagtaaaagtgtcaccagccaaatacttgaactccttgagccgagcctcgtatacattaaggaccttggctaacttagcctcttcttcggcaacaacggcttggtctgtggtcaagccatagatgagcttaaatacatgttcccaagcaagctttgaagccagtgggtcgaactggtgagcttctacttgcattcccatggccatgattgcatagtgggccaggttcttggagtcgggctggagaaggttagttccttggccttcgtatcggtgagctatgtactgagtgatagctcttgactcgaagattttgaggtctccatcttcaaaggccggaactttaccaaaagggttgtgggataggaaagactctttcttgtgctcaccgtccttgaggtcgacatgaacgagctcaaagtcgaggtttttctcgtggagggtgaggaggactcttctggtggaaatggaagcagcgtgtccgaaaactttgatacctgccattgatacaaagaaactcttttaagagatgtgatgtttgatgtttgaaggtgaatgtgatttttcgattaggatggtcta

SEQ ID NO: 6395 - DNA, 669 bp, Glycine max
caacacatatgagtttttttttttttttacgacagaaagcaaattcaaaatggttcgatgttctcaaatggtggtgtgcttattttcatgacaatctccacagcaatcactctgtcatgctctccagagagtttcagaaattactggcaaaaccaaaatgacaaaagacttcgagatgtagaacttctggttcagcacttcagaactactcctcgacaacgacgctgatctgccccttctcaagcatgtcgtagaaggatcgcgtcttcctctgctcgttccagtgatgcatcttccacataccaccagcaaccagcccaagggtgagtccaatgaagatctccttcaccacgctcggccccttgagggtcgcatgtgcaactctgccgcctgccatctgctagctgttgggctcagatgccaaaatgccttgccgccgccggaggagaaggagagagacgcctgcgccgccgcgagagagagacccactcttcgatttgttacttttcgaataagaagttcttaggggatggcctcctgggaaattcctggagcccggggggatccactaatttcaaaaagggccgccccccggcgtgggagactccaggtttttggtcccccttaagggaggggttaaatttggcggcttttgggggaaaacactgg

SEQ ID NO: 6396 - DNA, 1042 bp, Glycine max
aaagagagggatttttttaccaaaaaattattacgcggcgagttttttgagcaaaaaatttatagccggtttcaaaatttccccatgtgcgccctttcagggtttttgccaaacttttttgggaaagggggcgatttggtgtccgggccccttttttccctttttttccccccagctgggggaaaaaaggggggatttttcctcccagggggagataaaggttggggggaaccccccaggggttttttcccaagtcccgggccgtgtttaaaacggccgggcccatggaaccgcgccgttaattacggcctcccctttaggggggaaattggggttaccggggccccccccctcgggggggccacgggtttcgatagcctttttttttttttttttttcaaggaaaaagacaccaataaatttaaaaaaccaaaaacgacccatatgagaagcattacataatagatacagtggcaacacgattttacagcaatttttttaagaagaacaaacaacttcaaagatggaatcataatcgtgatatggctccaactcatcttaggaactttttctgttgtatgggtactttcaagaaagacattaaaacataaaataacattgctgtagaatctctaagcaatgcgacttcttttttctttggggcagcaagaagaatccatgtttgtgtctttcaagagtccacagctggagactgcatgcagcagagccattttttaggctggggtttactaggatctcctcctcctcctccggacttagcatgaccatcagtggatttaccaggtgaacctggtttgccaccggtctttttctcatccctagctttgttgaatatgactgtgaagccttcagctgatgctgggtcgttcacatcccattcaccaaacttgggcaagggacgacctttgtccgacatgagggtctgaagaaaggaggaagatttaatcccaagaaatggagaagaacgattcggagaattgttaaacacaataaagtgggaactggaggggggaaaggagtt

SEQ ID NO: 6397 - DNA, 1157 bp, Glycine max
acctgttggggaaagggggccaatccggttccgcgggcctttttgccgcttattttccgcccaagtcttgccgaaaaaggagggattgtgtttgccaaggcgattaaaggttggggtaacgccagggggttttcaccaattcacgaaccgtttaaaaacggacggcccaagtgaagcccggcgttaattgggactcacttataggggggagatggggtacccgggccccccccccgggaggtcggaccggatcgataacctttttttttttttttttttaaaattatcacaaatcacattagaaacaaacaggtctacaatttttacaatgtgctctcgcaaacctagacactataaaacagctccagttacagataatgtgatatttccttctagaatgcgagagaaaaaggttaacacaaataaccaaaaaaaatatataaacaaacaaatcatagatcatcagctcattgagctaaaatctgacccttcttcatcatttgcctaaactccttgtaattaaccctaccatcaccatcaacatccacttgtattatcatcttcctacactcctccaaggtcttaccttgcttgaggcccaaggaagacaacaccgttttcaactcatccaccgtaataaacccatctccattctgatcaaaaacgttgaacgcttccttcatatcttcatctcctatctcatcctcgccttggaccattatcgacttgtaaagctctccaaactcttcgacgtcaacgcaaccatctccgttcacatcgatcttctcgatcatctgcgacagctcgttttcagggattatgatgccgaggtttttgaatgactcgtttagctccttctgtgtgatccgaccgtctccgtccttgtcgaacatttggaacacacgttttagctccgtggagtccattttttagggttaggtttagattagaggttgcgtgtggatgaagaaatggtgaaaacagaggatggtgagactccgagaagccgagaaagcagttctttcttggctccttggagacccgatgagggtaggttcagaaactaaggaaatgttaaaagaaatatttttcgattaggatggtctaaggaatgggtctcgtgcggaattcctgcaaccccgggggatccccctaat

SEQ ID NO: 6398 - DNA, 1321 bp, Glycine max
ggtggatctgattgctccaagttattatctgattgtgctgctaatgctggaagtggggatccatattttatggagccattttggatgcgacatgcagcaggtagtgccattttagtatcaggatggcatagaatgggttattcttatagtgatggatcatacatctcacaactattggttgagtacataaccccccttcgtgtcagctacgtaggccccccccccccccgaaagtacatcgtatttggaagtggctcaactcaacttctcaatgctgctgtttatgccttgtctcccaactcttcaatgtctccagcaaaagtcgtagccacagcaccatattacccggtatatcgaacacagacacaatttttcaattctagggattttagttatgaaggagaaacatcctcgtggaaaaacaagacagataaaaactctatatttattgagtttgttacttcaccgaacaatccagatggaaaattgactaaggaagttcttgaaggtcctaatgtaaaatccatttatgatcgagcctactattggccacatttcactgctattccttcaccagcagacgatgatcttatgatatttacaatttctaagctcacaggccatgctgggagtagatttggatgggcaattgtaaaagatgaggcagtatatgaaaagatgttgacatatatggatatgaacaccatgggagtttcccgtgaggctcagctgagagctttaaagcttttggacgtggctcttgaaggagatggaaaagaaatattccaatttgcatattcaaccatgagagatcgttggataaggttgaaagaaatcatatctaaaacaaaacggttttctctacagaaaatttcttcccaatactgcacctttttcaagagggacagagacgcttcaccagcttacgcttggttaaagtgtgagagacaacaagacaataattgctatgaaatccttgaagctgctggcatcaatggccgtgaaggaagtctctatagtgccgataatcgttacgtgcgtctcagtctcattaggagccaagatgattttgagatactcataaacaagctcaaaattcttgtttctaaggaatagaccaaataaagaaatatcaatattcaatgtcatattatcaaaatatttacgtgcataataaaacattctgaaatcagttgaatcattgtcgtttcttgtataaaaataatatgggttctttgtattaaatcaatgctaaatgtattgctcttaatgtaaaaaaacgtgatatagaatgaataaaaagcattgcttttagtattaa

SEQ ID NO: 6399 - DNA, 1108 bp, Glycine max
ttttttttttttttttgattataatgtgtggctactacatacaacagcagccgcaggcacatattcagcaacgcttgatgttcacgttgccagcctaagaaacaaaactctcaacgccggaaggtaaccaagcaacccaactcaacggttgactgtcatattttcggtgcagttttattacaaaaagcaacaataacatccattcggtgtggcttacagcaccggccgtcacttgaaaagaaaaatcacagatcggtcaccccgagggttatcatcaatcagggacctagaggaagtttctaatgtccaacttcctgacgtcaggcatcgcctcatctttaaactcctccctctttagttggccctccattgcttcaacaacttccttcttaagttccgtcagctcagctttggcaagttccatttcaagattttcctcaatcttgggaagatcctccttccgaatgccaagctttttgttaatcttgtcaaactctgccaagaggagacccatgttcttcttgtcactcctcagaagaggtttcttaatgtccttctcaactttctcgagagcttccatcatcatatcctcaatacccatatcatctatgagaccactctttttcctgagctgctgaagggtatccaagtacgtccttgcatcagggatgcccttcgtgaaagtctcaatagtatatttaattctctgagaatcagaaagaagatctgccttttctcttacagtcctcatgacttgggcatagttagcaactgctgtttggtcatctgggtcaatcgtgatcttctccttcttaaggaccccaagtgcggtctcaaactttttcttcacctcaaaaaaagatgcccttcaataggtcatctccgctgacaggagctgcctccttggcaaatgagcggacttgagtgagacctccattggccaaagcagcttggacagaatataactggcgggagcgggatacgaggcgagcggcgagcgccatggctggtggggggcggcggagctagggcagcagaggcctctccgctccttcttcttctccgattcgatctctcggccgcgagagcgagatggggatggggggtt

SEQ ID NO: 6400 - DNA, 1890 bp, Glycine max
gggactgtatttatgcattggaggaagaggatgaagacggaatcatcgccggcgggatcggagaagacggcggtggagccgccgggtttgatttgacttctctgtgtagagcgtatcatattcaccagactttagggttagaggatcggtttaagcagtattattttgagaacaggaagcttcagttgacttcggattttcaggtttcgtcgatgactccttttctggagtctcatcaaacgttctttgcgcagattgcagggttcttcgtggtggaggatcgtgttttgagggccgggggtgggttgatttcgaaaatggaagttgagaacctttgggatattgctgttagtaaaatgtgttctgtgttggaggatcagttctctagaatgcaaactgccaatcatttattgcttattaaggattatgtgagtctgttaggagtgacgctgcggagatatgggtatcccattgatgcgttgcttgatgttttgagcaaacatagggataagtaccatgagttgcttttgtctgactgtaggaagctgattgcggaggcagttgcggctgataaatttgagcagatgttgatgaagaaggagtatgagtattccatgaatgtgctttctttccagatacagacttcggatatcatacctgcttttccctatgtggcgccattttcgtccactgtgccagattgttgtaggattgtgcggtccttcattgaggattctgtgagtttcatgtcatatggagggcagcttgagttctatgaagttgttaagaagtatttagacaggcttttgagtgaggttttggatgaagctttagtgaagcttatcaatacatcaattaatggggtttcccaggcaatgcagatggcagcgaatatggctgtcttggagcgtgcttgtgatttcttctttcgccatgctgcacagctttcaggtgttcccttgagaatggtggagagaagcagaaggcagttccctcttagaaaagcccgtgatgctgcagaagacatgctctctgggctactcaaagccaaggttgatggattcatgacattgatcgaaaatgtaaattggatgtgtgacgaggcacctcagagtggaaatgaatatgtaaacgaggtcataatttatttggaaattttggtttcaactgctcaacagatattgccatctcaagtccttaagagagttttacaggaggtttttgctcacatatcggagaagatagttgggactttagttagtgattctgttaagaggtttaatgtgaatgctattaatggaattgaagttgacatccggctcttagaatcatttgctgataatcaggcctcccttttctctgatggggatgttgatgttctgagagcatcacttgccagctcaaagcaactgattaatttgctgttaagcaatcatccagagaacttcttgaatccagtgatcagggagaggagttacaatactttggaccacaagaaagtggtgattgtttcagaaaagttgagggatccttccgatcggctctttggaacctttggtagtcgtggggcgaggcagaatcccaaaaggaaatcattggatacattgataaaaagacttagggatgttagctgattaagcttatagctgtatgtaaggtattttctcttgttttattttcttgttttgtctctagttccattttgatgatgaattatttaatagtgagttgtcgataaaattatttgctttaggccaggctgtcactgtgttccaaatgcattttaagattttccaagatatttgtttgaaatgtataattcttatgctcttgttttttggatttgatttaaatactttcatatcattttattgtatctgttttgaactg

SEQ ID NO: 6401 - DNA, 1633 bp, Glycine max
  misc_feature (43)..(43): n is a, c, g, or t
gaaatgaatatcacgggtcgcccggtgattccatgtccacttngaattccatagatgtcatcttgacttcaatatagaagttggtgggaaaaatgtcagaaaatttcaagatttctctcaactatcatacatatttgaatgaaaattgagttattgatgcaaggcgtcttccttgtacttgatatgggtaggagtaggacaatggcatagaaattcactacaacttccagattataagaaaactggtttagagggagtattaggaaaggtcaaaggttcaaggtgaaacctcaaagtaaattaggatggcttatagtattttgttggtacaaatggcatctttgtaacaactccttcattagactttcctcgaataataatctttactttggtgcctgccttgtgcaatcctgatttcacatatccaatggctatgttcttcttgaggcaaggactgaatccgccacttgaaacttccccaatgttgtttcctccttcatcttgaatctcactgtggcttctgggaggagggccagaagaaaagaaaccaacacgcctgatcttaggaccttcttcaagctgttttagtataacatcagcccctagaaaacccccttcagctctccttctcttccctatggcccatgtgagtcctgcctcaataggtgtaatgtgctgttccaagtcattgccatataaacacaatccagcttcaagtcgtagactatctcgagcacctaatcctgtcagtcttatcttcccttcagatttttccagaattgccttggcaagatccactgcactctctgagggaattgatatctcaaatccatcttccccagtataccctgttcgtgtgagaaagcactgcacaccattgatgtccaacacacggaactccccaaagtacatcttgcttaaatcctcttttgtcaggtgttgaagaactggagcagcaagaggaccctgcaaagcaagaagagatctctcatcatggatgtgccatgacacatcaccaccttttgccttgaatgccttcatatgttcctcaatatgagccagatctttgtccctacatccagcattcacaaccaagtatatgtgatcatccttcaccttggtaataactgaatcatcaattgcccctcctttttcatttgtgaagacagtcaatgaaccagttccaggggcaagcccagcaacatcagcaatgacaagcttttcaaggaacggaacagagtcctttcccttgaggcttagcccgcacatatgggaaacatcaaaaaggctaccattctccctacagttaagggttgagtccataattgagtccttatattgaattggcatgctccatccagcaaatggcaccatcttccctccattagcaacatggaagtcataaacgactgtctttttcagctcagcatctgaggcaaaatacctacgagcaacagccttcttatcaccctgggcaagacggcgagtgattgattgcccgagttgccataagccccccctcattttctgttatatagtgtgtgaagttactcagaatggtggaaatctgggtgcccaaaaaggcatcagtagtgcaaaaacagaaggatctgacagatacgtactgactcga

SEQ ID NO: 6402 - DNA, 1706 bp, Glycine max
tatcgggaaatttcaagataacatgccaaattaaactcatacatgtctgaaaattgataccgagttatgaatgcaactgaaagccttatatttaagacaatgacattagcagtggctgtaacacttgattatgggaaaatttgtcaacaagggagaatgattaggaaatgcttaagatataaatacagaagtagatcaggatggcttatagtattttgttggtacaaatggcatttttgtaaggactccttcattgggttttcctcgaataataatctttactttggtgcctgccttgtgcaatccagatttcacatatcccatggctatgttcttctggaggcaaggactgaatccaccactggtgatttccccaatgttgttgcctccttcatcttgaatctcactgtggcttctgggaggtggaccagaagaaaagaaaccaacacgcctgattttaggaccttcttcgagctgtttcaagataacatcagctcctagaaaaccaccttctgctctcctcctcttccctatagcccatgtgagtcctgcctcaataggtgtaatgtgctgttccatgtcatttccatataagcacaatccagcttcaagtcgcagactatctctagctcccaatcctgtcaatcttaccttcccttcagatttttccagtattgccttggcaagatctagtccatgctctgaaggaactgagatctcaaatccatcttctccagtataccctgtccgggtaagaaagcactgtgagccattgatgtccaacacacggaactccccaaagaatagcttgctcaaatcctcttttgttaggtgttgaagaacgggagcagcaagaggaccctgcagagcaagtagggatctttcatcgtggatgtgccaagacacatcaccacctttggccttgaatgccttcatatgttcctcaatatgagccagatctttatccctgcaaccagcattcacaaccaaatatatgtggtcatccgtcaccttagtaattactgaatcatcaattgcccctcctttttcatttgtgaaaacagtcaatgtcccagttccaggggcaagcccggcaacatcagcaatgactagcttttcaaggaatgggacagcatccttccccttgaggctcagcccacacatatgggaaacatcaaaaaggctaccattctgcctacagttgatggtagagtccatgattgagtccttgtattggattggcatgctccatccagcaaatggaaccatcttcccaccatgagcaacatggaagtcatgaaacactgtctttttcagctcagcttctgaggcaaaacatcggcgagcaacagccttcttatctccatgggcaagacggcgagtgatcgattgcccaagttgccacaagctccccctcattgtctaagcaaaatatagagattggtttgttgttgagaatgaatggagcaaaaaggttggaagccaaaatagaggagagaaggctctgcactctgcagactgtgaaacaaaacaagagaaacccccttctgtcgtcttctcgcagccgtataaagagaagagatatactttttaaataaaagataaagaataaatatgacttcccaatcgataataccacatcgttagtgagtggtagcacacttcccatcccttttcactaactcgtacaattcaaattgtcggtc

SEQ ID NO: 6403 - DNA, 1642 bp, Glycine max
ttttattcattttttttttttttttttttttttttttttttcttttttttttttttttttttttttttttttttttttttttttttttttttatgaatgcaattgaaagccttgtatttaagacaatgacattaagtcattaacagtgactgtaacactcgattatgggaaaatttgtcaacaagggagagagcaattaggaaatgtttaagatataaatacagaagtaaatcaggaaggcttatagtattttgttggtacaaatggcatttttgtaacgactccttcattgggttttccccgaataataatctttactttggtggctgccttgtgcaatccagatttcacatatcccatggctatgttcttctggaggcaaggactgaatccaccactggtgatttccccaatgttgttgcctccttcatcttgaatctcactgtggcttctgggaggtggaccagaagaaaagaaaccaacacgcctgattttaggaccttcttcaagctgtttcaggataacatcagctcctagaaaaccaccttctgctctcctcctcttccctatagcccatgttagtcctgcctcaataggtgtaatgtgctgttccatgtcatttccatataagcacaatccagcttcaagtcgcagactatctctagctcccaatcctgtcaatcttaccttcccttcagatttttccagtattgctttggcaagatctactccatgctctgaaggaactgagatctcaaatccatcttccccagtataccctgtcctggtaagaaaacactctgagccattgatgtccaacacacggaactccccaaagtagagcttgctcaaatcctcttttgtcaggtgttgaagaacgggggcagcaagaggaccctgcagagcaagtagggatctctcatcgtggatgtgccaagacacatcaccacctttggccttgaatgctttcatgtgttcctcaatatgagccagatctttatccctgcagccagcattcacaaccaaatatatgtggtcatccgtcaccttagtaattactgaatcatcaattgcacctcccttttcatttgtgaaaacagtcaacgtcccagttccaggggcaagcccagcaacatcggcaatgaccagcttttcaaggaatggggcagcgtccttccctttgaggctcagcccacacatatgggaaacatcaaagaggctaccattctccctacagttgatggtagagtccatgattgagtccttgtattggattggcatgctccacccagcaaatggaaccatcttcccaccatgagcaacatggaagtcatgaaacactgtctttttcagctcagcttctgaggcaaaacatcgacgagcaacagccttcttatctccatgggcaagacggcgagtgatcgattgcccaagttgccacaagccccccctcattttctaagaaagattggtttgttgttgagaatgaatgaagcaacggggagagaaagctctgcactctgcagagaggaaggcttatctattggacttggacataaacataaagagaagagatatatctaaataaaataaaaagcgggagttggtggctgtgaggtgaggggatcctcttcccaaatcg

SEQ ID NO: 6404 - DNA, 1122 bp, Glycine max
ttttttttttttttttcagaaatcagaacgatcatgtttcttctgcccttgataatttacacgtacggcacattcgtactctcatacttttccccggtaaaattcacacagcacatgatgctgcatcgcgcgcatcgcacgcagctgatccatcaacagccgacggcggcggacgggcaatcaacggccagctcacaggctgggcaccctctcggcggcgccggagatgacggtgagcaggttgttgccgaaggggtcgctgaggtgcgcgcacaggttctcaaaggggccctcgccggtgacgtaggcctggatgaagaagcccagcatggagaacatggccagccgtccgttcttgatctccttcaccttgagcagcgccgcctggtcggggtcggtggcgaggccgagcgggtcgaatgggccaccggggtggagcttgtcatcaaattccagtccgttggtgatcctgtagtactcggcgcctccgacgaggacgacctcggcgacgacggcgaggatcaggttgatggggatgctgttgccgaagtagttgagggtgttgccgtcaaggagaagggcgccagtcttgaaccaaacggcctcgggaccgcagtttgcgccgaacttgttgagcgcctcggggatgatgaatccggcggcgccgagcatggcccacctggcatggatgagctcaaaggcctggtacttggcgaagtcctctggcttcttgcccagaccaaaaggatcatagccgtagtctccgggaacctctccgttgaggtactccggcacctccgaccggtcaaggagtccgttgggcaagtagatcctcctgtcagggccgtaccacttggcgagctcgtcgtcgatgcctacgctcgaggtggccacgggggcgggcttcggcttcggggcaggcttcttcttgaagcgatcaaagagggagacgatcttctgtgcgccagcagttggtgccgctgtggcgtacctggaggagccggcgaagttgagccgggtgccgagcatcttcgtcggagcgagcgccgccattgcctcgagcccaaagttgagagagaaggggcgtgctcagctcagcaagaagggaggatgtgatgggtt

SEQ ID NO: 6405 - DNA, 1054 bp, Glycine max
acgatcccaccctcccctctcccctataaatcctcctctcaacctcatgttcaccctcactcatcacccacacagcgtgcacaacacaaacacaaacacagatcgatcgagatccagagcaaccaggagcaatggcgggcgagaagggcctggtgctgctggacttctgggtgagcccgttcgggcagcgcgtccgcatcgcgctggcggagaagggcctgccctacgagtacgcggaggaggacctgatggccggcaagagcgaccgcctcctccgcgccaacccggtgcacaagaagatcccggtgctcctccacgacggccgccccgtcaacgagtccctcatcatcctccagtacctggaggacgccttcccggacgccccggcactgctcccctccgacccctacgcgcgcgcgcaggcccgcttctgggccgactacgtcgacaagaaggtctacgactgcggctcccgcctctggaagctcaagggcgagccgcaggcgcaggcgcgcgccgagatgctggacatcctcaagaccctcgacggcgcgctcggggacaagcccttcttcggcggcgacaagttcgggttcgtcgacgccgccttcgcgcccttcaccgcgtggttccacagctacgagaggtacggcgagttcagcctgccggaggtggcgcccaagatcgcggcgtgggccaagcgctgcggcgagcgggagagcgtcgccaagagcctctactcgccggacaaggtctacgacttcatcggcctgctcaagaagaagtacggcatcgagtaggcgcgccgacggacggacggacgggccatgcaggcgacagccggcccgccgtccggagggaagcaacaaataaatcagggagcgatttgggtggcctacaatgcgtacgtctggatagagtatttctttctttctttcttcgtggaataaagtgctccgtgtgtgtgtggttggtggttgttggttggatcagtcagtgtgtgtgggtgcgtgttgtgtactcagtactcgtgatgtgtgtgtgtgtcatgtgt

SEQ ID NO: 6406 - DNA, 558 bp, Glycine max
ctttttagacgcagccgcttcacttctcccaggtaaaggaaaggttcgcccatggctccgtcgcagcccaagtcgggcctcttcgtgggcatcaacaagggccacgtcgtcaccaagcgcgagctgccgccgcgcccgtccgaccgcaaggggaaaggtaccaagagggtgcatttcgtcaggaacttgatcagggaggtcgctgggtttgctccgtatgagaagcgtatcactgagcttctcaaggttggcaaggacaagcgtgccctgaaggtggcgaagcgaaagttgggtacccacaagagggcgaagaagaagagagaggagatgtccagtgtcctcaggaagatgagatctgctggaactggaaccgagaagaagaaatagagcatcccaggctcatgaagttgatggcaatcttctgttctggtgtccagtttttactgcatgtagaacctactagacttgaaactgttatccgccagctaaacattatgctatgttgaacctcctgtcttgtgagatttttgagctaacttgcaatgcatcgtttgccac

SEQ ID NO: 6407 - DNA, 509 bp, Glycine max
atttcttcccgggcgctggcggcggattagggtttcacctgcatccattctcaacgttagcaggagcgagtgggagtccggccatggcgccgtcgcagcccaagtcagggctcttcgtgggcatcaacaagggccacgtcgtcaccaagcgcgagctgccgccacgcccgtccgaccgcaaggggaaaggtaccaagagggtgcattttgtcaggaacttgattagggaggttgctggattcgctccctatgagaaacgtatcactgagcttcttaaggttggaaaggacaagcgtgcactcaaggtcgccaagagaaagcttggtactcacaagagagcaaagaagaagagagaggagatgtcaagtgtccttaggaagatgaggtctgctggtggtggtggtgctggtgacaagaagaaatagagcgtggctagtcggtgaattttatcccaaaactctgtcctgtattaccagtccgtacctttagagctatctatggccatagtg

SEQ ID NO: 6408 - DNA, 536 bp, Glycine max
gttttttttgattattccggtttgttcttctgggacgcaggcggcggcttagggttttaactcgcatccattctcaaggttagcaggagaccggccatggcgccgtcgcagcccaagtcagggctcttcgtgggcatcaacaagggccacgtcgtcaccaagcgcgagctgccgccacgcccgtccgaccggaaggggaaaggtaccaagagggtgctgtttgtccggaacttgattagggaggttgctggatttgctccctatgagaagcgtatcactgagcttcttaaggttggaaaggacaagcgtgcactcaaggtcgccaagaggaagcttggtactcacaagagagcaaagaagaagagggaggagatgtcaagtgtcctcaggaagatgaggtctggtggtggtggtgccgcggacaagaagaaatagattttgcatgttggtgaaattctatttatctcaacgctttgccccgtatttccatattatgccaagtttgtagcctgtggcaattggatacgaatgtagca

SEQ ID NO: 6409 - DNA, 565 bp, Glycine max
  misc_feature (528)..(528): n is a, c, g, or t
  misc_feature (555)..(555): n is a, c, g, or t
atccctcccacacacctccgcctccaccccacccgccccgacccctctcctccaaggtaagcccgcggcggcggcgagcgagcggcggcgatgacgacccgcttcaagaagaaccggaagaagcgcggccacgtgtccgccgggcacgggcgtgtgggcaagcaccgcaagcatcccggaggccgcggtaacgccggaggcatgcaccaccaccgcatcctcttcgacaagtaccatcccggctacttcggcaaggtcggtatgcgctacttccacaagctcagcaacaggttctacaccccgacggtcaacgtcgagaggctctggtccatggtgccgtccgagaaggcggccgaggccggcggcgacaaggcccccgtggtcgacgtctcgcagttcggctacttcaaggtgctcggcaaggggatgctgccggagaagcccatcgtcgtcaaggccaagctcatctccaagatcgccgagaagaagatcaaggccgccggcggcgctgtcgtgctcgttgcctanggttctgttcgcgactgtgctttgagntctgttatat

SEQ ID NO: 6410 - DNA, 512 bp, Glycine max
actcctcccaaaccctagcgccggcgcctccacttctctgctccctcgtctcctcgcgcgcagggcccggcgaaagggaagcaagatgtacaccgccaggaagaagatccagaaggacaagggcgtcgagccctccgagttcgaggacaccgtcgcgcaggctttctttgacctggagaatggcaaccaggagctcaagagcgacctcaaggacctgtacatcaacactgcaatccagatggatgttgttggcaacaggaaggccgtggtgatccatgtgccgtaccgtctgcgcaagcccttcaggaagatccatgtcaggctcgtcagggagctggagaagaagtttagcggcaaggatgttgtctttgttgcaacaagaaggattgtgaggccacccaagaagggttctgctgttcagcgccctcgcaccaggaccctgacagctgttcatgatggtatcttggaggatgtcgtgtacccagctgagattgtggggaagcgtgtcagat

SEQ ID NO: 6411 - DNA, 546 bp, Glycine max
ctccaaaccctacctccgtgaaaccctaccaaccctaccgccacccctcgaccccctcaggcgaagaaagggcgaaagcaccatgtacacggcgaggaagaagatccagaaggacaagggcctcgagccctctgagttcgaggactccgtcgcgcaggcattcttcgacctggagaatggcagccaggagctcaagagcgacgttaaagacctctacatcaacgccgccttccagatggatgttgcagggaacaggaaggccgtggtcatccacgtgccgtacaggctccgcaagaacttcaggaagatccacgtcaggctcgtcagggagctcgagaagaagttcagcggcaaggatgttgttattgttgcaacaaggcggattgtgaggccacccaagaagggttctgctgttgttcgccctcgtaccaggactttgaccgctgttcatgatggtcttttggaggatgttgtgtacccagctgagattgtggggaaacgtgtcagatatcgcctagatggctcgaatgatcattaagatctttc

SEQ ID NO: 6412 - DNA, 827 bp, Glycine max
aaccctctctaaaccctagaacactaggcaccgccgccgccgccgctgctcccaggacagcagccaaggaagaggactccaagcctccgccatgccgaaatccaagcgcaatcgctcagtcaccttgtcaaagaccaagaagaagccggggctagagcgtaagggcaaggtggtcacggagatcaaagacgccattgagcgccacagcagcgcctatgtcttcacctacaacaatatgaggaatcagaagctcaaggacctcagggaccaactcaagtcctctagccggatattccttgctggaaagaaggtcatgcagatagcattggggcggtcacctgctgatgaagctaagacaggcctgcataaactctccaagttccttcaaggtgcttctggattgttatttacaaatctcccaagggatgatgtcgagagattattccgagaatttgaggcgaatgattttgcgaggacaggaagtattgcgactcaaacggttgagctaaaggaaggccctctggaacagttttcacatgaaatggaaccctttctgcgcaaacaaggactgccagttcgcctaaacaaaggtgttgttgaattggttgcagatcatgtagtatgtgaagaaggaaagcccctttcaccagaagcagcacacactctgcgcgtgcttgggacgaagatggcgacgttccgactgtaccttgtctgccgctggtcgtccgatgactttgaagtgtacaaggaaggcttggcgcacctgggaggtgaggaagctgacgagtcttcttaaggttgttggattatcatggtggcgtgcttgt

SEQ ID NO: 6413 - DNA, 500 bp, Glycine max
cccctactctttccctcgccgccgccgcctcctccttctcctcgggtgcgcacagtcgtccaccatgccgaagcagatccacgagatcaaggacttcctgctgacggcgcgccggaaggacgcgcggtcggtgcggatcaagaggaccaaggacgccgtcaagttcaaggtgcgctgctccaggtacctctacacgctctgcgtcttcgacgccgacaaggccaacaagctcaagcagtccctcccaccaggtttgagcgtccaggaggtttaagcatcaagccagacaatgccttttctagtagcgggaatgttctatccatcttgctttagtaactgttagcaggctctccttgtttacccccattaagagagttttgatgtcccaagactggaatgtaatgttgggagctatgtggttgaacctgtgaggatttttgtgttattttcacttgctggagaaggagatcaattatcttatcctaaaaaaaaaaaaaaaa

SEQ ID NO: 6414 - DNA, 785 bp, Glycine max
aaaccctagtccccccacaccaaccacccttctcccgccgccgccccgcgaagcaaagcaggaggagcaggatgccggcgggccacggtctgcggtcgcggacgcgcgacctgttcgcgcgcccgttccggaagaagggttacatcccgctcaccacctacctgcgcacctacaaggtcggcgagtacgtcgacgtcaaggtgaacggcgccgtgcacaagggtatgccgcacaagttctaccacggccgcaccggacgcgtgtggaacgtcaccaagcgcgccatcggcgtcgagatcaacaagcaggttggaaaccgcattatcaggaaaaggatccatgtccgtgttgagcatgtgcagccatccaggtgtgctgaggagttccgcctgaggaaagtgaagaacgaccagctcaaggcggaagccaaggcgcgcggtgaggtcatcagcaccaagaggcagccactcggccctaaacctgggttcatggtcgagggtaccacaattgagaccgtcactcccattccctacgatgtggtcaatgatctcaagggtggttactagggtgtttgggttatctgcctgcacaaccagttcaaatctatggtgctcttatgagtaggatttgctctctgagcagtagtctgggttgggtctttattcatgtcaagaagatattcggtgtaggttgctatcatgagttttgcagaaatgctatactgtgctatttccttcagaatgatgatgtgctctgttgaactatatagttacattgcttgcccc

SEQ ID NO: 6415 - DNA, 909 bp, Glycine max
  misc_feature (821)..(821): n is a, c, g, or t
ctctctcccgccgccgcccctcttctctcctctgcccacaaaaccctagccgtcgcctcacagctcgccgccgacgcagcgagctcttcctccaccgccgcaaccatggcgacccagatcagcaagaagaagaagtttgtgagcgatggcgttttctacgccgagctgaacgagatgctgacccgggagcttgccgaggacggctactccggcgtggaggtgcgcgtgacgccgatgcgcacggagatcatcatcagggccacgcggacgcagaacgtgcttggtgagaagggccgcaggatcagggagctcacctccgtcgtccagaagcgcttcaacttcccggagaacggcgttgagctttacgccgagaaggtcgtcaaccgtggcctctgcgccatcgcccaggccgagtcactccgctacaagctcctcggaggccttgccgtccgcagggcatgctatggtgttcttcgctttgttatggagagtggtgctaagggttgtgaggtcattgtgagtggcaagctcagggcccaaagagccaagtccatgaagttcaaggatggctacatgatctcatctggtcagccagtgaacgagtacattgactcggctgtgagacacgttcttctcagacagggtgttctcggtatcaaggtgaagatcatgcttgactgggacccgaagggcaaggttggcccgatcactcctcttccggacctggtgaccatccacaccccgaaggacgaggacgagccgcgccctccggtcttggcacctcctgaggtgtaaggtcccaactgtgtccttgaaatggnagtttgagcgggtcctagataggtttctatcttacgataaggacaatgctaagacagttggttaccttaatctttatggacagatgct

SEQ ID NO: 6416 - DNA, 504 bp, Glycine max
aaaaacctagcagtagatctaacgaaatggcgacggcgttgaagaagaacaggaagaagaggggccacgtcagcgccggtcacggacgtatcgggaagcaccgcaagcatccaggaggtcgcggtaacgcgggaggtatgcatcaccaccgtatcctcttcgacaagtaccatccaggttacttcggaaaggtgggtatgaggtacttccacaagctccgcaacaagttctactgccccattgtcaacctcgacaagctctggtctctcgtccccgaggatgtgaaggcgaagtccaccaaagacaaggtgccgatgatcgatgtgacgcagcacgggttctttaaggttcttgggaaaggtcatttgcctgagggcaagcctttcgttgtgaaggctaagcttatctccaagactgctgagaagaagatcaaggaggctggtggcgccgtcgtgctcactgcttaagttagttcgagtttctctcttaatttctgtcttgttg

SEQ ID NO: 6417 - DNA, 514 bp, Glycine max
taccgcagccgccacacacgacgaacaccgggacgaagcagatcggcggcgcgtcactccaatcaccggttaggataaatggcgacggtttcggattctctggtctgggagctcgtcaggaagaacaactgcttcctgatcaagcagttcggcaacagcaatgccaaggtccagttcagcaaggagcccaacaacctctacaatgtccactcctacaagtactctggcctggcaaacaagaagactgtgactgtgcagccagctgctgagaaggagatgactgtggtcctctccacaaccaagtcaaagaagcagaacaagcctgctgcgttcacccacaagactgtcatgcgcaaggagttccgcaagatggccaaggctgtcaagaaccaggtcagtgacaactactacaggcctgacttgaccaagcctgctcttgcaagactgagcgcagtttaccgcagcctccaggttgccaagtccggtgtcaagaagaagaacaggcagtaagcac

SEQ ID NO: 6418 - DNA, 2159 bp, Glycine max
cggaattcccgggtcgacccacgcgtccggtcacaccaaacagagcgcagaaaataaaataggtgaaatgaatatcgatttcaattccgccactgaatttcgaaaccaaaaaaccattccaacgaagaagatgaacctcgaagaagagggttagttacttctgagtgagtgagtgagttagtggttcctctgaggaacggtgaggaccttcaatttctcaagttctcaaccgttcgttttctctttcgttcccctaaccgccgtggatgggacaatctgtttcctccgccgccgtcgctagccgtcgcgagagggaccaaggccaccgctccgtcaactcttccaagaccagattcaccgcctcggtttcgccgatggccggttattcctccggcgccgccgaagaaggcgaaaaccatcgcgtggaggccgttgccgatgaatccaccgactacatctccgatctcccgaacgagtgcctggcttcggtgtttcagtttctcagctccgccgatcggagccgctgttcgctcgtttgccggcggtggctccagatcgaaggacagagccgccacaggctttctctgaacgccgaactggatctgtttccggcgattccgtcgctgttctctcggttcgattcggtgacgaagctcgcgctgaagtgcgaccgcagatccgtgagcatacgcgacgacgcgctcgtgctgatctcgcagcggtgccctaacctcacgcgcctgaagcttcgcgcgtgtcgcgagctcaccgacgcaggaatggaagcgttcgcgaagaactgcaagggattgaagaagctctcgtgtggatcgtgcacgtttggatccaaaggcatgaacgcggtgctcgacaactgcgccgcgctggaggagctctccgtgaagcgcctccgtggaatcgctgacactgcagcggcggagccgatcggtcccggcgtggctgcggcgtcgctcaaaactgtttgcctgaaggagctatacaacggacagtgtttcggaacgctgattctcggcgcgaagaatctgaaaaccttgaagcttttccggtgctccggcgattgggaccggctctttcaattattggtggatcgagtcacgaaaattgttgaggttcacctcgaaaggcttcagattagcgacgttggattgcaagcgatagcgaattattcgagtttggagattttgcatcttgttaagacacctgaatgttctgatattggacttgttgctattgcagacaggtgcaagcttttgaggaagcttcatattgatggatggaaggcgaatcgaattggggacgaaggtttgatagctgttgcaaaaggttgccctaatttgcttgaattagtgctaattggggttaaccctactaaggcgagtttggaaatgttggcgtctaattgccagaatctcgagcggttggctttgtgtggaagtgattcggttggtgatcctgagatatcttgcattgctgcaaagtgtgtggctttgaagaaactgtgtattaagagttgtcccgtttccgatcaagggatggaggcattggggaatgggtgtccgaatttggtgaaagtgaaggttaagaagtgtaaaggggttacccctgagggtggtgattggttgaggaggactagagggtcagttgctgttaatttagatactggtgaggcagagcttcaggaagccagtgctagtgatggaggggcacaggacaatggtgtagagttccctcaaatgcctgcccaaatcgctgctgcatcgagcagcactcggtctagttcgtcgaggtttgcgcttatgtctgcgaggatttcagcggctgcattgaggagcactcggtctggttcgtcgaggttagggcttttgcctacgaggatttcagcggctagcacttttaggagatggtctggtggtagcactagtgcacgccatggttagggacagggccaaagcaaaacctgagtctttgaccatttttcattgtttttggttgtcgtatcatttgatttttatatttcttgtacttaaatttgaaatttatgccgtgtgatgtttattgcctttggaattgaagcttcacggttgcaattgacaatcgcatttttttcctttctaaactttcctaaaaaaaaaaaaaaa

SEQ ID NO: 6419 - DNA, 625 bp, Glycine max
ttgtgtggaagtgattcggttggtgatactgagatatcttgcattgctgcaaagtgtgtggctttgaagaaactgtgtattaagagttgtcctgtttcggatcaagggatggaggcattggcaaatgggtgtccgaatttggtgaaagttaaggttaagaagtgtaagggggttacccctgagggtggtgattggttgaggaggactagagggtcagttgctgttaatttagatactggtgaggcagagcttcaggaagcgagtgctagtgatggaggggcacaggacaatgttgtagagtttcctcagatgcctgcccaaatcgtggccgcagcagcatctgcatcaagcagcaccactcggtctagttcgttcaagttgagattagggcttttgtctgggaggagtttagtggctagcacttttaagagatggtcaggtggtagcactagtgcacgccatggttagggatagcagggccaaagcaaacctgagtctttggccatttttcattgttttgggttgttgtatcatttgatttttatatttcttgtacttaaatttgaaatttatgccgtgtgatttttattgcctttggaattgaagcttcacggttgccagtgac

SEQ ID NO: 6420 - DNA, 1262 bp, Glycine max
ctatattttttttttttttctttctttaatcctagaaaaacttaattaaaaactcattctccattattcaggagaaaacaatcaacattgtgcgagtttcggtctacaagaacaataaacattttacatagtatggtagctgaagtcacagcttcagaaatgaaaccactctcaggctatagcactttaattaatctaatctcctatagaaaagccatttctgagatcatgactttaacacagcaaaactagtttgattcatgggagaagggagatatctgacagcaatttcatgaaatccatgattgtagcttcctctatacaacgtccacaaaaatatcaaattgcaattttaagtcactccccatctcccgttcaccctataaatgtgtcaaaattcataattccaatcacaaaaatttcccctccagagaaacccaagtataccatcaagatcttgacgccccacaaggttcactgagtacatacaaactctccttcagatataacacgtgtacatcccttcacataagcatatttaaatccgataggtcatccattggaatatcaaggccaatagaatcatggtctggcaaaccatcttcttcaaagttcaaccatgaactaagatcttgcgcaccaccaaattcttctattgaacttaagtcaggtagcggcaaattcccaaagtcattggattcctttatttgagaagtgtcctggttaccagataacgtagccccatctttgctatcattattgattgtatcatgaattggtaaacgagcagattcctttgcttccataaacctatcatgtccactagcagtactcttttgcttcttagcttttggtttgttctcattttggctactgtccagtgacatgcgtccagctctgccaatagaattttgtctgctctgatcccggctttgattcctctccctctcgcttctctttcccttcactccaccatgaacagcaccatcaagatttgatgctcttgaggaagaaccactgacaccaccattgaccaacatttccctcttcttttccttgataaacatggacccattcttggatgatgcttgctctgatgactgaattgaaccttgaaaagaatcaaccattcccctgtctgcatagtctctatggcaatcatatttctcagaagcactagaaactgcacctgattttctggcttcaatttgaactgaagctttgttacatgtattgctgggggggggggcctacgtagctga

SEQ ID NO: 6421 - DNA, 1652 bp, Glycine max
tcagctacgtaggcccccccccaaaagtcaccgattacgttctctaaaattcactcccaaaaaactctatttgattccaccgaaaccctaaccccctttcgacgaacgaagggcaatcagttgctcgctccttggatccattcttgaaattctcgttatcgctcttcgaactcaagctctctcgctcacgatttctgcttctgcaccaatttctgcggtttctcaagatttagaggttctaagtggttcatttctttgaagcatgccggggttaacgtgcaacgcttgcaacaccgaattcaaagatgatacagagcaaaagctccattacaaatccgagtggcatcgatacaatctcaagcgcaaggtggctggggttcctggggtgaccgaggcgttatttctggctagacaatctgtgcttgctcaagagaaaaataaactgggtgaaacccccatgctctacagctgtggtctttgtggaaaggattataaaagttctaaggctcatgctgagcaccttaaatcacgtggtcatatgatgcaggcctctgaaggaactagtcacgcagatgagaaggcaatagttaagcctcttccacaacgtgttgtgaataggcctcctcctaggagagaggtagataactctgaaaatgaggaaagtgaagatgaatgggaggaggttgatcctgaagaggatttggttgatggtgctgcaaagtccttgactgatttgaatgtgaatgagcatggtgaaaatgttgatatggaggtagatgatgattttgaggagttagacccctcttgttgctttatgtgtgatcaagagcacaaatcaatagaaaactgcatggttcacatgcacaagcatcatggattcttcattcctgatgttgagtatttgaaggatccaaaaggcctcctcacctatcttggccttaaggtcaaaagggactacatgtgtctgtactgcaatgatcgatgttatccattcagcagcttggaagcagtcaggaaacatatggaggcaaaaagtcactgtaaagtgcattatggtgatggtgatgatgacgaggaggtagaattagatgagttctatgattatagcagcagttatgtggatgatcaaggcaagcagcttgttgcgtcttgtgatgcatctaacaatgtagaacttgttggtgggtctgagctcataatcaccacgaaatctggtgaaagatcatcaaccaaaacactaggttcccgtgaatttttgcgttattatcgtcaaaaacctcggccatcactagcaaatatggctatcactgctgcgttggcttcaaggtacaggagcatgggcttgaccactatccaatcaagggagaagattgtgaggatgaaagtgctgaaggaaatgaataggtcaggtgtggacaatatgcgtactaagatggcgatgaagagtaatgtcatcaggaacctgccaaagaatgtaccatattagtcctcactggtaatagttttacatgagtggtgctgtgtattaattttttctatgaaataatttttcaaaaaaaaaaaaaaaaaaaaaaccacaaggtatccatcaaaggtagtagagtgacatgatatacatgatattttccaatgaggaattaggcattttactt

SEQ ID NO: 6422 - DNA, 523 bp, Glycine max
gccccccatttcgaagcccaccgaattcctcgcgattcctctcccctcgcctcctcgtcctccccctcctaggggatcgccggagaggaatcgcgacgagggcttcctcctatcagttaaatcaaagccatggagcacaaggagaccggctgccagtctcgggagggccccatcctttgcgtcaataactgcggcttcttcggcagtgcggcgaccatgaacatgtgctccaagtgccacaaggagatggcgatgaagcaggagcaggccaagctggccgcctcctctttcgacagcatcgtcaacggtggcgatgccgcgaaagaacatcttgctgctggcagcacggcggtggcagttgctcacgttgaggcgaagacgcttattaccgcacagcctgctgatatcgccggtcccagcgaggcggcgatggagaaccccaaaggcccaagccggtgcagcacctgcagaaagagggtcgggctgaccggattccactgccggtgcgggaacctgtactgcg

SEQ ID NO: 6423 - DNA, 530 bp, Glycine max
cttttgagctttcggcggcggcggcgcactcctcgtgttctcacccaggcgcgcactcctcctcctcgccgtcgtcgtcgcggatccaccgccgcttccgcagccatggtgaacgttccgaagaccaagaagacctactgcaagaacaaggagtgcaagaagcacacgctccacaaggttacccagtacaagaaaggcaaggatagcctttctgctcaggggaagcgtcgttatgaccgcaagcagtctggatatggtggccagacaaagcctgttttccacaagaaggccaagacaacaaagaagattgtgctgaagttgcagtgccagagctgcaagcattactcacaacgcgctatcaagaggtgcaagcactttgaaatcggtggagacaagaagggcaagggaacatctctcttctaagctgatggtatcctgttatgtttaggatgttgtgccagaacttcccacaagaagaatgtattatctttaattttctggttataaccctaatgggctatggagcatat

SEQ ID NO: 6424 - DNA, 694 bp, Glycine max
accccgccgccaactcctctcagagccttgctcccgcatccccgcgccgcgccgccgccgccgcctccgagcccctcgaagcccacctcgcagccatggcggagcagaccgagaagtctttcctcaagcagccaaaggttttcctcagcacgaaaaaggccgacaaggcaaagaggcctggcaaggctggcaaccgcttctggaagagtgttggccttggtttcaagaccccaagggaagcgatcgatggtacctacattgacaagaagtgcccattcactggaactgttgccatcaggggcagaatcatagctggaacctgccacagtgccaagatgaaccggaccatcattgttcgcaggaactaccttcattttgtgaagaagtatcagaggtatgagaagaggcactccaacatcccagctcacatctccccctgcttccgtgtcaaggaaggcgaccatgtcatcattggccagtgcaggcccctgtcgaaaaccgtgagattcaatgtcctgaaggtcgttccagctggaaccaccggaggcgggaagaaggctttcatcgctgcctaagcccagactctgatttatgagtagttcatagtcagaactttttcgcacttgaaatctaccaggctgctgtttcgagatttgattccgtgttatctgtcaaaccgaatgtcctgatttga

SEQ ID NO: 6425 - DNA, 485 bp, Glycine max
acatttcccagaccacccaaacccacacaacccactcggcggcggcgacggcggcggcggcggagcacgcgaagatggtgaagttcctgaagccgggcaaggcggtgatccttctccagggtcggttcgccggccggaaggcggtcattgtgcgcgttttcgaggagggcacgcgcgaccgcccctacggccactgcctcgtcgccggcctagccaagtaccccaagaaggtgatccgtaaggactcggccaagaagacggcgaagaagtcgcgcgtgaagtgcttcctgaagctggtcaacttcacccacatcatgcccacccgctacaccctggatgtcgacttcaaggacgtggcctccggcgggcccgacgccctcgccacccgcgacaagaaggtcgcctcctgcaaggccgccaaggcacgtctcgaggagaggttcaagaccggcaagaacaggtggttcttcaccaagctccgcttc

SEQ ID NO: 6426 - DNA, 651 bp, Glycine max
ttttttctccctcccacagcccacaaccccctcccccaaacccaccaccggcggcggcgcggcgcagctcgaggaaggaggcgaagatggtgaagttcctgaagcccggcaaggcggtgatcctgctgcagggcaggtacgccgggaagaaggcggtgatcgtgcgcgtgttcgaggagggcacccgcgaccgcccctacgggcactgcctcgtcgccggcctggccaagtacccgaagaaggtgatccgcaaggactcggccaagaagacggccaagaagtcccgcgtcaaggtgttcctcaagctcgtcaacttcacccacctcatgcccacccgctacaccctcgacgtcgacctcaaggaggtggcctccggcgcgcccgactccctcacctccaaggacaagaaggtgggcgccgccaaggccgccaaggccaagctcgaggagaggttcaagaccggcaagaacaggtggttcttcaccaagctccgcttctaggcctgcaggccgaccgcgcagggcgtttctctgccgttactacctgaacccgtttacatttttagctgcttgctcttggtatccgtccctgttttggaattgcccatgaagactctgtgtttagcgtggatcttatgagatatgatggtgt

SEQ ID NO: 6427 - DNA, 521 bp, Glycine max
attaatttcccagaccacccaatcccacacatcccactcggcggcggcggcggcggcggagcacgcgaagatggtgaagttcctgaagaccggcaaggcggtgatccttctccagggccggttcgccggccggaaggcggtcattgtgcgcgttttcgaggagggcacacgcgaccgcccctacggccactgcctcgtcgccggcctagccaagtaccccaagaaggtgatccgcaaggactcggccaagaagacggcgaagaagtcgcgcgtgaagtgcttcctgaagctggtcaacttcacccacatcatgcccacccgctacaccctggacgtcgacttcaaggacgtcgcctccggcgggcccgacgccctcgccacccgcgacaagaaggtcgcctcctgcaaggccgccaaggcacgtctcgaggagaggttcaagaccggcaagaacaggtggttcttcaccaagctccgcttctaggagcagagcgtctttacaatacttattagtagttcct

SEQ ID NO: 6428 - DNA, 598 bp, Glycine max
  misc_feature (524)..(524): n is a, c, g, or t
  misc_feature (571)..(571): n is a, c, g, or t
  misc_feature (586)..(586): n is a, c, g, or t
tttttttcccccgcacacaacccacaacccctccccaacccaccaccggcggcggcgcagcgcgaggaagaggaagcgaagatggtgaagttcctgaagccgggcaaggcggtgatcctgctgcagggcaggtacgccgggaagaaggcggtgatcgtgcgcgtgttcgaggagggcacccgcgaccgcccctacgggcactgcctcgtcgccggcctggccaagtacccgaagaaggtgatccgcaaggactcggccaagaagacggccaagaagtcccgcgtcaaggtgttcctcaagctcgtcaacttcacccacctcatgcccacccgctacaccctcgacgtcgacctcaaggaggtggcctccggcgcgcccgactccctcacctccaaggacaagaaggtgggcgccgccaaggccgccaaggccaagctcgaggagcggttcaagaccggcaagaacaggtggttcttcaccaagctccgcttctaggccagcccgtttgaccgggccccgagggntggtctcttgccggtactactaacccgaaccctttaacttttttagntggctggtataccgnggactgttgctg

SEQ ID NO: 6429 - DNA, 614 bp, Glycine max
aaaaccctagaagctccctgcctcctgcgcctccacttccatcgcctccccaagatcgcagatccgctccggtgagaatccgtcgccatgtcttccagcgaggtcgcctgcacccttgccgccctcatcctccacgatgacgggatccccatcacttctgagaagatcgcgacggtggtgaaggctgccggaatcaaggttgaggcctactggcccgcgctcttcgccaagctcctggagaagaggagcgtcgatgacctcatcctttccgtcggatctggtggaggtggtgctccagctgctgctgctgctgccccggctgctggtggtgctgctgccgctgaagagaagaaagaagagaaaaaggaggaggctaaggaagagagcgatgatgacatgggcttcagcttgttcgactaagcagttcaattccagttctcctgtggaatcttttatgctaaggattacttatcttatgtgcttttaggtcgaattttgcggatttaatatgtttgagacctaagtatctgtgcaatgagtactgcaaaccaccttgggatggtctttttagaatgaaaatggttctactgcttgctcccgcaaaaaaaaaaaaa

SEQ ID NO: 6430 - DNA, 838 bp, Glycine max
  misc_feature (685)..(685): n is a, c, g, or t
aaatttcatcctttatattaataaaactaataaatcaacactaatcgataaaaaaaattataacatgattgttttgaggaaaatatatacttctgttcttataaaaaaaaagttgacttctatgaagttgatccaaaactgaaacatgatggaccgcacaatattattaaaacttaaacttcatatttatttaaacactgcacaccaaattagagcaagctagaatcagttacaagtatcctatagttaatattgaacttgttttgcagagccatggacccggaaatagtaaagaagctaggaagctctcttctggtgccttctgtgcaggaattagcaaagcaaggcatcaccaaagtcccagaacgatatgttcgacccaatgaagacccatgtgttgaatatgacacaacatcgttgccacaagtcccagttatcgacctgagcaagttgttgtctgaagatgatgctgctgaactagagaagctggatcatgcgtgcaaagaatggggtttctttcaggtttggatgattattattggtttattgtgccccggccgtatgaagaaaaatgtgcaagagctcttcaatcttccacatgaagagaagaagttattgtggcagaaaccaggagaaatggagggatttggtcaaatgtttgttgtatcagaggaacacaaattanaatgggcagatttattctacatttccactcttccatcatacgcaagacacccccacttgtttcctaatattccccgacaattcagggataatctagagaaatattctttagaattgaaaaaactttgcatcctaatctttgaatttatgacaa

SEQ ID NO: 6431 - DNA, 1277 bp, Glycine max
agtgtgatattcataataatcgtacgatagataaataaaggagaaagaaaaaggaggtttgagagactagaagaggattgggatttggcaagagatttagattagcatggaatcaagaatggagtgtagtagtcatcaacaacctcagtcactgtaaatttttttggttattatttatctctctcaaatgcatatgcaatcgcaatcaattgcaaagcatttcggatccagagggagagaccctttgtgacagcctgtatcctctccatcgtctgatagattcttcattttttttccatttctcgcggcaagatctcacactctgcacctagggttagggttttggttcttgcggcatggcgacttcttcgagttcttcgagctggcgcgagggcatgtcctccgacaacataaagggactgtgcctcgctctctcttctagcttcttcatcggcgccagcttcattgtcaaaaagaagggtttgaagaaggccggtgctagtggaatcagggccggaagtggaggttattcttacttgtatgagccgctttggtgggtgggaatgataacaatgattgttggagagattgccaattttgcagcttatgcatttgccccagctatattggtcacccctcttggtgctcttagcattattatcagtgctgctcttgctcatattattttacgggagaggctacatatttttggaattctcggttgtgttttgtgtgttgtgggatctacgacaattgttttgcatgcacctcaagaacgggaaattgaatctgtttcagaagtgtgggatcttgctatggaaccagcatttctcttttatgcagctatggttataacagctacttttatccttatcttccacttcattcctctctatggccagacacacataatggtttatattggtgtttgttcccttgtaggttctctaacggttatgagtgttaaggctcttggaattgtcataaagttaacactgtctgggatgaatcagctaatttaccctcagacttgggcattcactctagttgtacttgtttgtgttcttacccaaatgaattatttaaataaggtacagtagtttttcttgttagttccctgaactttgttttatttgatgcactagtatgcacttgtttttgtaaacatccgacaagttttgtaatgtacttcactacttttggtcaacaagtatcatgtaacatgaaaatagtttgattgaatttccattaccattcagtgaaaaaaaaaaaaaaaa

SEQ ID NO: 6432 - DNA, 1061 bp, Glycine max
ggctcgagctctagccgactgtgtgttgtgggatctacgacaattgttttgcatgcacctcaagaacgggaaattgaatctgtttcagaagtgtgggatcttgctatggaaccagcatttctcttttatgcagctatggttataacagctacttttatccttatcttccacttcattcctctctatggccagacacacataatggtttatattggtgtttgttcccttgtaggttctctaacggttatgagtgttaaggctcttggaattgtcataaagttaacactgtctgggatgaatcagctaatttaccctcagacttgggcattcactctagttgtacttgtttgtgttcttacccaaatgaattatttaaataaggcactggatacttttaatacggcagtggtatctcctatatattatgttatgttcacaacatttaccattgtggctagtgttattatgtttaaggactgggatagacaaagtccaacacaagttatcacagaaatatgtgggtttgtgaccattctatcaggaacttttcttcttcacaaaactaaggatatggctgatggtttacaaccatctttatctgttagacttcctaagcattcagaagaggatggctttgatggtggtgaaggcattcctcttagacggcaagaatccatgagattgccatgatatattctttgcatcacatcttgcatttctaaatgagcttgaggcgctggggagggattttgccaaggtcgtctgtaatttactgattatttccctccccatcatattttttacctgatacagctgggtcgaaggatgagagtttcctatcactgttcttttggcctcctgatgattatgctttctgatcttgccttgcatgcccatctacactccataccggagacaaaagctaatgtaattttctgcccattgattatatatagtgtacctcagttaaatgaaaatattcatcatcaaattttgaactggacagcattgcaatgttattatcagtgtctgctgccatagagctcgagcagaccacaata

SEQ ID NO: 6433 - DNA, 1588 bp, Glycine max
cgagtcagctacgtaggcccccccccgctttatacctgaggaggtaaccaaagccgttcacacacccctctctcttcttcaaaacgcaccctattcctccccctattttgcatcgcatttgttcttgaatctctttggtattcctcactcagagcctctcatcagagagagagaaagtgagagatggagagaatgttccctcccaagaagccctctactatgaattcccatgacagacccatgtgtgttcaaggagactcgggtcttgtcctcaccactgaccctaaacctcgcctccgttggactgttgagctccatgaacgctttgttgatgctgttactcagcttggagggcctgataaggccactcctaaaaccatcatgagggttatgggtgtgaagggtctcaccctttaccacctcaagagccacctccagaaatttaggcttggcaagcagccccacaaggatttcaatgatcactcgattaaggatggtatgagagcttcggctttagaactgcagcgaaacactgcttcctcttctgccatgattggccgcaacatgaatgagatgcaaatagaggtgcagagaagacttcatgaacaacttgaggttcaaaaacattttcagctaaggattgaggctcaagggaaatacatgcaaagcatattggagaaggcttatcaaacccttgctggtgaaaacatggcatctgcagcaactaacttaaagagtgctattgtacctcatcatcaaggaatccctgacatgggagtagtgatgaaggagtttggttcccctcttggtttttcttcattccaagaccttgagaacatttatggaggtaaccaaattgaccttcagcagaacatggagaagccatcccttgatcatggtttcatgccaatcaatgagagcttgtgtttggggaagaagaggtccaataacccttatagtgggagtggtaagaaccctttgatttggagtgatgatctaaggcttcaagatttgggagggccagcatcatcatgccttggccctcaagatgaccctttcaaaggtgaccagattcagattgcaccaccaggatcattggatagaggagctagcactgacattgatcccatgtcagagatctatgactcaaaacctgtgcttcagagtgaagagaaaaagtttgatgcatcatctatgaagcttgaaaggccttcaccaagaagagcacctcttcagcctgaaaggatgagccctatgatcagcactggtaccatggcacaaggtagaggctcaccatttgggtgaatatcatagtttttaattaattagatcatttggctatgttatgtgtaattgatgacttgatcatgtgaaactctcttaatagtagtaccatatctagggtttttgaatttggtcttggaaattagcagttcttacgagggttatttcccccctcgtcaagtactgttatgtggtataatgcctttacatggcaaattaaaccaaagtcttaattctgacaaatataattaaagcacgtattattgtgcttgaatgtgagcaaaaaaaaatgtagctttaaaaa

SEQ ID NO: 6434 - DNA, 973 bp, Glycine max
  misc_feature (2)..(6): n is a, c, g, or t
  misc_feature (22)..(22): n is a, c, g, or t
tnnnnntttttttttttttttnttttttaaaaatgtggttccttctatatcacaaaccgttttcttttttttttttttttttttttttttttctttgaaccatgaagattaataagcatatataaggagaatataacataaaataaagtgcagctgggatatagatagtatgcatataacatataccagttgcatataacatacatgaaagaagaagatagaagagtagtgaaaaagacatatgaaattaaaaagcattggagcatgcgggctttaagttctcttaaccggatcaaagttggaaaccccaataacggctccaaatatggctactagaacaaacccaccagcaaagatgcttagcagaaagttcttgagggaaggggagaactcatatccagcagcatgagccacctccggaaccaccatagatgctgtcacagaagctgctgtgagtcctgcaactgccttctccttcaaagatgcattgatttgagccttggagtttgacactgcctttgtggtgaagagggtcctctttggttgccgtaggggtagtggcctgaagaaggcttcggatgaaggcttgttgttgttgataacagagctcagcgagaaagccatgggaacagaagcagaagccatttcggggttgtgttgtgcttgcttacctggcttggcctgaagattctgctgctcaagagattggggctcagagagtggatcacgaaaaggacaccattacgtgcctggcgcgaactggagattttatgttgacgtggcacctgtaggttatcctacgtgggattttctttacctggtattgggaggataaggttatcgataatctggaacatgatccacttaagagctgtggcttcaagagggataatgttgcttactcttgtgacattaaggagcaaggactaacttccccttctgtcgtcttctcgcagccgtacggacgcgtggg

SEQ ID NO: 6435 - DNA, 747 bp, Glycine max
atcacaaaccgtaatctcttagctgttttttttttttttcctaaacacattgaaccatgaagattaataaggaaaatataaaataaagtgcagctgggatatagatagtatgcatataacagaaccagttgcatataacttgcatgaaacaagaagctagaagaagagtgaaaaagagagagagaaaatgaaaagcattggagcatgcatgatttaagttctcttaaccggatcaaagttggaaaccccaataacggctccaaatatggctgctagaacaaccccaccagcaaagatgctgagtagaaagttctttagggaaggggagaactcatatccagcagcatgagccacctccggaaccaccatagatgctgtcacagaagctgctgtgagtccggcaactgccttctccttcaaagatgcattgatttgaggcttggagtttgacactgccttcgtggtgaagagggtcctctttggttggcgtaggggtagtggcctgaagaaggcttcggatgaaggcttgttgttgttggtaacagagctcagtgacaacgccatgggaacagaagctgaagccatttggggtgttgctttggttgtgcttacctggcttggcctgaagattctgctcaagagattgggcttcagaaaagtggactaaaaaagatgtaaggtgttcagccgtacccttctgtcgtcttctcgcagccgtacccttctgtcgtcttccggacgcgtggg

SEQ ID NO: 6436 - DNA, 653 bp, Glycine max
  misc_feature (593)..(593): n is a, c, g, or t
  misc_feature (608)..(608): n is a, c, g, or t
tctccatttgcgccgccgcctcccccgaagccatccgcatccccacgctcgctcgctcgcccgacgcgatggctcccaccaagaaggcgaagaagagcggggagaacatcaacaacaagctgcagctggtgatgaagagcggcaagtacacgctcggctacaagaccgtcctcaagacgctccgcagctccaaggggaagctgataatcctcgcaaacaactgccctccccttaggaagtcagagattgagtactacgctatgttggcgaaaattagcgtgcaccatttccatggaaacaatgttgatcttggaactgcctgcggcaagtactaccgggtgtgctgcctcagcatcctcgaccctggtgactcggacatcatcagcaccaccaccaccacccagtgaagagaagagaagagagctctccacctattttatttagtcgagttgtagggtcctgttgtgctctcgaaaccactcttgttatcttcggtttgtgtacctttttgcgacgctgagttggagctgtcatacagataatacttcatatggttgttccgctggacattcatgtggttttgttttcatganatcgttgtttcaatnttggttatactgttaaaaaaaaaaaaaataaaaaaaaaaaaaaaa

SEQ ID NO: 6437 - DNA, 1819 bp, Glycine max
ctcgagccgcggctcgagaaatgagttaagttgatttcggctgcgatcagccacgtaggcccggtggttggtttgactaaaccctaggagtaggagccgctttttggttgcgacttgggaggaagaagaagaagaagatgtctgcaactgcaagtgcaactttgctaggcatgccggggccatgggcttacgattatcacgagccatctgatccctatacaactaaaattggaggactccctgactggccccttcccataaacaccgatttgcttcgctgcgccgagtgcaccggccaactatgtctggtggcgcaggtttacgctcccctttctcaccaccggactctcttcgttctcggttgcgtctcgcccaattgcggaaccgcttggcgcgttcttcgacttcagaacgttgctgacgtggacacctctcagcaaaaacacgccgcgtccgttgctgaagttccaattgccaccgtgtcggacgacgacgacgacgacgacgcaattgacatggatttcgaacaactcggtaaggcactcttcgaagccgggacgctcgcttccaacaccaagcgcaagaaaccgcggaagaaatgccagaacaagctcccttcgtcttctccacatccaaaaacaacaacaactatagttcaaaatgacgtgcctgtggtgccatgcttttatatatatgcacaggaagagcagtctttgggggatattagttctgtatgttctagttactcgtccctttctattaaagggaatggaagtgacgtggaggatcccgatccttcacaggctgaagaaacctgggaaaaggaacaatatgaatacgataaagctttgaatgccgataggacgtacctcaagttcaagaaacgattggacgcgtatcctgagcaatgttttagatattcatatggtgggagaccaattttagctgcagctgataaaataaaccccggcagttgcagtctctgtggcagaccaatgcaatttgagatgcagctgatgcctccattactatactttcttcaggaagcacttggtgaccagagaaagatggtggaaaaatgggattggatgacccttattgtatatacttgctcagagagttgctgtgaagggattgaacaagcaaagtccaataacaagggctggattatagcagaggaggcagttgtagctcaatgtgaggaacccttggccgttcagcttggtgttgaggaagctatagcttaatcaaagaaaaggagttagcagtgtgttacttagtattggaattgcatttacaaagtaagatttggtgagttgaaattgtgtctggtgtatccatttggaccttctaacctgctacacaaatactcctggcttgagctagagagcaacaagatggatgttgcatacgctgccttccctggtctttctaaacaagttatgttcaattgtttataattttgaagcaggcttccgtaggctctcaaattgtagaacaaccaggtggagtcacatgccaacacactcataaatggtcacatcatcacaaatgtctcaatttaaatgattgctggtttaagttgaagaatatttctcatggattctccttcatgaattcagtgtctgattcatttgaattgtaaatgttagtttttggtcatgggcatgtagtccatattttaggtgttcacataatttttatcaattgttgcagatataggaacgaattcttaatgaaatttttacctatggaagtttgctttaaaatcaaataatatttgttgcaaaaaaaaaaaaaataaaaaaaaaaaaaaaaa

SEQ ID NO: 6438 - DNA, 675 bp, Glycine max
gttgtatgtattaaagtccataaacactggggagtgcccatggtacaaactctcaactctcaggtacacagatactgatctcctccagaggagtaccagcaagccagctggagagagttcttattcatattcagtataaactcgcataactagtgaccatactacatagggatagaggctgcgcgcttcaactccacgtggatggatgagctgagcaccagcttgacggatcgtcgcccattacaccctgctgcagtcgatgttgagactgatggtgtatgggaggttgacaccgcacttgggggggatgctgcgggcgttgtcctcgttgagattgtggatgccacgagcgatccccttgaggcagttgcaagcgctttggcgatcgctctgggatcgcgcctggttatggaggttcttgacgccgtcgcagcactgcccagacgggccggggccgccctgaacgtagctcaggcagggtctcaccaagctgtcaacgtggccgcagtcgatggccacggcagcgcgcgggaccgccgcgagcatgagcaccaaggcgacggccatgagcattacctgagcgcgggccatgatcacttcttggtctgtagctaacagtgcaccgtattagctagtgatgattgggtggagagatgagcaactcgtggttgtgtg

SEQ ID NO: 6439 - DNA, 1141 bp, Glycine max
  misc_feature (1107)..(1108): n is a, c, g, or t
  misc_feature (1110)..(1110): n is a, c, g, or t
ggctcgccaaacattcctctcttatctctagctatataataaacttttcctgtttccactcatcgatatctaacgctttagtcttgcaattgatatataattatcatccaaaacatgtcaccaacaaacaacacttttgcaatttttgtcatcttctgctgtgccatatcctttgccttcgcttctgaccctgacacacttcaagacctttgtgtggcacttccctcttcaggtgtgaaggtgaatggatttgcctgcaaggcagagtcaaatgtgacagaagctgatttcttctttgctggtttagccaagcctggagttatcaacaacacagtgggatctgtggttactggagctaatgtggaaaaaatcccaggacttaacacattgggggtgtcattctcaagaatagactacaaagctgagggacttaacccacctcacacacaccctcgtgccactgagattgtgtttgtgttggatggacaactagatgttggattcatcaccacagccaataaactcatctcaaagtcaattaagaagggtgaaatctttgtgttcccaaaaggtttggtgcactatcagaagaacaatggggataagcctgcttctgtgctttctgccttcaacagccaactccctggcacagtgtctatagctgcagctcttttcacttcaacaccaactgtgcctgatgatgttcttgctcaggctttccagattgatactaagaaggttgatgacatcaaggccaagcttgctcctaagaagacttaattttaagttgagcttaatcatattcaagagagagagcaagattcagtcttttaagtctactttccctatacttttccctataattcttgaagggttatgactcagtatcagtatcacttatggtgttacattttcctcattgatgtggtatcgagtattataatataattgtatcgcggaattatggtacatgttaagagtaatcaaaatttaattctatatactgtagaagctctccacttttttgtgggtatatatattattttcttgttttcgtggttcattgattttgtatacactgatcaataaaggttggacctttaccanngnaaataaataacaattaataaaaaaataaagg

SEQ ID NO: 6440 - DNA, 667 bp, Glycine max
  misc_feature (70)..(70): n is a, c, g, or t
  misc_feature (88)..(88): n is a, c, g, or t
  misc_feature (658)..(659): n is a, c, g, or t
aaaaaataccattggggtgaaatctgagagcccaaacgcaattcgtgttgggcctgaagggcccacgaangagctgtgtgtggccttnggtagatactaatggatcccctcagcgatgaatgctttttcccgtactccttcgacgatcgtcttcgccaatcgcctgcgtctctctctgaattgactagcttaaatggctggtcctaggattgcccatgctaccttgaaaggtccgagtgtggttaaggagatcataattggaataacacttggcttagctgctggtggtgtgtggaagatgcaccactggaatgaacagaggaaaaccaggaccttctacgatttactggaaaagggtgagattactgttgttgcagaggaacagtgaaaatgttcttgttttgttgcctatgctctccatttataggcttttttttcccgtgttatattcaattggctcttcaaatgtaaatgagccaacatactatgagattgaaaagaataagtttcttgaactgattgaatactatgttggcctgtaaaagtttcatgcagttatgtttttattttgtgcttggcttaaaaaaaaaaaaaaaaaaaaaaattttttaaaaaaaaaaaaaaaaaaaaaaaaaaaaaaaaaaaagaaaaaaaaaannaaaaaaaa

SEQ ID NO: 6441 - DNA, 2720 bp, Glycine max
ccacgcgtccgattgaattaagtgattgaatggttccgaaatgcacttgctgtctttttctacttgactattacaccttccccattttgatttgatctgattgaattggcctcttgccagcaaaacagaatgtggaagctcaagttcgccgaaggagggaatccatggcttcggacattgaacaatcacgttggaagacaggtgtgggagttcgatcctaagcttggatcgccgcaagatctcctcgagattgagaaagctcgccagaattttcacgataaccgctttacccacaaacacagcgctgatctacttatgcggatgcagttcgcaagagagaacccaacacgtgaagtcttgcccaaagtcggagttaaggatattgaggatgtgacccaagagattgtgacaaaaacattaagaagggccgtaagtttccattcaactctccagtgccatgacggacactggccgggagattatggaggtcccatgtttctgatgcctggcttggtaattactctgtctatcactggggcgttgaatacagtcttaactgaagaacatagaaaggaaatatgccgttacctctataatcatcaaaacaaggatggtgggtggggtttgcatattgaaggtccaagcaccatgtttggctctgtcttgagttatattactctgagattgctaggtgaggggcctaatgatggacaaggggaaatggagaaggcacgtgactggattctagggcatggtggtgctacttatataacgtcatgggggaagatgtggctttcagtacttggagtgtatgaatggtctggaaataatcccctgccccctgagatatggctccttccatacatgcttccatttcatccaggaaggatgtggtgtcactgccggatggtctatttgccgatgtcctacttatatggcaagaggtttgttggtccaatctcaccaacagtattatctttgagaaaagagctttatacagtaccataccatgatatagattgggatcaggctcgcaatttgtgtgcaaaggaagatttgtactatcctcacccacttgtacaggatattctttgggcatctctacacaagttccttgagcctattctgatgcattggcctggaaaaagattgagggaaaaggctattatttctgcattggagcatatacattacgaagatgagaatactcgatatatttgcataggtcctgtaaataaggtgttaaatatgctttgctgttgggtggaagatccaaattctgaggccttcaagttgcatcttcccaggatttatgattatctatggattgcagaagatggcatgaaaatgcagggctacaatggaagtcaactatgggacactgcttttgctgtccaagcaattattgcatctaacctcattgaagaatttggtccaactataagaaaagctcatacctatattaagaattcacaggttttagaagattgtccaggtgatcttaataaatggtaccgtcacatttcaaaaggtgcttggcctttttcaactggagatcatggatggccaatttctgactgcacagctgaaggactgaaagctgttctattactatccaaaattgcaccagaaatagttggtgagccaatagacgtgaagcgattatatgattctgtaaatgtcattctctcactacagaatgaagatggtggttttgcaacatatgagcttaaacgatcttataattggttggagataatcaatcctgctgaaacttttggtgacatcgttattgattatccttatgtggaatgtacatcagcagcgattcaagctttggcatcatttaggaaattatatcctgggcatcgccgagaagaaatacaacattgtatcgataaagccactaccttcattgaaaaaatacaagcttcagatggatcatggtatggttcttggggagtttgcttcacttacggtgcttggtttggggtaaaaggtctgattgctgctggaaggagtttcagtaattgctcaagcatccgtaaagcttgtgaatttctgctgtccaagcagcttccttctggtggctggggagagagttatctgtcctgtcaaaacaaggtgtattcaaatctggaaggcaacaggtctcatgtggtcaacactgggtgggctatgttggctctcattgatgctggacaggctaagagagattcgcaaccactgcaccgggcagctgcatacttgataaattcccaattggaggacggtgactttccgcagcaggaaataatgggagtcttcaacaagaattgcatgatcacatacgccgcatacagaaacatattccccatttgggcgttgggagaataccaatcccaagtattgcaatctcgttaatcgagccttagttagggtgtcatcctaattatttcgacctgtggacagtaaaagaaataataataataacctatttttcttttatttccatggctctcttaaaatgtttgtgactaatgagtttagtagtcagctaaaaaaaaaagcaaacacgtggagaatgcctgtaagttttttctattactcatagacgcctctcttgctttccctgcagcagaggaattaaatatatacataaatagagatataaatgtttatgtcacttcttttgggacgaagaacgcaattctttctagcaatcgattcaaattgtttcc

SEQ ID NO: 6442 - DNA, 1670 bp, Glycine max
  misc_feature (1621)..(1621): n is a, c, g, or t
tcgagtcagctacgtaggcccccccccccgatatgtaaatcattctaatttttcttctctaactttcgcatattcgaaaaccaaaagcatgggtcagggaacaccgggcggtctgaaccggcagggtcttccgggggaccggaagccggacggcggcgacaagaaggagaagaagttcgagccggcggcgccgccggcccgcgtgggccgtaagcagcgtaagcagaagggcccggaggcggcggcgcggctgccgacggtgacgccgctgtcgaagtgcaagctaaggctgctgaagctggagcgcataaaggactacctcttgatggaggaggagttcgtggcgaaccaggagaggctgaagccgcaggaggagaaggccgaggaagacagatccaaggtcgatgatctccgaggttctcctatgagcgttggtaacctagaggaactcattgacgagagtcatgccatagtttcgtcctcggtggggcccgagtactatgttggtatcttgtctttcgtcgataaggatcagctcgagcctggatgcgctattttgatgcataacaaggttctctctgttgttgggcttcttcaagatgaagttgatccaatggtctctgttatgaaggttgaaaaggcacctttggaatcatatgctgatattggtggtttagatgctcagatacaggaaattaaagaagcagtcgaacttcccctgacgcatcctgaactgtatgaagacattggtatcaagcctcctaagggagtcattttatacggcgaacctggaactgggaagacgttgctagctaaggctgtggcaaactcgacatcagcaacctttttacgtgttgttggtagtgaattaatacaaaaatacttgggagatggtccaaaacttgtaagggaacttttccgagttgctgatgatctttccccatctattgtcttcattgatgaaattgatgccgttggtacaaagaggtatgatgcccactcaggtggagaacgtgaaattcagaggactatgttggagttgctgaaccagttagatggtttcgattcaagaggtgatgttaaagtgattcttgcaaccaacagaattgaaagccttgatccagccctgctgcgacctggtcgaattgacaggaagattgaatttcctctccctgatatcaaaacaagaagacgcattttccagatacatacttcaaggatgacattagctgatgatgtcaacttagaagaatttgttatgactaaggatgagttctctggagctgatataaaagcaatatgtactgaagctggcttacttgctttacgagaacgccggatgaaggtgacgcatgccgacttcaagaaggcaaaggataaggttatgtttaagaagaaagaaggggtgccagaaggactgtatatgtgaagcatcttcatcatttaccccggccttctttctttattacagtctttttgttgttctgtgaacggatgtttgtattttgatttgtggtcgtttatgggtctacattatcacgggatttaatctcaactatagttacatagctttctttgatttaaaaaaatcgggaaaattttcctgccatttcttccaaanaaaaaaaaaaaaaaaaaaaaaaaaaaaaaaaaaaaaaaaaaataaaaaa

SEQ ID NO: 6443 - DNA, 1670 bp, Glycine max
tcagctacgtaggcgattgggtaccggccccccccaaaagccatctccctttcttcctaacacggaacactggtttcgaacccttgttgtggttaggtcttcacatttcgaatttgggaattcatgggtcagggaactccgggcggcatgaaccggcagggcgaccggaagccggacggcggcgacaagaaggagaagaagttcgagccggcggcgccgccagcacgcgtggggcggaaacagcggaagcagaagggcccggaggcggcggcgcggctgccgacggtgactccggtgacgaagtgcaagctgcggctgctgaagctggagcggatcaaggactacctactgatggaggaagagttcgtggcgaatcaggagcgactcaagccgcaggaggagaaggccgaggaagacagatccaaggtcgacgatctccgaggctctcccatgagcgtcggaaatctcgaagagctcatcgacgaaaatcacgctattgtttcctcctccgtcgggcctgagtattacgtcggaatcttgtctttcgtcgataaggatcagttggagcctggttgtgctattttgatgcataataaggttctttctgttgttgggcttcttcaagatgaagttgatccaatggtctctgttatgaaggtcgagaaagctcctctggaatcttatgctgacattggtggtttagatgcccaaatacaggaaattaaagaagcagttgagctacccctgacacatcctgaactatatgaagacattggtatcaagcctcctaagggggtcattttatatggagaacctggtactgggaagaccttgcttgcgaaggccgtggcaaactcaacatcagcaacattcttgcgcgttgttggtagtgaattgatacaaaagtacttgggagatggcccaaaacttgtgagagaacttttcagagttgccgatgatctttctccttctattgtattcattgatgaaatcgatgcagttggtacaaaaaggtatgatgctcactcaggtggagaacgtgagattcaaaggaccatgttagagttgctgaaccagttagatggttttgattctagaggagatgtaaaagtgattctggcaaccaacagaattgaaagtcttgatccagctttgctacggcctggtcgaattgacaggaagatagaatttcctcttcctgatatcaaaacaaggagacgcatctttcagatacacacatcgaggatgacattagctgatgatgtcaacttggaagaatttgttatgactaaagatgaattctctggagctgatataaaggcaatatgtactgaagccggtttacttgctctacgagaacgccgaatgaaggtgactcatgccgactttaagaaggccaaggataaagtgatgtttaagaagaaagaaggggtgcctgaagggctgtatatgtgaaatactatcctctatcatcctcgctcctcctgtctttttttcaatgttctagttatgcgaacaaatgataattcatttgtattatgcgaacaaatgtcagttttattttggaggctttgaatctcaacaacgattttaattcaatatagttttctttcaattccattgattttggaacccgttccatattctattataaagcagctcattaccct

SEQ ID NO: 6444 - DNA, 918 bp, Glycine max
gacccatcaactcggaaggcgcacgatggccagggttggaagacatgcaatcggcgacactgtcagaaccaccctcttctccggcttcttcttcttctccttcggttcccgatggagtaccattaacatcgtctctcccattgacattgcccatcgttgttgttatgcagggagagagagtgagggagtaagaagagaagaagaaaaaagaaaaaaaaaccggggggtgggataattggaaaacaagaatggctttacagagatcagggaaggccttcccaataatgaaggtgctgccatctggtgtataccaatttagatttattgtggatgggcagtggaggtacgcacctgacttgccttgggctcaagatgatgctgggaatgcatacaacattttggacttgcaggattatgttcctgaagacattggaagcatttctagttttgaacctcctaaatcaccagactctagctataacaacttacaacttagttctgaagattatgcaaaggagccaccattggttcctccatatttacaaatgacgcttcttaacattccgtcaacaaatatggaagtccaacctcttacatccagacctcagcatgtggtactcaatcatctttacatgcagaaaggaaagggtagcccttcagtggttgcccttggtacgactcatcggtttgtagccaaatatgtgactgtggtgctgtacaagtctttgcagaggtaaacaacataaattacatggactgtgtagtcttttaaacttgaagttaatatagcttcgagcagtacggttatgagtgagaaattctgagcatcataaggatcattacatgaaagtgaagattgtggtacatataatgcaattgcttgatggccattcatcatgcaattcagtttccattctt

SEQ ID NO: 6445 - DNA, 1520 bp, Glycine max
tcagctacgtaggcccccccccccggacattattctctacgctattgggacttaaatggcggattcagtgtcggtggacatggaagccatctctcctccacctgaggaacatataataagaactcgtcatggtcgtgtctccgttgctgtgtatggggaccaggacaagccagcgctaatcacgtatcctgatttggctttaaattatgtctcctgctttcaggggttattattttgtccagaagcctgttcactgctgctccacaatttctgtatatatcatattagtccacctgggcatgaggtctctaactttatgtcttgaaattttgggagctgctgccattgatccagatgatccaattctttctgctgatgacttggctgatcaaatagctgaagttcttaactattttggtcatagtacagtcatgtgtatgggagtaactgctggggcttacattcttaccttatttgctatgaagtatagacatcgtgttcttggtttggtactagtttctcctttatgtaaagcaccatcttggactgaatggttgtacaacaaggtcatgtcaaatttactctacttttatggcatgtgtggggtggtaaaagaaatattgctaaagcggtactttagcaaggaagttcgaggcagtgattatttgtcagagtcagatgtagttcaagcatgccaaaggtcattggatgagaggcagagtttgaatgtgtggcggttccttgaagcaattaatgggagatatgacataagtgaaggattgagaaaattacagtgtcgttcactaatttttgttggggatatgtctcctttccacgctgaggctcttcatatgacgtccaagttggatagacgactcagtgccctagtcgaggttcaagcgtgtggatcaatggtaacagaggagcaacctcatgccatgttaataccgatggagtattttctcatgggatatggcttgtacagaccatctaagctgagtgtcagcccaagaagtcccctgagtccctcttgcatttctcctgagctttactctccagagagtatgggtttgaaattgaaaccaataaagacacggatttccgtggagatatagtagtagtagtaggtgaataaagattgccgctctttttgttttgattgttgaacaagtttatatatagttctttgttttgtcaaaaatctgacaagggagggatgtcataaccttgtagatagagggagacttggaaagaaataaacagagggaaaaaaagggggaagagtttagttgaaagcagctgtagtcattctttgatttgtaatcatagactttcgtttggttggtaaagcttcgaaattgttgtttttggacaaataaaaataataaagttcttgttaccactgtaaagctaacacggtgagcaagcataatgccgaccccatgcaatgctacacattgttttcatgtcgtcaaaaaaaaaaaaaaaaaaaaaaaaaaaaaagcggccgctctagagga

SEQ ID NO: 6446 - DNA, 837 bp, Glycine max
  misc_feature (789)..(789): n is a, c, g, or t
  misc_feature (805)..(806): n is a, c, g, or t
tacggctgcgagaagacgacagaaaatcgcagtgttgccattaacacaaacatcttcaatcttcatctccacctgcattcccaattcctctctctatccatggccgattcaacctcaagcgattcactctcactcgacatcgattccttttctccttcacctcaggaacatatcatcagaacacgtcatggttctgtatctgttgctgtatatggagaccaggataagccagctctaatcacatatccggatttggctttaaattatgtctcctgctttcaggggttattattttgtcccgaggcatattaccttctgctccacaatttctgcatttatcatattagtccacctgggcatgagttgggagctgctgcaatcgatcaagatcacccaattctttctgtagatgatttagctgatcaaatagccgaggttctcaacttttttggtcttagtgcagtcatgtgtatgggagtaactgctggggcttacattcttaccttatttgctatgaagtatagacaacgtgttcttggtttgatacttgtttctcctctatgtaaagaaccgtcttggactgaatggttgtacaacaaggtcatgtcaaatttactatacttttatggcatgtgtggggtgggtaaggaaatattgctgaagcggtactttagcaaggaaattcgaggtggcactcaattgccggagtcagatatagttaaatcttgtccaagggtgttggatgagaagcaaaatttgaatgggtggcgattcctggaactaataacnagaaaccctcaataannaacggcccaaaacacaacatgccggtcccta

SEQ ID NO: 6447 - DNA, 1884 bp, Glycine max
aacatcttcaatcttcatctccgccggcgtgcccaatttcattccatggccgattcaacctcaagcgattcactctctttagacatcgattccttatctccttcacctcaggaacatatcatcagaacacgtcatggttccgtatctgttgctgtatatggagaccaggataagccagctcttatcacatacccagatttggctttaaattatgtctcctgctttcaggggttattattttgtcccgaggcatattaccttctgctccataatttctgcatttatcatattagtccacctggacatgagttgggagctgctgaaatcgatccagattaccctattctttctgtagatgacttagctgatcaaatagctgaggttctcaacttttttggtcttagtgcagtcatgtgtatgggagtaactgctggggcttatattcttaccttatttgcaatgaagtatagacaacgtgttcttggtttgatacttgtttctcctctatgtaaagaaccgtcttggactgaatggttgtacaataaggtcgtgtcaaatttactatacttttatggcatgtgtggggtggttaaggaaatattgctgaagcggtactttagcaaggaaattcgaggtggcactcaattgccggagtcagatatagttaaatcttgtcgaaggttgttggatgagaggcagagtttgaatgtgtggcgattcctggaagctattaacgagagacctgacataagtgaagggttgagaaaactacattgccgttcgcttatttttgttggggatatgtcaccatttcactcggaggctgttcacatgacttcaaagttagacagacgattcagtgccttagttgaggttcaagcatgtggatcaatggtaacagaggagcagcctcatgccatgttaataccaatggagtactttctcatgggatatggcttgtacaagccatccaagctgagtgtcagcccaagaagccccttgagcccatcttgcatttctcccgagctttactcgccagagagtatgggtttgaaattgaaacccataaagacacgaatttctctggaaatctagaagtagatgaataaaaggctgggaaaatggtgccccttctcatctgttcatgaaagaacaagttcatgattgtatggttagtgggaatgaatgaggggatgccatgccagatcgttgtagatagggggagataaggaaataagaaatcaacaaaagaggaaagaaatgggaagcggttagtagaaatcaacatatagtgattctttcatttgtaatcaatcatagatcatagattttagtcaatgagtttcaaacctgagtagttgtaaagcttcgggattgttgttttcttattagggggtaaaaatgaaagttcagattacaattgtaaaataaatatggagggcatgaggtcgttaccgtgctgtatctcctgttttgaagtatttccatgttgtaggcatcttattcactgtcaataaaaaaaaaaatgttgtctgttaaaaaacaaaaaaaaaaaaaaaagcccccacccccaaatgattctacgtactattctttgttactgcttgctactatattgataaatatcatgcaggtaaatagcgaattgtatgcaacaaacactcaacaatgtttagcgtaattgttggataaataaaataattattctaattctatgaacatgctacatgtgtcgtaaccttaagaaaaagtaaaagtaaaatacaattgtgatcatgttctcagctgattgttagatgcatgaatcaatgtctaatgtagttatacatgaaacattaagaagtcgtcaacaaaaagatattaaactctactgcaggtcgatct

SEQ ID NO: 6448 - DNA, 1949 bp, Glycine max
cccatttgaaaaaaattgcattgattcctattaaaacagccaatacaccactctcaccccctaactcaaaatgtccttcttttcctcctccaacctggccaccgccaagacggtgctctcggcggcggcctcggtggctgccaccgcaatggtggtccgctccgtggcgagcgacctcctcccgtcggagctccggtcctacatcaccaacggcatccacagcatgttctggcgcttctcctccgagataaccctggtcatcgacgagttcgacggcctcctcaacaaccaaatctacgaggccgccgaaacctacctcggcgccaaaatctctcccaacacacgcagacttaaagtcagcaagcccgagacagacacaaccttcgccctcacaatggagcgcaacgagtccttaaccgacgttttcagaagcatgaaatttaactgggttctcgtctgccgtcaggtcgagtccagaggcttccacaaccctcgcgacctcaacgccaccatgaaatccgaggttcgctccctcgaactcacttttaacaagaagcataaagacatggtgctccaaacctatcttccctatatcctcaacgaagccaagtccatgaaacaagctacaaaagcgcttaagatcttcacagtcgactaccagaacatgtacggcaacatcagcgacgcgtgggtggggatgaagctggaccatcccgccacgttcgacacgctggcgatggagcgtggcgcgaaggagtttgtcatgagggacttggagaggttcgtaaagaggaaggagtattataggagagttgggaaggcgtggaagagagggtatttgctgtatggtcctcccggcaccgggaaatcgagcttgattgctgccatggcgaattacttgaagtttgatgtgtatgatgtggagctgacggagctgaatgctaactcggagctcaggaggttgctcattgcaatggcgaataggtccattcttgttgtggaggacattgattgcactgttgagtttcatgatcggagagctgaggccagagctgcttctggacataacaacgacagacaggttacactatcgggtttgcttaatttcattgatgggttatggtcaagttgtggggatgagaggatcatagtgttcacaacaaaccacaaggacaagcttgaccctgcattgctgcgccctggtcgaatggatgttcacattcacatgtcctattgcactccctgtggtttcaggcagctagcttccaattacctcggaatcaaagagcattctctcttcgaaaagatcgaggaagagatgcagaaaacccaggtgactcctgctgaggtagcagaacagcttctgaagagcagccacatcgaaactagcctcgaacagcttatagatttcatgagaaagaagaaagaaactcagaaattggaggctaaaaagaaggaacaagaggccaaagaggaacagcagagaaaggaaattgatgatggtggtaaaggagaaaaagttgacagtgatgataacaataatgaaaagaaaagtactactacctagttaaataacacttcttgaaacttttgattaacatcataccttaatcaaaaacttgaagactcatatttatgaattttatctttatttatatggtgttcaattttcttatttttatttaatatgaaactttatttttcacttgtattccaacaatttacctgttgatggaaaaaggattgttgttagtgttcgggagtgggtgtcaattgtcaaaccgcccatatttttgtttgctaagaaaagcattaactgttcatgtcatattggcacggagaatacttctatatttttgtatgtatagtcgttacgcttatttttatctctctttttacctttcacatcttttttatttcatgaatgcagagaatgcttccaattagct

SEQ ID NO: 6449 - DNA, 2212 bp, Glycine max
caaccccccgtcccctagaagctgcttgttctagagccttcccttcacttcccttgcccttgaaaaggaagcgtgaagcgtttcccctccgcattagcctgtctttgcagtctgcaacaacttcttcttgagtgttttctcagttcctcacatcatgtaccgctttgcaacctccctcgcctccaaagctagaattgccaggagcagcactcaacagattggaagtagggtcacttggaacaggaattatgcggccaaagacattaagtttggtgtggaggctcgggctctgatgcttaagggtgtcgaagagctcgctgatgccgttaaagtaacaatgggccctaaggggcgtaatgtggttattgagcaaagttttggagcacctaaagtgacgaaagatggagtaaccgttgctaagagcattgaattcaaggacaaagtcaagaatatcggtgccagtcttgtaaagcaggttgctaatgctactaatgacgtggctggtgatggaaccacttgtgctacaattcttactaaagcaatatttacggaaggatgtaaatcagttgcagctggaatgaatgcgatggacctgagacgaggtataaatatggctgttgatgctgtggtgacaaatctgaaaagcagagcacgtatgattagcacttctgaagaaattgcccaggttggaacaatatctgccaatggggagagggaaattggtgagttaattgcaaaagctatggagaaagttggcaaagagggtgtcatcacaatctcagatggcaagacattgtacaatgagttggaagtcgttgaaggaatgaagctcgacaggggatacatttctccatatttcataacaaaccagaagaaccagaaatgtgaacttgaggatcctctcattataatccatgaaaagaaaatctcaagcataaatgctatcgttaaagtattagagttagctttgaagagacaaagatctttattgattgtcgccgaggatgtggaaagtgatgcccttgcaactcttattctaaataaacttcgtgctggaatcaaggtatgtgccatcaaagctcctggttttggtgaaaaccgtaaatctggtctccaggatcttgctgttcttacaggaggtcaacttatcaccgaagagcttggtttgaatcttgaaaaagtagacctggacttatttggctcttgcaagaagataacaatttctaaagatgacactgtcatccttgatggagctggtgataagaaagcaattgaggaaagatgtgagcagattagatcagcaattgaaaatagcacttcagattatgacaaggaaaagttacaggaaagattagccaagctttctgggggtgttgcagtactgaagattggaggagccagtgaggctgaagttggtgagaagaaggatagagtgacagatgccttaaatgcaaccaaggcagctgtagaggagggcatagtacctggtggtggtgttgctcttctttatgcatcgagtgagttggataagcttcaaactgccaactttgatcaaaagataggtgtccagatcatccaaaatgctttgaagactcctgtgcacacaattgcttcaaatgcaggagttgagggtgctgttgttgttggcaaactattggaacagaatgatcctgatcttggatatgatgcagccaaaggtgaatatgttgatatggttaaaactggaattattgatccattgaaggttattaggaccgccttggttgatgcagccagtgtgtcatctttgatgacaacaactgaagctgttgtgtctgaactcccgaaggacgataaagatgttcctgccatgggtggtggcatgggtggcatggattattaaggggctattttccctgatcaaccttgcttcctttaattggacgtagattggggtggtgtttcaccactattttgccttttttttctttcttatttattgacagaaggcatcaatgtaatcatagtgagagataagagatctagggagggaaatttgtggttgttgttgcaatgacattaaggaacgtctgaaacaaaaacaattttcagattccaaattattaaacattgttccattctgaagttgtcaattgaaagacggccccttaataatttcaaaaaaaaaaaagctaatataaaataaaaaaaaaaaaaaaacaaacaaataatg

SEQ ID NO: 6450 - DNA, 1559 bp, Glycine max
cgtttgcattgcttcctgcattttctttaccttccatactcacatcatgtatcgctttgcttctaacctcgcttccaaagcaaggattgctaggagtagcagccaccagattggaagtaggctgagttcgagcagaaactatccggctttccccggtcgacccgctgcggccggctcgggctctgatgcttaagggtgttgaagagcttgctgatgctgtcaaagtaaccatgggtcccaagggccgtaatgttgtgattgagcaaagttttggtgcccctaaagtaaccaaagatggagtaactgttgcaaagagcattgaattcaaggataaagttaagaatgttggtgccagtcttgtaaagcaggttgctaatgctactaatgatgtggctggtgatggaaccacatgtgctacagtccttacacgagcaatatttactgaaggctgcaaatcaatcgcggctggaatgaatgcaatggacctgaggcggggtataagtatggctgtcgatgctgtggtcacaaatttgaaaagcagagctaggatgattagcacatctgaagaaatagcgcaggttgggatgatatctgctaacggagagagagaaattggtgagttgattgcaaaagctatggagaaagttggcaaagagggagtaatcacaatttcagatggcaaaaccttatataatgagttggaagttgttgaaggaatgaagctcgacaggggctacatatctccttatttcattacaaatgataagaaccagaaatgtgaacttgaagatcccctcattctaattcatgagaagaaaatctcgagtataaatgctatagttaaagtcttagagttggctttgaagagacaaagatctttattgattattgccgaggatgtggaaagtgatgcacttgcaactcttattctaaataagcttcgggctggaattaaggtatgtgctattaaagcccctggttttggcgaaaataggaaagccaatcttcaagatcttgcagttctcacaggaggagcacttattactgaagagcttggcttgaagcttgaaaaagtggatttggatatgcttggcacctgtaaaaaaataacagtttctaaggatgacactgtcattcttgacggagcaggtgacaagaaagcacttgaggaaagatgcgagcagattaggtctgcaattgaaaacagcacctcagattatgacaaggaaaagttacaggaaagattagccaagctttctggtggtgttgccgtgcttaagattggaggagccagtgaagctgaagttggtgagaagaaggatagagtgacagatgccttaaatgcaactaaggctgctgtagaggaaggcattgtatcaggtggtggtgttgctcttctatatgcgtcaaaagagctggataaacttcaaactgctaacttcgatcagaagatcggcggccatattatccaaaatgctctaaagacacctgttcttacaatctcatcaaatgccgttgttgttcctgcccctgctcgtgtcaaactacttgaacttgac

SEQ ID NO: 6451 - DNA, 1055 bp, Glycine max
  misc_feature (905)..(905): n is a, c, g, or t
gagaagaaggatagagtgacagatgccttaaatgcaactaaggctgctgtagaggaaggcattgtatcaggtggtggtgttgctcttctatatgcgtcaaaagagttggataaacttcaaactgctaactttgatcagaagattggtgtccagattatccaaaatgctttaaagacacctgtgctcacaattgcatcaaatgcgggtgttgagggtgcagttgttgttggcaaactattggaacaggagaatcatgatctaggatatgatgcagccaaaggtgaatatgttgatatggttaaagctggaatcatagaccctttgaaggtgattaggacagccttggttgatgcagccagtgtatcatctttgatgacaacaactgaagctgttgtgtctgaacttccaaacgatgataaagatactccagctatggctggtggcatgggtggcatgggttattaaccagcttctattgatttggttgcacctgaaaacaaggattagtgctgaatccacacttactgtcttttttttttttggggttaaattatttgttgtgtgaggcatcactgtaatcatagtgagagatcaagatgtaggtaaggaaatgtaactgcaataaataagatatttggagcaattttcacctcccaaatcaaggccattgttgttccctgaaaaaaaaacagtttgaaggatattcttgatatatttctaacatagtatggtccgttcacatttagtacgtaaattttgttttggaattcataacaaaaaaaaaaaaaaaaaaaaaaaaaaaaaaaaacaaacaaaaaaaaaaaaaaaataaaaacagccaacaccaacacatgatctaaaaaactcggtttaacaccccattaaatttatagtggggcccttantactcatcaaaaacggcataggtgttctgtaggagaaaagaactcatcctatacggaaaaatacactccaatgaatctttggaaattgccacaacttatttattgctttttggcctttttatagggtgtgtttttcttgcctctgaccca

SEQ ID NO: 6452 - DNA, 1715 bp, Glycine max
caggttacccgggtcccggactctcccgggctccaactgggttgaaagtgagcaatgtcgttcgcagtggcattgtgtacaacgtcgtcgttcttcccttcccgttttgaaattcgcaatccaaagcagcttcagcttccacctctcctttcaatgtcactgtcgtcgaagctaccgttgcatttctccggcaatgccatattcaaccgcaaccacccaaccatgttcaaaattcgagcctcaaactcttcatccaaactcgtcttattgagctccactatcgtcgtcacaacagcggtagcgaatcgcgtgctctacaaattggcccttgttcccatgaaagagtaccccttttttctcgctcagttcataacttttgggtatgttgttatatatttctcgatcttgtatttccggtaccgggcgagaattgtgaccgatgagatgctggcaattccgaaattgcgttttgtggccattgggtttctagaagccttgggcttggtttccggaatgtcagctgcagccgtacttcctggaccagtcatacccatattgaatcagacttttttggtttggcagctaatgttttctactcttctcttgagaagaagatactcaatcaatcaattggttgggtgcttacttgtagctgttggtgttgtggtggctattacaagtggctcaaatacaggtcagatgctctctgaagttcagttcttttggccagctttgatgataatctcatgttcctttcaagctttggcttctgtaatcaaggtgtgtctcctccctgatgctgcttctcgatcattgccctggtcactggacatatttgtggtcaattctttcggatctgggtttcaggctcttttcgtacttctgtctctacctatactttctaacttgagaggtataccatttgatcaacttccttcatattttaaaagcggtgctggttgctttctaaaccttggagccgataatccaaattgttatggcgctcccttgcttccactactttacgtaattatcaacttggcattcaacatatccctgcttaatgcagtaaaaacttcgtctgcagttgtggcttctcttctgtgccaatttctgtttatattctttcccttccattaccatatcttcccgagcgacgtaggcccccccccccctttttgtttggcggtgcaattcttctctgtggtctttttctgtacaacacaacgcggcctgtaaggaacagttctgaagatgactgaaacagttgcagttcatgaaaccaatgctgaggagaaactatcggctaggaacctgccaaaaaagaatgtcaaccttgaggcattcttgaccgcggtgaaatatattttctccgatcacctccaaattatacacattcactatcatcgtgattatttttttgagcagaaaatttgttcagttttcacgtttaagggtcgcttagctgctttatgatggttgacttcgtcattctgccactggatcattgtaactcaagattgtgcatatatctctgatgacttgttcaagtatattttcatgtacattaataaaagcagacaaatgtaattggcagaaaaaaaaaaaaaaaatttttaagttgggtgatcaaaaaaaaaaaaaaaaaaaaaaaaaaaaaaaaaaaaaaaaaaaaaaaaaaaaaaaaaaaaaaaaaaaaaaaaaaaaaaaaaaaa

SEQ ID NO: 6453 - DNA, 1696 bp, Glycine max
actcgagccgaatcggctcgagttggaagtgatctaagttggttgaaagtgagagcaatgtcgttcgcagtggcattgtgttcaacgtcgtcgttcttcccttcaggtttcgcaattcgcaatccaaagcagcttcaacctttcgtttcaatgtcactgtcttcgaagctaccgttgcatttctccggcaatgccagattcaaccgcaaccacccaaccatgttcaaaattcgagcctcaaattcaaactcttcatcttcatccaaactcgtcttatttagctccactatcgtcgtcacaacagcggtagcgaatcgcgtgctctacaaattggcccttgttcccatgaaagagtacccctttttcctcgctcagttcataacttttgggtatgttgttatatatttctcgatcttgtatttccggtaccgggcgagaattgtgaccgatgagatgctggcgattccgaaattgcgctttgtggccattggctttctagaagctttaggattggtttccggaatgtctgctgcagctgtacttcctggaccagtcatacccatattgaatcagacttttttggtttggcagctaatgttttctactcttctcttgagaagaaggtactcaatcaatcaattggttgggtgcttacttgtagctgttggtgttgtggtggctattacaagtggctcaaatacaggtcagatgctctctgaagttcagttcttttggccagctttgatgataatctcatgttcctttcaagcttgggcttctgtaatgaaggagtctattttcattgattctgctactcaattaaagcacaagtcactggacatatttgtggttaattctttcggatctgggtttcaggctcttttcgtacttttgtctctaccaatactttctaacttgagaggcataccatttgcacaacttccttcgtattttaaaagtggtgccggttgctttctaaaccttggagccgataatccaaattgtgatggtgcccccttgcttccactactttacgtaattatcaacttggcattcaacatatccctgcttaatgcagtaaaaacttcgtctgcagttgtggcttcccttctggtaatgttgtcagtgccaatttctgtttatattctttcccttccattaccatatcttccagagggaacaagcctgagcccattttttttgcttggctgtgcaattcttctatgtggtctttttctgtacaacacaacgagacctgtgaggagcagttctgaagatgactgaaacagttccagttcatgaaaaccaatgctgaggagaaactatcaactagggaccctgccaaaaaagaatgtcagccttgaggcactcttgattcactaccattgtgattattcttttgagcggaaaatttgttcagttttcacgtttaagggtcgctttgctgctttatgatgactgacttcctcattctgccactggatcattgtacattaatagaagcagacaaatgtaattggcagaaatgtaagtgcagaacgtttttaagttcagtcatcttattggttggcatttttactaaatagattacaagagtttggcgatgagatatattgaagttgattagttttacgagaagcggacattgcctcactattgtatttaaaagtgatggaaaaattacctttcattttaa

SEQ ID NO: 6454 - DNA, 1608 bp, Glycine max
  misc_feature (972)..(972): n is a, c, g, or t
aaaaaagcaagagagaaaggaagattaagatcgtgtctattttgcaatcaaaatcccttctaacttctccgttgatgtatgtatattttgttcacagagcaaaccccacaatccacatgataatgataatgatggcgatgtctttctctctctcttttcctctcacactcttcccatctattccctcatggtttcttctctcttccttcccaataaaaattacccacttctaatcagacaaaaagtagagtggttataagtccatttgtttcttcagtttccacacaactttcaccagaagaaactaacaccttccgttactggctttttctgtgtccttggcaaccctttgctgattttcactgccacaatcacaaccaattgaagaagaagtttctgggttatggttcacgggtgccgtatagttatataatctgagctgggccccattccatacgcaacttttcctccttcattctccttttttttttattgtcttaagaagtgatggacatggaagaaatttcagagttgaatttggatggtttttcttcttctcacgaggttttggaatcagaacagaagaacatgggtacccagagaatcttggtttcagatcacacaaacggatatcagtattcggctgaggaagctgatagctttgtgattgatatggattccttctcttccggcatcaataaagatagcactaaagctaattccagaattacattgcagcggagcctttccaggaaaggatctcagcgtgggggcgacaggaaggtgaatggcaatgtcacacttcatgatagggatactgccccaactacatgctcaccaaaagctgctctagcagggtcctgcacggctgaaaagtcagcggtggtggcagtagggtccacacatcattccacaaacacacaagttcatcatcagattactattactgccagtaacatgtgcaccaccacnccccacccccaacgaaagcaaatttataactcgaagaaatagttttaaacgaccttcttcatggctccttgatcctaaaagagttcttctcctctttgctaccttgtcaagcatgggaacaatgttgctgatatacttcactcttactatcagcaagcaaaaagcagatgaatatgggagtgactggcagcagtgactgatgccactgattaatatggaacgaatgagataatttgtcgtgtgaattataaatcctaggattggagcaaaactcaggaacaagaagtttgagaccaaatttgcagaacttgcaataactgacaaaaatttcaactacctgtcagactcagttacctatttggaagctaaaaaaggcaaatacaatgacataatacactacgatagacaggaagaaatatttcttttatatgaatggaaaccagcaagttagcaacggataaaagatcacatgtaagagagtgctctgtagtttatttggagtgtcatttaagggcataacggagttggaggatcagaaagttacgtttttgctctttctactcagttcttatttttatcccctgtatcttttgttgctcctcttgcaggcagatggcaaaagtgaaccctttttct

SEQ ID NO: 6455 - DNA, 935 bp, Glycine max
ggtttgctgactcttcttctccttcccccaatccccaatccctctttcttcgtttcagttcaatctctctctctctctctcttcccaattcgcaagtttcactgcacaatcacactgcatatacctattcatttagccacgaacttcacattggggtggttgcagcaacaagtttctcacaccagagagggcacacgatttggactaagagtgtggtatttgaggtaaaaatgggagttattcagaagtttttcgttgcatcactgttcatgtgggcaattcctattgcaatattatatgcttttaaccataatatacttcctggagcatccaatttgtccccttactctatgacactagtgagtggatttcttgctgtcatatctgtcaatgtggtgatagcattttacatatatttggcattgagagaacctacggcggataaacccgagcctgatcctaaatttcttgctgaggccaaagctagcatcaatcagtctacaggggatgctcaacaaccttcccaggctctcaagaaagaacagtagatgtgatgcaggactacaaaagggggaggaccttaacttgggaggaattgttactagatcaaggttaaagaagctacaagaggatattaatatgaagatgatttcacttgtggagaaggatgatggattgggacctaaagatcataaatttgaacctacttctagattaggattgcttaattttgtggactttaagtgttttcttttattaaagcctattatgttatgtgttgggcctttttagttatacggggcattttcattagtgttagtataataggcttttatgacacgagtaggaattttttgattaatgaaaatttatcttgttaattaaaaaaaaaaaaaaaaaaataaaaaaaaaaaaaataataaaaaaaaaaaaaa

SEQ ID NO: 6456 - DNA, 1249 bp, Glycine max
gtggctttgaatttggaaagagagggtgagagtgaagacttttttgatccacatgattcaatgagtttaaaaagttgcacagatggtgaggataatactggcacagaccaagcattgaaattcagtgctgctggtggggaattttttgatgcttgggaagagctctcttctgacggtgggactcaaaattcacatcgtgatattgaagctgagttgcgtgaaataaggttgagtctattgatggagatagagaagcggaagcaagttgaagaatcccttaacagcatgcaaagccagtgggagagacttaggcaacggttatctcttatgggaattgctttgccttcagatcttactgctgagggtgggcagctgagttctgatcctatggaagatgtatgtcagcaactttacattgctaggttcatatcaaacactattgggagaggaattgccagggcagaagcggagattgaaatggaagctcaattagagtcaaagaactttgagattgctcgactattagaacgtcttcactgttatgagaccatgaatagggagatgtctcagaggaaccaggaagctgtagagatggcacggcgtgagagacaaagaaggagtaggaggcagagatggatttggggatctattactactgccattgcagttggtactgcagcaatagcatggtcctatctccctgtgggtagaggatcaacatctgcagttcatgatcaggtttctgaacatgatgatgcagccaactaatataccgtcaatactaacttcattgccgagttatggtagaggaggagaataaaagttatatgtgccactatgtggctaacatgttacatatctcttacttgatcattacaattttccggcatcctgagtatgtgcataattttctctaacgtgcctttcattggaagtctagctagtagattagtgaaagggttcagtcttgagttgattgatgaaataataatacaccataatttcctatggattctgggtgcaaagtaattgcttcacctgatacatttcgcagatcatatttgtaatagattctttatgcttgcttctccaagcattttaacaccactgaatatatttgatacttggtgttgctgaatcgtaataaaggaaatctggtcaagccatgatgcgtgcatgacctattagaattctttccaacttggtgtttctgtgccttgtttcagttggttgtgttccacggcaaggg

SEQ ID NO: 6457 - DNA, 930 bp, Glycine max
cccacgcgtccgcccacgcgtccgcccacgcgtccgctcttctgacggtgggactcaaaattcacatcgtgatattgaagctgagttgcgtgaaataaggttgagtctattgatggagatagagaagcggaagcaagttgaagaaacccttgacagcatgcaaagccactgggagagacttgggcaacggttatctcatattggaattgttttgccttcagatcttactgctgagggtgggcagctgagttctgatcctatggaagatgtatgtcagcaactttacattactaggttcatatcaaacactattgggagaggaattgccagggcagaagcagagattgagatggaagctcaattacagtcaaagaactttgagattgctcgactattggaacgtcttcactgttatgagaccatgaatagggagatgtctcagaggaaccaggaagctgtagagatggcacggcgtgagagacaaagaaggagtaggaggcagagatggatttggggatctgttactactgccattgcagttggtactgcagcaattgcgtggtcctatctccctgtgggtagaggatcaacattttctgttcatgatcaggttcctgaacatgatgatgcagccaactaatataccattaatactaatttcattgccgagttatggtagaggaggagaataaaagttatatgtgccattatgtggctaacatgttacatatctcttacttgatcattacaattttccggcatcttgagtatgtgcataatttctctaacgtgccattcactggaactctagctagtacattagtggaagggttcagtcttgagttaatgaaataataatacaccatagtttcctatggattctgggtgcaaagtaattgcttcgcctgatacatttcgcagatcacatga

SEQ ID NO: 6458 - DNA, 1238 bp, Glycine max
  misc_feature (1)..(1): n is a, c, g, or t
ngttttaggtttgtgatcgattgtacatatatatgcgggtcggccaccctgggtccccccccccctttatgcatgaacattgtggagctatgacagagtccgtggttcgcaatttcacacgacatattctctctggattggcatacttacatggtaccaagactattcacagggatatcaaaggtgcaaacttgttggtcgatgcatcaggcagtgttaagcttgcagattttggggtgtcaaaaattctgacagagaaatcatatgaactttcattgaagggaagtccctactggatggctcctgagctcatgaaggctgccataaagaaagaatccagtcctgacattgccatggccattgatatatggagcttagggtgcactatcatcgaaatgctgacaggaaaacctccttggagcgaatttgaagggcctcaagccatgttcaaggtactgcacaaatccccagatctacctgaaagtttgtcttcagagggacaggatttccttcagcagtgtttcagaaggaatccagcagaacgaccatcagcagcagtgcttcttacacatgcctttgtacaaaatttgcatgatcaagatgttcaagttcattcccaagggcaaaactgtcccagaggagaccctggaccaggagatgattcacgtagacatagccccggtaacagttcaagaaatagccgtggtgtagggtcagcatccattcgtgcatggttttttaacaaaactcataatttaataggtgtcacttcgaaaaaatatgtttcggaggattctaatcatgtcacatcttctcgtgattctccttgctcgatgacagaaatgaacaatcctcagtctcccatgaaatctagtgcccttaactacatgactgtaaccaatcccagcaacatacccctcagtgctgttatgaaaatcatcaggaacatttgaagctaagatttcgattaaaacttggaaggatcgtgacagaagactggggcatatatttttcggaagttcagcaattatcacagcagggatttagaagctagacagtcttacacgttattgaaaaatatatcaacccgaagtgttgaaataaatgataaattcacattcatttgcagttattatgtacataataacaaggctaggttagttgaacctattaccacatgacagattcacatgtaaatttaattgattatatgatattttagtattttttttttttta

SEQ ID NO: 6459 - DNA, 983 bp, Glycine max
gtgaaattacagttcctacggtgcaaaaaaaaacttgctcttgttccttcccctcctcatattttccaataccatttttcactgttaacaccaacacacccaaaatctcaatcttgttcagatccctcataccccttttttcattcaaactaagggggtgacaagatgagtgaggtcttcgaagggtacgagcgccagtactgtgagctctctgctaatctctctcgcaaatgcagttctgcctctcttgtttctggccaggaacagcagcagcagaagttgtctgagattaaagcgggactagatgatgctgatgttctgattcggaaaatggaccttgaggcgagaagtttgcagccaagtgtaaaagcaatgcttcttgcaaagttgagggaatacaaatctgatctaaccaatttgaaaaaggaatttaaaaggctaacatcacctaatgctgacgaggttgcccgtgaagaattgttggagactggaatgacagatacacatttggcttctgctgatcagagagaacgattaactatgtccgtggagagattaaaccagtcgagtgagaggattagggacagccacagaaccttgctggagactgaagaacttggaatcaacatcatccaagatttgcacagtcagagagagactctactgaactctcataaaaggcttcatgggatagatgatgctattgacaagagtaagaaggttttaactaccatgtcacggagaataactagaaacaaatggatcgttgcatctgtgattggagctcttgtttttgctatagttattattctcttttacaagctatctcattagctaatatacacaagatacaacaggatggaagcaatgtttaatgcttttatgtgcttggtttgtatataggaatcatatgacttatgtgaccatgcaattatttccccattgtattggtaacttttcgatgatacattgctctttacgct

SEQ ID NO: 6460 - DNA, 898 bp, Glycine max
acgggggccgtaggggtgtgtgcttctttacttattctatagagagtgctttgtgttgttagtgagttcagtttccatggatcgtacgcttgttatgtcttcacctaatgtctgttcaaacactaatggtggaaatctcatgcgcaggaaacattccaccatggccaacaatatatactatccaacttcttgcgtatcaaaagcttcacaatgccataggaaaactcaaatagaatgcaatcttttgaggtcacaacagtcaattttgaatcatcattacaaatgcattgaaggaaggcctacatttcaagaatgcaatagaaaatatgttgtaaaagcagcccatgctataccatcttttgattctgaatgaccagatccttctatatgctgaactggaagttgttgaacgtagcattcttgttcctgcctttaattagataaggatgacactgaagaccaagacaatgttcgtaaagcgtacaacaaaatagtatagatcttttgcacctaaatttattaaaacaataaaaatcattagatttgtgttccatagatataagttcatgtatcattaagatttttctttacttttgtcgaagattttatcatctgtatccataccaacattggccttgattgtcatatatttcataagtggaacaagaaaatataaacaacttgttataccaaaagttttaagcgaaaaatagtattttaagaataaagtaaatgttattcagtatccttataacattagttaagaaataaaaaaaatatatttgtattggaatacgaaaaattatgtcgttcatgcctttatttttgttcttttatgattttcataaaaaaatattttttttctttttatattcttaaccaagttcttaatgactcc

SEQ ID NO: 6461 - DNA, 1583 bp, Glycine max
gtgcttctttacttattctatagagagtgctttgtgttgttagtgagttcagtttccatggatcgtacgcttgttatgtcttcacctaatgtctgttcaaacactaatggtggaaatctcatgcgcaggaaacattccaccatggccaacaatatatactatccaacttcttgcgtatcaaaagcttcacaatgccataggaaaactcaaatagaatgcaatcttttgaggtcacaacagtcaattttgaatcatcattacaaatgcattgaaggaaggcctacatttcaagaatgcaatagaaaatatgttgtaaaagcagcccatgctataccatcttttgattctgaatctcacgcttccagtcccaaaaacattttggaccctgtcaaaaaattcttggttgctttgtactggttttgcaatcctcactcgatgattggccgaacattaagcgcaacatctgggtgtctgcttgcagtggagaaattgtcagatatatctccattatttttcattggtttgttacaggtcttggtacccaacttctttatggatatttatgttaatggtgtgaatcaactgtttgaccttgaaatagacaagataaataaaccatttttaccattagtatctgggaacttatccattacaaatgctgtctttattgtagcatcatctgcaattctgagtttttggctaagcttgattatacgttcttggtcattgatttggaacgttgcgctgtgctctttgctgtggactgcctattcagtaaatgtgcccctgttgagatggaagagatcaccagtactcacagcaatgattatgttttctagttggacacttatatttccaattacatatttccttcacatgcagacgtttcgtgttcaaaagcctcagttgtctttacaagatcgttgattgtttctatggtattctatacggccgcctctagacgtctggcggggtccaaggatatacccgacatcgaaggagatacaaaatttggcatacgttcttttgcaacacgtttaggtaaaaaaaaggtattttggatttgtgtttccctattcgaagtggcttttggagttgtcctcctcgcaggagcatcatcttcttctcccctctggattaaaattattacgggtctaggaagtattattcctgctacaattctctggtaccagaccaaatatgtagatttgtcaagtccagattcgaccagatccttctatatgctgaactggaagttgttgaacgtagcattcttgttcctgcctttaattagataaggatgacactgaagaccaagacaatgttcgtaaagcgtacaacaaaatagtatagatcttttgcacctaaatttattaaaacaataaaaatcattagatttgtgttccatagatataagttcatgtatcattaagatttttctttacttttgtcgaagattttatcatctgtatccataccaacattggccttgattgtcatatatttcataagtggaacaagaaaatataaacaacttgttatacttatagttttaagcgaaaaatagtatgttaagaataaag

SEQ ID NO: 6462 - DNA, 1468 bp, Glycine max
tcgagcagctacgtaggccccccccccgcaagttccactctatatccatcgtcaacagtgaagtgcgaatactcagcaactggagctggggaaccttgtctctactcgctctcgtccccgccggagatccaccatggccggcaaccccgccaccacttcctcctccgcattatctcccgagaaatttaatttcaatttctcccccgataacccctcccgaatcaccctcacttcggatcaggtcaaccactgcacccaagccctcaacattctgaaggagaagctccacgctcctaacgtgatcactcaggagttcgcacacttgcaggcgaacaggataacgccgagcgagatgaggagaagatgcaccgtcgcgtatgacgacgtcaatttgaggaaaaaccgatacaccgacgttctgccatttgacaagaacagggttgttctcaaatctagtactgattatagacctgaagcacaggggtatatcaatgcaagccttgtctcgacctcctcagctggaaacgtgtcccagtttatagccacgcaaggtccacttcaacatacttacgaggatttctgggaaatgatcatccaatatcactgccctgcaattatcatgcttactaggttggtggataattacaagatggcaaaatgtggagattattttcaagctgaggataggcctagagaagttggtaatatttctattattggtaaatgggagaacactactgaaacttcactcgtgctgcgccatttggaggtgaaccatagagaggtagaagatgcgccattatctgttttgcatattcagtatcctgaatggcctgaccatggagttcccaaagatacatttgctgtgcgtgaaattctgaaaagattataccatttaccaccaaactttggtccaatagtggtgcactgcagtgcaggtattggtagaactggaacatactgcacaattcacaacacaattcagagaatagttgctggtgatatgtctgctgtagatattgctaagacaatagctatgttcaggtcccagcgtattggaatggttcagacccaggatcagtacattttctgctataacgctatcatagatgaactggaagaccttgtatctcagcagcagtcggagtagaaggtgctggaacttggaaggatgttgaagctgcttgcctcattttgaagctaactatcaattcttcgaacgtttttatgttcctgcaatgctcatgttttccagcagctgaagtctgaaacattagcatctgggagattttatgaatttcaccgaattctgttattctcatgcttttttgtataattgcaggcagggaaagctgacaaatattaacatccttttgattatattgttagaattctattggggaacagaatggcataatgactacaataatgcattgtccctcctattgctaaaaaaaaaaaaaaaaaa

SEQ ID NO: 6463 - DNA, 811 bp, Glycine max
  misc_feature (4)..(4): n is a, c, g, or t
  misc_feature (9)..(10): n is a, c, g, or t
  misc_feature (17)..(18): n is a, c, g, or t
  misc_feature (24)..(25): n is a, c, g, or t
  misc_feature (27)..(27): n is a, c, g, or t
  misc_feature (35)..(35): n is a, c, g, or t
cccnggacnnttgccanntcccanntnaattcccnctaaggacaaagggagcccccccgggcgccttttttttcggagagataaactggatctttttgtttggattcaatatcgcggatcacaaatatattaaattcaagttttcaatctccaatatccagtaatctttcaacaatttatccttgaaggagggtttttaaccagtcacaacagaaaattctaaacacaacaggcacaattaagcgttcaacacaaccaaccaaaaagaacccaatttcaatttcaaatgtgcaatctgaaacagcttgctataggcaaacttcttctatggcctttccggtcatatgacatcttcatgcatagtttaaacggaatatgtcattcaacacataatagcttccctgaggtgttggtatcaaatggaacatctggctgaacttgagagtgtgctgttcgccggcgagctgaaggtttccgctgacgaagacgagcatgccggcgttgacgccggagggctggcagtcgacggtggagattgagtggtggcactgctgaaaagggagggaggtgagcttggcaacgatgttggaagcgccttggatcttctgcccttcgaaagtgagcatggaaccctcctggtagagattcgctaagccgttcctgttggtgtcgaaggtgctgtagtagtgctccacgaatgcctttgccaacgcgtctggatccatctctcttctctattctctcccccctttctgtcgctctctccccgcctttatatactacacgtctacaccctctcgcgtatcttttt

SEQ ID NO: 6464 - DNA, 815 bp, Glycine max
gcgagaaaacaacatttaaatttagccataaaatcgaatacaagatatgcataaacaaacttttttttttttttttagcacgggatgttggaagctaatatataaaaaaataaaagttttcaccctccaatttgcatcaatctttaacaatttatccatgaaagcgttttgaccaatcgcaacaggaaattctaaaacagaagaggcacaattatgcgttcaacacgaaccaaaatgaactcgttaattctcaaatgcaaatgtctgaagcaaaacagctgtaggcaaatgtcaacatactcagaggtctatctttcacgcatagttcaaccggaatatgtcattcaacacataatagcttccctgtggtgttggtatcaaatggaacatttggctgaacttgagggcgtgttgttcgccggcgagctggaggttgccgctgacgaagacgagcatggcggcgttgacgcctgagggctgagaatcgacggtggtgatggagtgctggcactgttggaagggaagggaggtgagtttggcgacgatgttgtgggagccctggatcttctgaccctcgaaagagagcatggaaccttcctggtagagattggcgagattgttgcggttggtgtcgaaggtggagtagtagtgctccacgaatgcctttgccaacgcgtctggatccatgtcgcttctcgcttctcgcttcactctcacgcacaccaccaccctctcctctctccaatagggctttttaaacccacccacctaatctaatctaattaaaatttgttatacaattcactccaattttt

SEQ ID NO: 6465 - DNA, 2693 bp, Glycine max
tcgagtcagctacgtaggccccccccccccccccgacagacacggtttctttttcatttcacagatcagagagggaggagcgagttgagcagaggaagaacaaaggagaagagaaaaaatggtgggtaatgaaatagtagtaccaatggacgacaaagcgaagaggatgcgagatctgctatccagtttctactccctagacccttccatctccaacaccacctccaaacacgcttctctcgacgacatcaattccacctccttcgatcccgatcagtacatgaacattctggcacacaagtccaatttggaaggccttctacaacgccacgttgcaatggctgctgaaatcaagaatctcgacaccgacttgcaaatgctagtttacgagaattacaacaagttcatcagtgccacagacactataaagaggatgaaaagtaacatttcggggatggagacgaatatggagcagcttcttgagaagataatgtctgtgcagtcgagaagtgacagtgtcaacacttctctatttgacaaaagggagcatattgagaaactgcatcggacttgtaatcttcttcgtaaagttcagttcatatatgatctccccgatagactaggcaagtgcatcaagtcggaggcctatgcagatgcagtcaggttttacattggagcaatgccaatttttaaggcatatggagattcatcattccgggagtgtaagcaagcttctgaagaagcgatagctattgtagtaaaaaacttgcaggggaagctattttcagattctgaatcaatacaagtgagagctgatgcagcagtgcttcttaagcagttggattttccggtgaacaatttgaaggcaaagttattcgaaaagttagaacaatctatttcagacattcaactgaaccctgaagaaataaataaagcttcaggggaacattctgctcatgaggcagctatacatgaatttgtggaggcagttcgtgcatttcgagtaatatttcctgattctgaagaacagttggttaaacttgctcaagatttggttaccaagaactttgtaattgccgaggaatatgtaaagacacggatttccccagaagatctacttggtgttcttcgagctatctggaatgacgtgctcctgatagatgaagtcttacaggaagcagctctctctaaccattctcttgaggctgcaaaggttgctgtcacgtcgtttgttagaagtacattttctcatcttctgcaagacatctcagattccctcttacaaatcctgaaaaaggatggagcagaacagtgcactcttgatgttgttcttgatgcaagtacaaaagcagttctccaaggaggactgaatgtgttgctggacttccgcaaagttttagatgatgactctgggatcctagttagattaagagagttaattactgattgggttcaagaaggacttcaagacttttttaggcaacttgaggatcagttccttctgttttcgggaagaaataattcatctattcaagtacacgctttggcagagggagctcaaggttataaagcttttgctggccttgtcctagtgctggcacaattgtctgttttcattgaacaaactgtcatcccaaaagtcactgaggaaatagctgcttccttttctggtggtagtgttagaggctatgaatctgggcctgcctttgttcctggagaaatatgtcgaaaatttcggtcagctggtgaaaaattcttgcacctgtacgttaatatgagaactcagagggtatcacttctcctgaagaagaggtttaccacccctaattgggttaagcataaggagccaagagatgttcatatgtttgttgatctatttcttcaagagcttgaagttatagttaacgaagtgaagcagactttgcctcaaggtagacgtaagcaccacaggactgatagtaatggaagtagtgtttcatcaaggagtaatcccttgcgggaggagaaactgggtaggtcaaatactcaaagggcaaggagccagcttttcgaaacgcatctagcaaaattgtttaagcagaaagttgaaattttcacaaaagtagaatatacacaggagtctgttgttacaactatagttaaattgggccttaaaagtttacaagaatttgtccgactccagacttttaaccgaagtggattccagcaaattcaattggatatccagttcctaagaatccctttaagggaaatagttgaagatgaagctgcaatcgacttcttgctagatgaggtgattgttgctactgcagaacggtgtctagatccgattccattggagcctcccatattggacaaacttatacgagcaaagttggctaaaaccgaggagctaaacacaatttcttcataaacattctttttggaagcaaaggatatatataaaacgtgtttcccatctcgtagaatttgttatggttttggccgttgaaaagtaacttggttcattttctgttcattttgtaaatctcgtaagttatagtagcatttgtcatattgcaatgctgttatttgtggaaacattgaaacatgagaaagttatatccatttttgactcgagagctgagttatatccaaaaaaaaaaaaaaaaaaaaaaaaaaaaaaaaaaaaaaaaaaaaaaaaaaaaaaaaaa

SEQ ID NO: 6466 - DNA, 829 bp, Glycine max
ctccttgttctgccctggatcaacattaactgaaacagaaaacgtgttttttcctgtcatggatcatttgacttcgattgatttttaaatgggtattgctatgtcgttgttgaatgaatggggttgttgctagaagcagtcttccatgtgggttttgattgtcctgtactgaaagacttcataacatactgtgtgtgtgagggactcggtgctgctttaattactgctcttgtgaaggtgaactgtgaacttggttggtcagagcttgccaacaggcagaaagttgctgaagtccctcaattgtgcttccctgcctcctttcccaaagtctctgtctggtgcaatggtttatataactgagtgggacaagtttgtggagcaatccattgagctgttccgtgcagatcctgattctacaaggtatgtcatgaagtacaggcactgtgatggcaagttggtactcaaggtcactgataaccgacagtgtctaaagtataagacagaccaagcacaagaggctaagaagatggagaaactgaataatatgttctttgctttgatggctcgtggtcctgatgttgatctatcagaagtcacgggaaaagagcaaatggatgctcagccaaccaagaaaggaagaggaaggaagcaataacttacttggccttttgctagacaagatggttttatgaatcactggactaagaatttgaatagttatatttttttccctacctaatgattacttcagattcttatgatgtgagaggtttatattttgaagttttgaagtctcaatttctgatctttacctattaacaaaaaaaaa

SEQ ID NO: 6467 - DNA, 941 bp, Glycine max
agagagagactctctcttttgtttcctctcttaacttctcttctcacaccacttactttctctctcctctccatgtcttcttcacgtcaaacgtagaatatctttttctttttccccttttttaatcttaacccaatttttactctcgcaaagtggtgtatttgaggaagtttgatttgggaaatgaacaaaggacagtcaccggagcctcttgatttcttcatctggactgttgaggatgttggcttgtggctggagactataaatcttggtagttacagccaaatttttaaagaaaatggtgttaatggagaatacctggaaggcatgtccatgtttacgactgaacagatcctacgttttataagacgttgccacatgaagtggggagacttcatcacattatgcaaggaattaagacggattaaagtggcttgtctgaaaggggagcagaaggtgcggcggccatggtgggcaccggcttgcctatctacagtgttcttaaaggttgcaaaatccaacagacaatcaagagttgtttccttgaagctggaaccatgataatacaataagttaaacctctgcatatgtgtaccagtgtacgtatagcaaatttctttttgcctagaaaacaaaagataggaaagaactttttctagcccccttttttattttattttatttttcttttgattccaaaacctggttgtttcttctcctctggagaactgaactgttatgcagtagaaggtccttgtgcactaatttccggtgctgtgtaattatgtattctcttatatgtgaacgaaaatacgatatatgccgtttctcttcaggttccaaaaaaaaaaaaaaaaaaaaaaaacacaaaaaaaaaaaaaaaaaaaaaactcggactagttctcctctctcggaagccgctcctgcgattgccgcatcgc

SEQ ID NO: 6468 - DNA, 1057 bp, Glycine max
cacgagaccattacctagaacatcctaatcgaatcagacattgtctcaatcccacacgcttcttactcctctcataacttttctgctccccgttgagaaagatttgaatccaaaggaaaaataacgctaatggctccaagagacagccgagccaccgcgctcattgggcccggcccaagcctatcaccggcccacaaagagatccgctacagaggcgtcaggaaacgcccctggggccgctacgccgccgagatccgcgatcccggcaagaaaacccgcgtctggctcggcactttcgacaccgccgaggaagccgcgcgcgcctacgacaccgccgcgcgtgagtttcgtggcgccaaggccaagaccaatttcccgacaccctcggaactcatccttaacaacaacaacataaacgctcgtagtcccagccagaccagcaccctcgactcatcctctcccccgccaccgccaccgctagaccttaccctcacccctctctcctccgctgtcttcccggtggcgcgtcctgttctattcttcgacgcattcgcgcgtgcggacaccatggtcgccgtctcgcgccgcgagacctgcggcttcgaacgccccgccgccgatttccgccgcggcgactccgactctgattataaccgccgcatactcctggatcttgacctgaacgtacctcctctcccggaggttgcctgattcatgcagggagttctgtttttttcgcaattattgtttttttggttttttaagcatctgggaggtactactacgcatcttttttgacgaaagtgccctcgagggagcagcaaagtgagtagtggatgacatgatgctcggatttgttgaccattttgtgatgatgaagatatataaccggcacgttatgtaaatacacgttataaccgaaagcaaacgtgcttttgcttggttgctttttttttttgcaactgaggactcttattcagagtatctcatggttgtttctgcaatttctcaaaatatataaatattccaatttccatcaagaaaaaaaaaaaaaaaa

SEQ ID NO: 6469 - DNA, 2745 bp, Glycine max
ttcaaacaacgcaaacgcttctctctctctctcactctctttctttctctatacaacttggaagctttctctctctaaaagcaagcaaggtcctccaccaccacctccagtctccctctttcacacagagaaatactgtgtgtgagaccagttttcggttcatggattccttttctcttctacaattccaaacatctattcttggttcgaacaagttttgggcttttggtggtaatgtggtgggttgagtgattcctcttgttgcatagctatggctacagattcgtcttttgagggccttgcacttgatccttctaagtgcagtaaattgagtatggaggaaaaaagagaacttgtatatgaagtatctaactggtcgcatggtgcatctgagatgctgcagtcatggagtcgtcaagagattttgcaaatattgtgtgcagaaatggggaaagagagaaagtatactgggctgacaaagttgaaaattatagaaaatcttctaaaaattgtttctgaaaagaaatcaggcgggaatgaaactgcgacagaccctgaaccacaatcttctcctgcacctggtcagaagcctgccaaaaggcagagaaagtctgagaatccttcacacatccctgttcctgcgaccagcgttccagtcaataatggtggtgattctattaataccacattctgcaaaaactcagcttgcaaagctaccctgaatcaatcagatgcattttgcaaaagatgttcatgctgcatttgtcatcaatatgatgacaacaaagaccctagcctgtggttaatatgtagttctgagaatccatttcctggtgtttcttgtggcttgtcatgccaccttgagtgtgctttaaaacatgatggttcaggaattggcaaggatggtgagcgtcccaagcttgatggaggcttctactgtgtctcttgttggaaaataaatgatttactcggatgctggagaaaacaactgatggtagcaaaggatactagacgcgtagatatactctgttatcgtgtctccttaagccaaagacttttacaaggaactgaaatgtatgaagaactttataaaattgttgatgaagcagtgaagaaacttgaacctgaagtgggtccactcactggctcaccggtgaagattggaagggggattgtgaacaggctttcttcgggacctgaggttcagaaactctgtggttttgctctggaatcacttgattcactatcgaaaaggatcttgcctttgtcacccaagccaacaaatcaagatgcatatttgctcgctccaaatatgttgaggtttgaagatgtcactgccactaccctcactattattttgggttctgaagaaccctctggtgaaattcttgctggttacaccttgtggcatcgcaaagttgatgatgtggactatcccatggacccaacttgcacctcgctcttaccaaatagaaggttcagtgtctcgggcctaattccaggtacagaatacagtttcaaagttgtttccaatgatttgagggagtcaggtatgtgcgaagttcaagtctcaacagagcatggtgaggaagaagtccctaattgctcagcaactgaaagaagtcagagcccggtaaccaactgtagcagcctttccaatccatcatccgtggaagatgaaactaataactgtaatccatatagtgacctgactgataaccgagcagaccattatccttcttatcacaaggatagcaacaaacttgcttctggaaatttatccaatgatgctattaactgttccaatctaggtggtgcgggacttcctcctgatgcagattctttgtcagacaaacagcatgctggaggaacgactgcctccatacctagttctgatgtgctaaagctcgaaaacaagcattcaccagaggaacaaatcactgaggacatgagcaccgatgatgggttgatttccccagctctaacagggagggaatgtgtgccgttagtgggtagctcggaaggaggcttgcctaatactccctgcaagttggaaacacttaaggatggacctggaaagaataaaagatctaagtccagtggcaaagatcaagaaaatgtatccgggaaaagggagggtccccaagatggaagcacatccaagaagagaagtggagaaaggcaagaggagggccgtgttgcaaatggcttttcggatcgtgattttgagtattatgtgaaggtgattaggtggttagagtgtgaaggtcacatagaaaagaacttcaggcagaaatttctgacttggtacagcttaagagccacccctcaagaagttaggattgtgaaaatatacattgatacatttcttgaagatcctgcatctcttgcagagcaacttgtggacaccttctcggaatgtttgtccagcaagagaacatcagttgtgccagcggggttctgcatgaagctttggcattgaccagattttgtaggtccagctactagccgcaagcttgccatgcagtaattctttagatttttaatatattcttcatttagacagttcaaatacatatatttatttcaacattatcattcatatgatgatgtaagaattttagatttacttttattatacaattactatttaaattgataatttttttccaatttgcaactcggtcatcgatacactttttggtaggtaacattgaagaatttatactaaattaatttatctat

SEQ ID NO: 6470 - DNA, 582 bp, Glycine max
ctctctctctttctctctcactcactttctttctctgtacaacttggaagctttctctctctaaaagcagcaaggtcctccaccaccaccacctccaatctccctctttcacacagagagagatactgtgtgtgagaccagttttcggtttatggattccttttctcttctacaattccaagtatctattcttggttcgaacaagttttgggcttttggtggtaatgtggtgggttgagtgattccttcttgttgcatagctatggctacagattcgtcttttgagggccttgcacttgatccttctaagtgcagtaaattgagtatggaagaaaaaaagagaacttgtatatgaagtatctaagtggtcgcatggtgcatctgagatgctgcagtcatggagccgtcaagagattttgcaaatattgtgtgcagaaatggggaaagagagaaagtatactgggctgacaaagttgaaaattatagaaaatcttctaaaaattgtttctgaaaagaaatcaggggggaatgaaactgcgacagaccctgaaccacaatcttttcctgcacctgggcagaagc

SEQ ID NO: 6471 - DNA, 1370 bp, Glycine max
  misc_feature (12)..(12): n is a, c, g, or t
atctagtttgcnttgtgttgtgttgttagtttgccttggagtttcatgttcttatccagatgatgagagcttacagatcaggtttctagttcctcgcggccggtggttatgtagatatgagtctttgtgatgaggttcatggtcttggtgctttggtgtttttctttatggggtggttctagctagctagggtttgggtagtgagtgtaataaagttgcaaagtttttggttaggttacgttttgaccttattattatagttcaaagggaaacattaattaaaggggattatgaagtggagctccttgaagtccaattgaggatcttactgggtgaattgagctgcttagctatggatcccacagttctacccatcaataagtgcttttgtggtagtcttgtggcttccatatctggggagcttcatttgcctttatagtattaaccttctttggattgaagggagctctacacccttctcttcttttctctcataataatttaaatttgttatagactctaaactttaaatgttttttttttaagtttttccatttttctcttttgccatgatcccgttcttgctgtggagtaaccttgtccgaggtatgtgcatgattagatccatacttaatttgtgtgcatcacgaaggtgaggttgaaatgaactttgcttttttgaccttttaggaaagttcttttgttgcagtaatcaattttaattagttttaattgacactattacttttattgtcatctttgttagttttattgttgaattgagtgcatatttcctaggaaattctcttacctaacattttttatacagatctatgctcttggctcttgcccttattcttggccttgtgttggttatttgtctacatatttattgactggtcgatgagacatgtcacaattcttgggcttatttgttggtctaataaaaggagtgcttattgaaagatcaagacggagattcggttttatataaataaactaaagatgacatattagtgtgttgatgtctcttcaggataatttttgtttgaaataatatggtaatgtcttgtctaaatttgtatacataattcttactgattttttggattgttggattttcataaataaatcttcaattcgttggcaattgtaaaatcgtttaagtttttttgttttttgattgtttattatagggtgtataggttctacaggaaggacttctgaaaatacttaatttttctgtaagggagattgatttttgcgaaacattatagtcgataggatttttgtattcctaaaattgcagactgggatatattctcatgccctaaatcgatttgtgaagaatattatcgtgttttacactc

SEQ ID NO: 6472 - DNA, 1630 bp, Glycine max
atcaatatcaagccacaatccttccccacctctgcttcaccctcacaattttcccatcaaattttttgtaaaatttccaaatctattattagtactatcatctactacaccttttaccccaatcaaaaccaacacaacgccacaaaaaaaaaacagtacaaagaaaaaaaaacactctcacatacactgtacccctgtaccacatcattattgtttagtattttctttttaccttatcactatacccgcttcccctgtttcctctgttctagttcctctggctattgggtgcccttgttttgcatttttgagaggcttttcggggtgcccatttgctgaatttgagtctgagaggttgttttggcattgcattatagagttgttgagggaagttgagggatttattggtggggtgggtttgaatggggattgagaggaccttggctgatagaaaaggaagagacttttgtgaattgccaagagaaaccattgccagcagcaactcaaggaggaaccggcggcggcagaggaagaagccgccggttcagaagcttttcgagacttgcaaggttgtctttgcctctgcagggacaggctttgtccctccccatgaggacattgacgagttgcagtctgttctagatggaataaagccagaagatgttggtttgagaccagatatgccgtatttcaggacaagtgccactcagagagtgccaagaatcacgtacctgcacatttatgagtgtgaaaagttctcgatggggatattttgtttgccaccttctggggtcatccctcttcacaatcaccctggaatgacggttttcagtaagctactttttggcactatgcacatcaagtcatatgattgggtcgttgactcgcctcctgaatctcctacaactctcaaaccatcagaaaaccaaggtcctgagatgaggttggccaaagttaaggttgatgctgatttcactgctccctgcaacccctccatcctttatccagaagatgggggcaacttgcactgtttcacagcagtgacagcatgtgcagttctagatgtgcttggtcctccatattctgatgctgaaggcagacactgcacatactaccacaatttccccttttccaacttttcagcggatggattatccataccagaagaggaaaaaaatgcttatgaatggctacaagagagggaggaacttgaagacttagaagttaatggaaaaatgtacaacggtcccaagattgttgagagctaataatcttatcctcttaagtacaccatctttcagtttttgtgctgctgcctccgccgccgccgccgccacatacccttacagaaaatttttctatcaatttctttctttcaaatagagaagcagcgcatgtattcttgtaccttttttcctttatctttagtagtgttttttgttttcttaatggaacatgagaggcacttgccatgcccttggtgctgtttttcagtctatagttcttttcttgtacataccaagaaacagaaaaaaaggacaaattaaggaggtgccgcacctgaaattgaacttgaatgaaggtgcaatgcaatgagcttaaattagccttattttgttggctagttggt

SEQ ID NO: 6473 - DNA, 1242 bp, Glycine max
cattcctataaataccccctaattcataaccctctaagttccaatatttaatatatccaccttttggggagaccaccggagatatgtacggacggagtgattcttacgaatccgatttggcgcttctggattcgattcgccgccacttgctgggagagtccgaattgatattcggagccccgaatttcggttcgggtcggagctccagtttcagcagcttggactcgtgtttgagtgatgattggggagagcttccgtttaaggaggacgattcagaagatatggtgttgtacggcgttctccgtgacgcagttaatgtggggtgggtcccatccctcgatgccggctcgcccgagagcgtctcgtcgggttttccggcggtgaagctggagcctgatgtcatgccggcgttgattaatccgtgtccgcctccggcgccggcggtggaggagaagaaggttgttccgccgaaggggaagcactaccgcggcgtgcggcagcggccgtggggaaagttcgcggcggagatccgggacccggcgaagaacggggctagggtttggctggggacgtttgagacggcggaggacgcggcgttggcgtacgaccgcgccgcctaccggatgcgagggtcgagggcgctgctgaattttccgttgagggttaactccggcgagccagatccggtgagggtgacgtcgaagcggtcgtcgtcgccggaaagtatggcggcggcggcgccgaagagaaagaaagttatggtggtggggacggtgcaagagcaagtggggagtcaagtggtggagtgtacacgtggcgaacagttattggttagctgagagagattctaaaattggtattgtgtttattaaatacaaaaaatacaatactcttttgtaattatgtgaggtgcgtgtgtagtcctatacccatcatccaactcaatcttgcaacagagaaaaaaaaaaggtgaaagatgagacaggtgattttagtatatcaaatttcaaatggtgagtggtgaacccaccacgggaagaaaaaaattaaaagatgatgatgagtgatgacagaggtgaggatatgtaatttagctttgtgaatactaccaaatttgtttgttcaacattatgaattatgaatgggttaaatgtgacaattcagttgagcccttaaaatcccgtcccttgaggagcaaaagaaaatctaatcatatgtacctgttggaatgaacaaaataaa

SEQ ID NO: 6474 - DNA, 2174 bp, Glycine max
aaagaacgacgcagcagagacaacaacaacaaaaaaaagtaaagaatttgctttgcgaggaagtaagtaggagatgctctgaactttcaaatttgtacaacccctaggaagagaagaagaaggttcaaaatccaatccatttttcatttcgaaagatcgtgatcgcaatgtccctctccaccgtgaggcagcggcgctcggagccgtctgatccgtcgccatcagaaccgtacacgaagctggacaagcccgagaaagcggaggagaaagacgaagggttggggtgggttttcccgttcgtggctcttgggttattgaggtacatgagtgccacctccaacatcatccacgattgcgacgaggtcttcaattactgggagcctcttcatttccttctctacaaatctggattccagacatgggaatacagttcacagtttgctcttcggtcatatttgtaccttttatttcatgaaatagtgggtcgaccagcttcatggttgtttagtgaggacaaagtgagagtgttctatgctgtgagattctttctcggtcttctctctggtttgactgatactggtctcgtggtagctctttcgagaaagtatggaaaacgacttgctacgtatgcccttgctatgctgtgcttaaccagtggctgtttctttgctagcactagtttcttgccgagttcgttttctatgtatgcaatatctctggcatcaggtttatttcttctggataagcctgctgcggcaatttctgttgctgttattggtgtaatactcggctggccattctcaatcttggctttccttccagtgacactatattctctatctagaaaattcaaacaggcatttattgctgcggctgtcacatcaattcttcttcttgcattgtcaatagttatggacttttactactatggaaaatggacttcatctgtcttgaatcttttaatatacaatgtagctggaggcggtgaaagccatctgtatgggactgaagggcctctttattatctgaggaatggatttaacaatttcaacttttgttttgttcttgctctgctgttcttggggattttgcctattgcaaagaagaaatatgcaccagacctactgattgtgatatcacctatatatatttggctggggtttatgtctttgcagccacacaaagaagaaaggttcctgtatccagtatatccacttatttgtgttgctgcttcagctgttattgagagcttccctgatcttttccgtagcaaatataatccatatgatcgctctataatagtgacagttgccaaagttatgagaccagtggttcttagccttatactatatgcctctcatgcccgtacattttctctgatcaatggttactccgctcccttagaggtttacaagatcttggaacaccatgatgcagaaaacaattctgtactttgtgttggaagtgaatggcatcgctttccatcatcatttttcatcccagattatgtgggacaagttcgatggattgacgatggattccgaggtcttcttcccatcccatttaattctaccctaggggggactgcatcagcaccaccatatttcaacaataaaaacatggcatcagacaaacaatatctccatgatgttgatgcttgtactttccttgtcgagctgcagctagagcggccttacctgactcgtggaagtgacttgtcaacatgggagcctattgctgcattgccttatctggacagggagctttcaccggcactgtataggtcctttttcattccttacctttggcaagagaagaatgtttttggaatgtataagctgcttaaaagaagaaccacctgattttctatttgggcgggggatggggcattagattgtcctagaatatggtggtggattaacaacaaaaccatttttgttagagacagtaagcttgtaggatttccctcatctgttgttgaatatttgatttagttctaatcttcttagattccccgagtgttgtctgatgtctttttcccacggaagcattcagtttattaaccaaaaaaaaaaaaaaaatgtgttggggtgagtatttgcaaactggatttggataatcttcattttgcaaaattgttttggttaaaattgagtttgaagtgatttatgttt

SEQ ID NO: 6475 - DNA, 1302 bp, Glycine max
  misc_feature (1278)..(1278): n is a, c, g, or t
  misc_feature (1283)..(1283): n is a, c, g, or t
  misc_feature (1302)..(1302): n is a, c, g, or t
tacggctgcgagaagacgccgctacgggacggatccaaaaactagtttaacttatttaatatgatatctctcaaaggcaaagtaaaaccatctcctccgtgtctctcccacactgattgcaaacacgaacaagtaattgaaactcctacagttgaatcagaaacactccacgcctacgctattgccttataatctttgttccacgcttttccctctcctcttcgcacacagccttccttcctagggtttcatccaattatgaactgtgaagtgtgccagctcaaggaactggaactggagcattttgagatacgcgaggtcttgcgatgcatattgcacacgatcgtctttcaccgtgccttgggtctcgtgcgccctaaagacgttgacttggagctatttgacgtcacttatgtgcaatgtggagaggcagagcttgaaaagaaaatagatgagaagattgagcagtttgtttgttgggtggagaagcacccaaacaagaagagtcagatatgtttatctttctatgaggtgaagaacaaacaggcgtcttggttcagtaacaagattgaacgtttgtattgggagcagtggtatattaatctgaatgtggcccagcatccgaaggcacattctagcaagtatcatcattccaaagttgttgatcctggagagggagcattggaggatagaaatgctcgaagtgcagcactggaggcatcgcttcgtgaggttttatttcagataattaaatttgttaatgagaagaaggatcatgttccacctataccaaatcttgagggtgctgtttcatttccctatgaaattacaatccctagttcatcagattctgcatttgggatggacatgatcaagagaatgctacagacaggacatccaacaatgctaagttgattgtcaaagttcgcagagcggtctataaggttaaaatggattcttgttcatatgaataggctggtaatatgatgctgaagaaaagctaaggaaggcaaagttcaatctctctgtaaacaaagcagaatctataggtgcaaaataacttgtatatattttcaaatgaaaccccttttttaatctgtcgttgatatcttttatttcttttatttatcttctctcaagagtttacggtgttatgtagtggctatgtccaatgtcacatgaacatcttagaccatttactgttacgattgcgtcaatatgatgggttgcatgttatatttgaagataaaaaaaaaaaaaaaaaaaaaaaaaaaaaanaaaangaaaaaaaaaaaaaaaaan

SEQ ID NO: 6476 - DNA, 839 bp, Glycine max
gagagtggccataccaaaggcagtctatcataagacaaacatatactctattgttcagagaggataaaacagaagagagcctcttagacgaaagtgcgcatcaaacagaaatcatccagcttgagtacaggcaaaactgacaaagcatttttggtttctaggtaacatacatatccagcaaccaggtgaacttaattaactcaaggtctaaagagagctacgtccttcttagctcgcatgggacttgttgaggatgacaccctcatacttgacctggaaccacttcatggcgtcctccttggtgaccctctggtggataccgacacgggccttgcacctgcggcggcgggagacgcggtacccagcacgctcgagcaccacgaagaagtccataccgtagatgccggtagatggatcatacttcatgccgagatcgatgtgctcctggataccgaagccaaagcagccggtgtcgctgaagttcctcctgagcagctcgtactccttcaccttcaggccactctccagcagctgcatcgccttctcacccctgatagtcacgtagcacgcaatcttctcattacgcctgataccgaacgacctgacagtgtacctcgccttggagaacacaggtgactgtccgctcagctgctccagcaccttggaggcgcgggtgaggcgatctccgctctcgccgacggagatgttgaggacgagcttctgcaccttgatgtcccgcatggggttcagctgcttcttctccgtcgacatggcggcgggatctggggagcggcggcgggggggaggggaggagggggggggaggggtttaaagcgtag

SEQ ID NO: 6477 - DNA, 828 bp, Glycine max
ttttttttttttttttgtttgttgacatattatcaacagggaagttacattgccggcttccaaatatgaacaaacataaaaggcctgaaagcaacacggccattatgccgatccatctagcctagcttggcgaggacatcgccgagaacagtcttggtctcgccgtagtacttctcggcctcggtggggctcttgatcttggctgcatggtcaagcccgtcgagggtggcgaagagcttgccggtgaggtccttgaggtccttcttctcctccttggtggtcttggaggagatgacggtcttgaggtcgtagcgcaggtaggaggccctgaggcggaggtcgttcatgacgtacggccattgcttcttgtcgatgagcggcttgaggttgaggatgtcctgggccgactccttggcccgcaccgccgcctccgccggtggcagcggctgcaggtagaaccggttcttcaggggcaggtcgaagtcccttgcctcgtccgagttgtccgttccggggagtccaccggagagcggcggcggggggccaaccttgatggccgcgacggtgccggcgtgcaccacctgagcgaacgcgctcccgacgactccgctggccatgaggccaaggaccgcgcggcggccggcggcctcggcctccgccgacgacgccctcacggtgaacctgctggcgcgcctgccggccgggcctgggagacgcacgccctgcgacaggccggtcatggacgccatggtttgcgccatctcaagctttgcttctctcttatcttcttgctctgtgtttctctcttatccctcttgagaagctagc

SEQ ID NO: 6478 - DNA, 849 bp, Glycine max
ttttttttttttttttgcaacattccacgttaagaaggtctgcaatacacacgacacgactgacacgttcagaacaatcttaacacttgcagcgctcatggatttgcagcatgaacttctctccaaaagtctaaactgggagagatcacgagattccatttaacatcggacggacacgaccatcaataaggtgggtaccttcccctagggtagggttccaccaccatcctaaacaacaaaccagttatctaggtttatctaccaaggcggggagctcagacgccggtggacccgaacccgccctccccgcggagggtggcgtcgaggtcctccacctcggcgacctccggcgtcgcgatcacctggacgatcatctgcgcaacgcggtcgccaggcttcacggcgaagtccgcctccgagtggttgaagagcacgacgcccacagggccgcggtagtcggcgtcgatcaccccggcgcccacgtcgatggcgtgcttcagcgccaggcccgacctcggcgcgatgcgcgcgtaggtgccctccgggatggcgatgcttaggtcggtggccaccagcgcctttcccctcgccggcacgaccgtctccaccgcactggagaggtcgtagccggcggcgagggcggagccgcgggacggcaggatggccttgtcggagagcttcttgaccttgagcagcggcgcgatcttggtgatcttgtggggaggctcgtgcacggggtcggcaccggcgccgttggtggcggccattgcgacgacggacgggagggttcccggtggccggcggcgagagatggaaggagaggagccgagcaggagttggagttggagt

SEQ ID NO: 6479 - DNA, 1893 bp, Glycine max
cttcagccagcaacttgcgtctctatccattgatttgcaacttgcaaacaacacgaaacaattgcggtgttttttgagcattccgaggatatattttttctctgtaattaattatcctttaaattcccaatattcctcgctctattctcttctcttcgtactaccataggaaggaaggaaggagagagagttatgggttccccagaaaatcaattgtcgctcgcagaagaggctcttcttcaggatgatgagagcaaacaatacacaggagatggatcggttgactttaaagggaggcctgttcttaagcggaatactggcaactggaaagcttgcccatttatcttaggcaacgagtgctgcgaacgtttggcgtactatggcattgcgacaaatcttgttacctatcttacccagaagctgcacgaaggaaatgtctctgctgctagaaatgtcaccacctggcaaggcacttgctatcttgcacctctcattggagctgttttggcagatgcttattggggacgatactggacaattgccattttctccaccatttatttcattgtaaggtgtctgatagagcagctgtagcatccgctgctgagagcaaaagtggtgattattctaacaagtggagactttgcacggtgacacaagtagaggagttgaaaatcttgattcgcatgtttccagtttgggctactgtgatcgtttttgctgctgtttatgcacagatgtcaacactgtttgtggaacaaggaacgatgatgaacacaaatgttggttccttcaagattcctcctgcttccctctcaagttttgatgtgataagtgttattgtctgggtccctgtctatgacaggattattgttcccattgcaaggaaatttacaggcaatgagaggggcttttcagagttgcaaagaatgggaattggcctttttatttcagtcctgtgcatgtcagcagctgctatagtggagattgtgcgtctgcagcttgcgaaagagcatggccttgttgatgaacctgttcctgtaccccttaatatattttggcaaatccctcagtatttcttattgggggcagcagaagtattcacattcgtcgggcagctggagttcttctatgaccaatctccagatgccatgcggagtttatgtagtgctttggcacttttgactacttcacttgggaattacttgagctctttcattctcactgtaatgacttacttcactacacaaggtggaaatcctggatggattccagataacttgaacaagggtcatcttgattacttcttctggcttttagctggacttagcttcttaaatatgtttgtgtacatagttgctgccaaaagatacaaggaaaagaagtctgcttaagattttccaggcatttctttggactggaaggatgttctgccatttccctgtcaatgtggcgattgttctgcatgtggaataaagatgctctgcaattatgtacgctttttatttacaaaggaaaatctgttatttatgccggttcaaaacagccttgtctctgccctctcccacgaagcctaaaattgataagattgcttgctaccatttaggctaaatatgggcagttaagattgcttgcaacatttacatgtgtaactattgatgtagaaaaggttgatactccttttatgtgcaccgtcgtttcagattgtagtgtttgattaacgagaagcaaatagctaggagaatgcactacgggataaaagtagcattcgcttattaacacggaaatactcaaacatagacactacactggtgatttgacaaggttgattgtaatgaatacatatgaatgctatagtgagcagaataattcgcatgttctgatattgcgaca

SEQ ID NO: 6480 - DNA, 737 bp, Glycine max
aagcatttaatatttttgaagaaaataaaaaagcattgtgggagtttgtgggttgtcttgccttgcttcgttgtcgtttcgccggccaaagacacaacctttgttgccgttttagtgtctgctttggacacctctctctctctccctcagtttgatttgataattcgagatgaacgaccttctcactgattcatttgttggcgaggctagtaatggccagccttctagacaaagtgatattgaaatgggacaggttccgagaagcaactccgatatgggaatggaagcttttaataaacagatccatgaggctgataaacaaatcgataagctttccgtgctacttcaaaagctaaaggaagctaatgaggaatccaaagctgtcacaaaagcatcttccatgaaagctatcaagaagaggatggagaaagatattgatgaagttggaaagattgcacatggggtcaaaacaaaaatagaggctataagcagagataacctatccaatagacaaaagcctggatgtgagaagggaacaggtgttgacagagcaagaatgaatatgacaaatgccttgactaaaaaattcaaggatctcatgacagagttccagactcttagacaaagaatacaagatgaatatcgtgaggttgtggagagaagagttattacagttacgggaactaggccagatgatgagacaattgatcgcctgatagaaactggaaacagtgagc

SEQ ID NO: 6481 - DNA, 541 bp, Glycine max
  misc_feature (513)..(513): n is a, c, g, or t
ccatctccaccaccaccacacaagccaatcaagctctctgctccttcccagctccatttccagcaagcaagccgaagcactagatcctcgatggctcgcgtggcactgctcgccgtgttcaccgtgctcgccgcactggcggtggcggagatggcgtctggggcggtgacctgcagcgacgtgacgtccgccatcgcgccgtgcatgtcctacgcgacggggcaagcgtcgtcaccctcggcggggtgctgcagcggggtgaggaccctgaacggcaaggcgtccacctcggccgaccggcaggcggcgtgccgctgcctcaagaacctggcggggtcgttcaatggcatcagcatgggtaacgccgccaacatccccggcaagtgcggcgtctccgtctctttccccatcaacaacaacgtcaactgcaacaaccttcattaagttatctacgagcatcatcatcacaccaggcttagctagcccactcggtgtctactgttgctgctctcngcgtgtattcgttgttgttttctgcatg

SEQ ID NO: 6482 - DNA, 1964 bp, Glycine max
  misc_feature (1947)..(1948): n is a, c, g, or t
ccacgcgtccgttgcggcttcacgaaaaactattctatttaggataaagaaggagagactggactagctgagttagggtgagttgcaggcagtgtcatctctcctttgacgacaagatgagcatcccaattccccatcggcagttattcatagacggagactggaaagtccccgtcctcaagaatcggattcccatcatcaacccttccacccaacacatcatcggggatatcccagcagctactaaggaagacgttgatctcgctgtcgctgccgccaaagctgccctctcccgcaacaagggcgccgattgggcctccgcttccggctccgttcgggctcgctacctccgcgccatcgctgccaagatcaccgagaaaaagcctgaactagcaaaactcgaagctattgactgtggaaaaccgctcgatgaagccgcctgggacatcgacgatgttgctggttgctttgagttctatgctgaccttgctgaaaaattggacgcacagcaaaaggctcatgtgtctcttcccatggacacattcaagagttatgttcttaaggagccgattggagtcgttgctttaataactccttggaattatcctctgttgatggctacgtggaaggttgctcctgctctggcggccggctgtgctgcaatattgaagccctctgagttggcatctgtgacatgtttggagctcgctgaaatttgcaaagaagtcgggcttcctcctggcgtgttgaacattctcactggattaggacctgaagcgggtgctcctttagcagctcatcccgatgtagacaagattgcctttactggaagctctgcaactgggagcaaaattatgacagctgcagctcagctgatcaagcctgtttcactagagcttggtgggaaaagcccaatcattgtttttgaggatgttgaccttgacaaggctgctgaatggaccatatttggttgcttctggacaaatggtcagatatgcagtgcaacttcccgccttattgtacatgaaagtatagcaacagaatttttgaataggattgtgaaatgggtcaaaaacatcaaaatttctgatcccttggaagaaggttgcagactaggccctattgttagtgaaggacagtatgaaaagatattgaagtttatctcaaatgctaagagtgagggtgcaaccattttgactggtgggtctcgcccagagcatctaaagaagggattctttgttgaaccaactgtcataactgatgtaactacctccatgcaaatttggagagaagaagtatttggaccagttctctgtgtaaaaacatttagcactgaggaagaagctattgatctagcaaatgacactgtatatggcttgggttctgctgtaatatcaaatgatctagaaagatgtgagcgcattactaaggcttttaaggctggaattgtgtggattaattgctctcaaccatgcttcactcaagccccatggggaggcattaaacgcagtggttttggtcgtgaattaggagaatggggacttgataattacttgagtgtgaagcaagtgacccaatatatctctgatgaaccgtggggctggtaccagtctccttcaaggctgtgataggtatccaaaagctaacattaataagttgtgggtaatatcaaattacgattatgaccccaaagtcgagaagacatgatgtctatgtataacattgaaatggtttgcactttgcagtcaagattatgttggtagtgtttttatttgatttgtttatggttggctccaccacatgcttctaatgtttgaatttcatcatggaagacttccatcattacattatattgaagcatttcttgcgcttaagttacgaatcaaaaaaaaaaaaaaaaaacaagactagttctctctctctcaaaaaaaaaaaaaaaaaaaaaannaaaaaaaaaaaaaaaa

SEQ ID NO: 6483 - DNA, 1715 bp, Glycine max
  misc_feature (7)..(7): n is a, c, g, or t
tcgagtnagctccctcggcccccccccgccaacacccctcgtgctctgcaattcactctgtacaattcttcgttcgttctctgcagttatatcctttttgagcttcaatggcggacgctgaaaccttcgctttccaggctgagatcaaccagcttctaagtctcatcatcaacacattctacagcaacaaggagattttcttgcgtgaactcatcagcaatgcttctgatgctttggataagattcgattcgagagcttaaccgacaagagcaagctcgatgctcagccagagctcttcattcgtcttgtgcctgacaaggataacaagactctttccattattgacagcggcattggaatgaccaaagcagatttggtgaacaacttgggtaccattgcgaggtccgggaccaaggagttcatggaggcgttgcaggccggtgctgatgtcagcatgatagggcagttcggtgtggggttctactctgcttaccttgttgcagagaaggtcattgttaccaccaagcacaatgatgatgaacagtacatttgggagtctcaggctggtggctctttcactgttactagggacactgatggcgagcaactcggaaggggaaccaagatcaccctcttcctcaaggaagatcagttggagtacttggaggagaggagaatcaaggatcttgtgaagaagcactctgaattcattagttatcctatttacctttggactgagaagacaaccgagaaagagatcagcgatgatgaagatgatgaacccaagaaggaggaagaaggagacattgaggatgttgacgaggagaaggagaaggattccaagaaaaagaagaagatcaaggaggtgtctcatgagtggcaactcatcaacaagcagaaaccaatttggctgcgaaagccagaagagatcaccaaggatgaatacgcttctttctacaagagcctcaccaatgactgggaagagcacttggctgtgaagcatttctctgtggagggccagcttgagttcaaggccatcctctttgtcccgaagagggcaccctttgatttgtttgacaccaggaagaagatgaacaacatcaagctttatgtcaggagggtgtttataatggacaattgtgaggagctcattcctgagtaccttggatttgtgaaaggtgttgttgactccgatgacttgccgctcaacatctctcgtgagatgctgcaacaaaacaagatcctgaaggtgatcaggaagaatctcgtgaagaagtgcattgagatgttcaatgaaattgcggagaacaaggaagattacaacaagttctatgatgctttttcgaagaatttgaagttgggtatccacgaggatagtcagaacaggtccaagtgggctgattggctcagataccactcgacaaagagcggagatgaaatgacaagcttgaaggactacgttacacggatgaaggagggtcagaaggacatttactacatcacaggagagagcaagaaggcagtggagaactctcccttcttggagagactcaagaagaagggctatgaagttcttttcatggtggatgcaattgatgagtatgctgtgggacaactcaaggagtacgatggcaagaaatgggtttcagctacaaaggaagggttgaagctagatgatgagactgaggaagagaaaaagaagaaagaggagaag

SEQ ID NO: 6484 - DNA, 1887 bp, Glycine max
aaattagaggagtaagtatgtaatagggacaatagaggaagaatgagaggctctagcactgatccagctttttcctggaggcgcatgacataatatctctctcttctccaacctctctcatatatgtaaagacaaaaccaaaaccgtgtttatgcttcagcccttcatcatatagatctgcctgaaaaaaacccttgcgatcagatccagcccaattaatctctctctctagaatgtcttcccagcgcgcagatctagcgtgccggatcttcccggagcccgaaatcgaccacttcgaccggctaccggactcgctcctccttttggttttcaacaagatcggcgacgtcaaagccctaggccgctgctgcgtcgtctcgcgccgcttccactccctcgtcccgcaggtcgaaaacgtcgtcgtccgcgtcgactgcgtcatctccgacgacgactcttcctcctcctccgccgcctccgacaagtcccgcggccccttctggaacctcctccgcctcgtcttcggcggaatcgtgaaaccattcaaaccctcggccagtttctcggcccccaacgcccctcctcctccgccgccgctaccgccaccgccgccacatccccttcctccacctcctccctcgccgtcggttccgacgaagactctgacggcggcgtcacccaccactccccaacccaagtcctcaagaacttcaacgagattcgcctcctccggatcgagctccccagcggcgagctaggcatcgaagacggtgtgctcctcaaatggcgcgccgatttcggatcaaccctagacaattgcgtcatcctcggcgcctcctccgttttccaccctaaagacctaaccgaccccaccaccaccaattgcaacgcaaacgacgacaatggaagcatccctgactccttctacaccaacggcggcctcaaactgcgcgtcgtttggaccataagctccctcatcgccgcctccgccagacattacttgcttcaaccgataatctctgagcacgccaccctcgacaacttgttgctcactgacgccgatggccagggggtgctttacatgaaccgggagcagctggaggagctgagggtgaagccgctatcggcgtcgtcggcgtcgaagaggactcttgtcccggcgctcaacatgaggctctggtacgcgcctcacctggaattaccaactggggttgtgttgaagggtgccacgcttgttgctattagacccagcgagcaatcccccaacacggccaagaaggaggcgtcggatttgtcgtgggtttcgacggcgtttgaggagccgtataggacggccgccacaatgcttgtcaagaggaggacttattgccttgagatgaactcattctgatgcgtttctgagggaatgcagaatcattttacaggggagaaaatgttaagttcttcatagaagggaatcaggaaactcaaattttctttgggcggacatgaagtggaagcagcttggtcgctggaatcctgctctttccggcttctgaaactgtggcccacatttgagtagttactaaaaggagctgcaaatcattcaccaatcatgcttgaactgaaaactgaatgcatctgctgggtttttttaatttgaggcaatgcttgtaagagtgcacaccctgcaactaggaatgatcatgtaagagctttaagtttgtagtcatctgcccttataagatcgccgtgtgaatattctaggtatcagtttggtttgcctttgtgatatatttttctcaagttaaatgagcaatgtactttgcctctgtaattttaaataacttctggatgagtcaatcataccaaatgcaatacctgttcctgccaaaaaaaaaaaaaaaa

SEQ ID NO: 6485 - DNA, 1178 bp, Glycine max
gaagattacaacaagttctccgcaatttcattgaacatctcaatgcaattgcggagaacaaggaagattacaacaagttctatgatgctttttcgaagaatttgaagttgggtatccacgaggatagtcagaacaggtccaagttggctgatttgctcagataccactcgacaaagagcggagatgaaatgacaagcttgaaggactacgttacacggatgaaggagggtcagaaggacatttactacatcacaggagagagcaagaaggcagtggagaactctcccttcttggagagactcaagaagaagggctatgaagttcttttcatggtggatgcaattgatgagtatgctgttggacaactcaaggagtacgatggcaagaaattggtttcagctacaaaggaagggttgaagctagatgatgagactgaggaagagaaaaagaagaaagaggagaagaagaagtcatttgatgaactctgcaaggtcatcaaggacattctgggagacaaagtggagaaggttgttgtctctgacagaattgttgattccccttgctgtttggtgactggtgaatatggatggagtgcaaacatggagaggatcatgaaggcacaggctctgagagacagcagcatgagtggctacatgtctagcaagaagacgatggagatcaaccctgacaatggtatcatggaggagttgaggaagagggctgaagctgataagaatgacaagtctgttaaggaccttgtgttgcttctctttgagactgcccttttgacttcaggtttcagccttgatgatcccaacacatttgcttcgaggatacacaggatgttgaagctgggacttagcatcgatgaggatgacaatggcggagatgatgttgatatgcccccgttggaagaggacggtgctgaggagagcaagatggaggaagtggactaaatgccaaaggtgttgtgttaatgaattgtggatcgtacgatttagtctgttaaatggtacaggatgcataagtctttatcttccttgttttgttttttgaaatatattgggttttctttttaacttttgtgatgtgaaaatgtgtctgtgtattgcatctacctattttgtcagtgatcgttatgaatatacatcattgtaaaagagcaagtgttttctacc

SEQ ID NO: 6486 - DNA, 1864 bp, Glycine max
  misc_feature (1844)..(1844): n is a, c, g, or t
  misc_feature (1863)..(1863): n is a, c, g, or t
aaaaaaagaaaacataatgcagagagaggtagaagaatccagaacccgttgtttgtctccgattcccgttcctatataaagctccttctttcacccccgcctccgccctcgcctccctacaattcgctctgtgcagtttcctcgctctcttttctgcaattttcttttttgttccttctctgcggttatctttttgagcttcaatggcggacgctgaaaccttcgctttccaggctgagatcaaccagcttctcagcctcatcatcaacaccttctacagcaacaaggagactttcttgcgtgaactcatcagcaacgcttctgatgctttggataagattcgatttgagagtttaaccgacaagagcaagctcgatgctcagccagagctcttcattcgtcttgtgcccgacaaggccaacaagactctttccgttattgacagcggcattggaatgaccaaagcagatttggtgaacaacttgggtaccattgcgaggtccgggaccaaggagttcatggaggcattgcaggctggtgctgatgtaagcatgattgggcagttcggtgtggggttctactctgcttacctcgttgcagagaaggtcattgttaccaccaagcacaatgatgatgaacagtacatttgggagtctcaggccggtggctctttcactgttactagggacaccgatggcgagcaactcggaaggggaaccaagatgaccctcttcctcaaggaagatcagttggagtacttggaggagagaaggatcaaagatctggtgaagaagcactctgaattcattagctatcctatttacctatggactgagaagaccaccgagaaagaaatcagcgatgatgaagatgatgagccaaagaaggaggaagaagcggacgttgaggatgttgacgaggacaaggagaaggattccaagaaaaagaagaagatcaaggaggtgtctcatgagtggcaactcatcaacaagcagaaaccaatttggctgcgaaagccagaagagatcaccaaggatgaatacgcttctttctacaagagcctcaccaatgactgggaagaacacttggctgtgaaacatttctctgttgagggccagcttgagttcaaggccattctctttgtgccaaagagggcaccctttgatttgtttgacaccaggaagaagatgaacaacatcaaactttatgtcaggagggtgttcatcatggacaactgtgaggagctcattcccgagtacctcggatttgtgaagggtgttgtcgactccgatgacttgcccctcaacatttctcgtgagctgctgcagcagaacaagatcctgaaggtgatcaggaagaatcttgtgaagaagtgcattgagatgttcaatgaaattgcggagaacaaggaagactacaacaagttctatgatgctttttcgaagaatttgaagttgggtatccacgaggatagccagaacaggtccaagttggctgatttgctcagataccactcaacaaagagtggagacgaattgacaagcttgaaggactatgttacacgaatgaaggagggccagaaggacatttactacattacaggagagagcaagaaggcagtggagaactctcctttcttggagagactcaagaagaagggctatgaagttctcttcatggtggatgcaattgatgagtatgcagttgggcaactcaaggaatacgatggcaagaaattggtttcagccacaaaggaagggttgaagctggatgatgagactgaggaggagaaaagagaagaggataagaaggagtcatttgtgagctctccaaggccaccaagnaattctgggggccaagtgng

SEQ ID NO: 6487 - DNA, 2527 bp, Glycine max
  misc_feature (16)..(17): n is a, c, g, or t
  misc_feature (415)..(415): n is a, c, g, or t
tccggaaatctcccgnnggtcgaacccaacgccgtccgcgcctcagaatcgcttaactccagtgctccgcggcgcaacgtgtggatgcggtgtgcttgtcagaacgaccctggaggaagaagccttctctctgagaaccaaatgctcgtgtatgtgcctcctcatccgttgatcaagcactgggtttcaagttttgaggaatgagcaaactcctggtcccattcttcagaaatgcaatggctgagttgggaaggctactaatgtatgaagcttcaagaagattggttgccaactgtttctggagaaaattcaatcaccaatgggtgtagcctctgtggaactcattgatcccagggagcctgtggctgtaattccaatcctgagagcaggccttgctctagctgaacatgcatcnatcgatcttgcctgcaataaaaacatatcatccacgcgtccgcagagatgaggaaactcttcagccaactatatatttgaacaagttacccgagaaatttccagaaggttcgaaagttttttgtggggtgatcctatgctggcgacaggtatgtatagtctgctcatgtttgagctttttgttctcatctcatgatcatcatcactacactggagtcttttgatctgtgtctttgtaatgttatgaatttctttagtacttatgttggttagtaagtttcagaacatagccgcccacctgggccccccccccgaacctttgctggtcttcgtcatctcacgaaatgcaagttctttgttatgtgcatatgtgtctaatatgtagactcaaataaacattttatatgtagtggtgtcataattgcatatatctgggatctcgtgtttggtataacagcaggttttatgttggttgccaagggactaacacaaccctcctccttaacccgagcttgggactagatatgaaaaacatgggcagagtttatattttacattgaattgagttgtgttgtccttttcatggttacgagtacgagcatgccattatttacaaactagagctgtatatggattgggtggcatgttagctttggaatttgtttggatccaattgcaaaggtatgctaattggaacttgagttccacattggaagtataggattctagtgtggaacttataaggccttgggctctccaactacaattgctagcttttgtgatgtggttctcccagattcttatgaaaattgtgttgtgaaccttagtgtaggttcaagtcacaggcttagacactgaaggctgaataaattttgcctgaaaatttcaatcattatgaactaataatggctgggaattatttaggttagtgaattttggacacaattccattatttgaacataagaaaatatctctcacttgtaatcttttttcatcaacatgcatctcaaaaatcaatagggcaactttagatgttcagtttttgttcagaaagcattttccttttggactccctagtgaaatcaatgacatctttgcataacccagcagtggttgatcacagtggatgttgatgggccaaaatctgatttagccatttaggcagtcataattctgtattaggaagttatttggcagttgtttttatattattttcgaattaggcagtataggttatgattatgatattacagttaatggtgatataagttgtgttgcagatttgtaaaaagcaattaaggtatcatattgttattctgtaatgaaatctggcttaaaccagattatttctatctttattcagaatttagtgtgtttatttcttgagtccaacagaagtagactgaaaccctagacgaactttacctgcaatgtcgagttcgaattctgaagttgcaacattggagagaattttacccaaccaccacccccgaccaaaggattaatctcggtcatatacaaaaacaaaaagaaaatgacttgtgcatcaattttacgtgtttcatattaatattttgtaagaattgcaggtggcactatagtggcagctgtgagcctcttaaaggaacgtggagttggcaacaagcagattaaagtgatatctgctgtctctgcccctccagctcttcaaaagctgagcgaacagttccctgggcttcatgtgtatactggaataattgaccccgaagttaatgaaaaagggttcataattcctggccttggagatgctggggaccgcagctttggtacagatacatgaaaaatatatgaaatacctcatctccttctcccttgggtgccatatttttcaatttttgaggcccaaaatttgtctatttcttcggatggatactgaaagccttgatcagtggcaccctttcgggttacaattacagaaggtattggtcattattattatgaattacgaaggtgttagaggttcaaactcctaacgtaaaaactgactggcatgtcagttcaaattgtttttctttagtggcctaaatgtatttttggccccctgggggggggggggggggggggggggtggat

SEQ ID NO: 6488 - DNA, 1211 bp, Glycine max
tcagctacgtaaaccacgacaccggaggagactattaattcctattagagagttcttaggctagagctggcaaatggtgaacaagaggatggctacgacggggaagaaggaagggaacaacttgctagggttgccgaacttcacagaattaggaaacgggcgtttcaagtgcttagaaacagggcacgaggtcctctcgaaggacatagcgtcctactcgcacagcaaaaaatgccgtttgggtctcatcgatttcgccttgtccaataacaaaccccctctcaacatgttcaaacaacaccctctctgccgttcaaagttgatatgtaagctgactggagacaatgtcaataagtcagaggaacatatctggaagcatatgagtgggaaaaggtttctcaataaattagagcaagaggaagaagaaaagttgttgtgtcatggattggaaggtgaagagagcttacatgagtcaaaaagtgcagatggtggaaaaaaggatagaatgaagaagaagaagaagaaaaagaatagggtcaaggaaattgatgaggagaaattgcaggtgtcaaaaagtgtagatggtgcaaaaaaagatagaatgaagaaggaaaataataaggacaagggaattgaggaggttatatctgaagttaggaagtcttccaatgagaacagtgacactgaagacgaagacttctggatgcctcctgctggtgatcgttgggacaatgatgatggtggcgatagatggggttcagagtcagagtcagagcagggaactgaagagggagatgtaattgatggtgatgctgctgaggattgcaaggagtcagacgagttgtcatcaaggacgaaaagaatgtcgatagaaattggaccaagcagctttgctacaagaaaaaagaaaagtaagaagaaccaccaaacttagtatttgttagtacttttagttaagagaattgcaagacaacttttgcaggcattgcgtgatttaaattatgtcagcccaggtcattagcattatgatacaaaggggatatgggtacaaaatacattgttcaaatgagttttttcttgtattaagaagctgctttttcagtaaatttgtatgacaagcagcatgaaactggatcaaattgtaagtcttcaagtatgcagtcaaagccaagtctgtttttggtattatttatgaaaaaaaaaaaaaaaaa

SEQ ID NO: 6489 - DNA, 2318 bp, Glycine max
ttaataatagaacacaagtagttaattcaataacaacgttttcaaaaattcacttctccttcaacgaggaaagcagcgtttcctgtttttgagttgtcgcattttgtgacggcttaaaggcatgggagacattgaagaacaaaccatctgacatagatctcatattaacagaagtggatttgccatcaatatctggattctcacttcttactttaatcatggagcatgacatttgcaaaaacattcccgtcataatgatgtcttctcatgattccgttagcatggtactcaaatgcatgttaaaaggtgcagctgattttcttataaaacctgttcgcaggaatgagctaagaaacttgtggcagcatgtatggagaaggcacgccataagcaggcctcctcaaaattttacactaccagagattgaaattggttttgctgcagaaaaccatgctgcaagcaatgactctagtggttctgtggcttctacagcaaataatggtgaatgcagcgagaaaacaagtgaggctcaagatatatcgcagctgaagaggtcttcaaatttgagcaatattgacacggtgaagcatgaaaattctaccaaatgtgaaagggaatcagatgagcaccaccttggccccccccccaaatcactgtttgtatcagaagattcaaggtgcaacaaaacttttaaaccaacaggtttaaggctaggtcaaggctatgaatgctgtgaaacgagaaatcaagatgtagttctaaaaatagagttgatcaaatccaatcctgaaattaatacagatattcatggatgcagtgatgaactggtagatccttatactggggccattgacttgattgctacattcaagaatcttccaaagagcactgatgaaaaatgtagtttcagtagtggtaacactgccaagtttgattttgatacacaattggaactttctttaagaagaagagattttcctggaagctcatgtaaagctgcatctgaggaaaggcaattattgaaccattcaaatgcttctgccttttctaggtatagtagtagtaagttgttgcagcccctttttccaacaccatcaactatctctgctaaattaacaaattccagtctgagttctcatgagtcccataaattctcagaaaatgcatctacttctcatcaatatggtggaaaaaatcaaaatcaggagaaaattatcactccagtcattggtcagtctggacaagttgatccaaaattaccaaacagtcaacttggatattttcctgctacaggggttacttctgatcacaagtctacaggaaatggaaatgtcttcccttctatgctttatgcagaatcaggtgtccatcccatatggactccaaaatcagtgtgccagaaagaaagttctccatttcccacaatcacttcatcccagtccaatcctcaaagtcacaactcagaatgtcatctctggtcggaagattcaacccatgcttctgataaaaatttaaatgatcaaattaatttggattgtgagacacatgactctcctgatgctagtcagagtgctggtactagttttttccacgacacagcaaatcataatagtagcggtgtatacagaagcatgggctgcagaagtgatggaaatgctacttcagctaaggtagccaaggagagccatggaagttttattgatagtggtcactgcagttatgatggattcatagggacagattctcatcgcacaagccaccgagaagcagctctgacaaagtttcgactgaagcggaaagacagatgctatgagaaaaaggtgcgatatcaaagccggaagagattggcagagcagcgcccccgggtgaaagggcagtttgttcgccaagtacaagatgatcatccagtagcagatgtgggtggtggttcctgaaattgttttgtttcaagttaccttcatcattgaattacagtctgacttccaaatctgatttgcctttctcgacaaggattaactgtagggtctagtttgtctggtgaaattatgtttcctcttagcgttgttagtattttcttctggcttgttatattggctgtttcttagaatgtaggattgtaagtattttgtaggtttgttttgaagttttgattttacctcgtgtatatgctttcttgattgaatactaatatagggctactatcgttatataggcagtatgcttgtgtcttgaaagattgaatttttatttttttttatctcggcaagcatctctggtttgcaagcaaacgatctttttttaatctttacaaaaaaaaa

SEQ ID NO: 6490 - DNA, 1278 bp, Glycine max
tcagctacgtaggccccccccccgggaaaccagtgaagtgatgagccaagacctcaagcgagactacgtcgtttcggaggagatcggccggggaagattcggcaccgttttccgctgctcctccgcagactccggtcactcctacgccgtcaaatccatcgacaaggtggcaataaccgccgccggagactccctcgacgcgcaatgcctattgacggagcccaagatcgttcagcttctctcccctcaccctcacatcgtaaacctccacgatctctacgaagacgaaaccaaccttcacatggttctcgacctctgttacgaatcgcagtttcaccaccgcgtcatgtccgaaccagaagccgcttcggtgatgtggcaactcatgcaagccgtggcgcactgccaccgcctcggcgtcgcgcaccgagacgtgaaacccgataacattctcttcgatgaggagaatcggctcaaattagccgatttcggctcggctgacacttttaaggagggcgagccgatgagcggggtggttgggacgccgcattacgtggcgccggaggtcctcgccggaagggattacaacgagaaggtcgacgtgtggagcgccggcgtcgttttgtatcaaatgttggcagggtttctgccgtttcgaggcgattctcccgtggagattttcgaggccgtgcttcgcgccaatttgaggtttccgactcgtgttttttgctccgtctcacccgcggccaaggatcttcttcgtaggatgctgtgtaaagaggtttctagaaggttctccgcagaacaagtcctaaggcacccatggtttagcgttgctgaacagagtgagtaatcttatgtgcgtggaggtggttgatctctctgtatatactactgcaccctactatgccttttgggggacagagatgaattttatattctctgactaaggttgaagaaaaccccctttttcccctttggcttgaggattcggcagagtatagagtacagaggagtgtgtaaagaaacgcaacttggaggttgggttgttcttttctttgttattgtttttttttttttaatgtatgttgtgttttgaaataacttgccatttggcaactctagttagaaacaatgtttgatgtataagtattagtgtataacttgaatgttctctttttcatgaatccaaaaagctgttggtttgttgccaaaaaaaaaaaaaaaaaaatccaaaaaaaaaaaaaaaaaaaagggcggccaacgactagtgagcaa

SEQ ID NO: 6491 - DNA, 1460 bp, Glycine max
ctgcgagaagacgacagaagggggagaataggcctttcaatgaccaaaggtacttcttggatgatgagaagctcaaggatttggggtggtctgagggcactacttgggaagagggtctaaggaaaaccatggattggtatgtcaagaatcctgattggtggggtgacgtttctggtgctttgcttcctcatccaagaatgctcactatgccaggagttgagaagtactatgatggctctgataatgtgaccggaaccgcttccaatggtgatgttaaccattctaatcagaacagaatggtggttgttccagccacaaggaataatgtgtcaccacaaaaggcatctttgaagttcttgatatatggtggtgcagggtggattggggggcttataggaaacatttgtgagaagcaagggataccctttgaatatggcatggctcgcttagatgatagatcacagatcttgtttgattttaggaccattaagcctactcatgttttcaatgcttctggggtgattggagcattaaatgtgaaatggtttgaagctcataagccggaaactatacgtgctgttgttgttggtgtgttaacattagcagatgtctgcagagatcatggtctcctcatgatgaattatgcctttggtggtaacttggaagacaaagcatattccactgatgccttctattttagaacacaagccaaggttgaagagttgctaaaggaatatgaaaatgtttgcaccctaagaatccaattgccagtgtcatctgatctcagcaacccacataacttgatcactatgataacaaggtctgataaagtggccaacattccaaacagcatcactgttttggatgaactcgtaccaatttcaattgagatggccaaaaggaattgcaggggcatttggaacttcacaaaccctggtactgtgacatgcaatgagattcttgagatgtacaaggattatgttgaccctacttttaaatgggttaattttacacttgaacaacaggctcatgtcccttctccaagcactaatgagatggattcatcaaaactgaagaaggaatttcctgagctgttgcctgtcaaggactcattgatcaaatatgtgtttgagccagaaaagaaaagcttggggttttgagtagcataattaaccatatataaatgtatacatttcggtctctatcattttattttcccttttttggttagtttggtttagtttgatagaattgaatttcatattccttttacctttttttttttcatttgtatttgcttctgctttttgtagatgcttgggttttgtagtttatattttctattccataacagaactattttggtcaaaatcaaaagaagttgaataaagggttaacccctgatgtatgaaactatgaatatatccaaattcgtccatggatttttttaattattcatt

SEQ ID NO: 6492 - DNA, 1648 bp, Glycine max
tttgatggcttctaaggccatcatccaatacagctcttcttcttcttcatctcatgcgatcatcactacatatgatgtgtttgtcagcttccgcggtgaagacacgcgcaacaacttcactgcttttctctttgatgctctctttgaaaatggcatccatgccttcaaagatgatacacatcttcagaaaggcgaatccatagcacccgagctgctactggccattcaagggtctcgccttttccttgtggtcttctctaagaactatgcttcctcaacttggtgcttgcgtgaacttgcacacatctgcaactgcactgttgaaccatccccgagtcgtgttcttccgattttctatgatgttgatccatcagaggtgcggaaacagagtggttattatgggatagcctttgcagaacacgaagaaagattcagagaagatatggagaagatggaagaagtgcagagatggagggcagctctgattcgtgtggccaatctctctggttgggatatccgaaataagtaagtacaaatttatatgcagtcagtcatattatatccatgtgcatacatttcatcatttcttagtcacgttgttttatcaaacttactatcgctttctaaagtagagttcagagaagttgaggaggtaacatgcaaattgactctaaatttatacatgtttaacgcgaatggtgtttaaaaactttgaaattatcttatcctgtacatatatacattctgttgtggttctgataatttgccattctttattttctttaaattttcaggtcacaacctgcactgattaaagaagttgttcaaaatataaaatatatcctaggtcccaactttcaaaatcttccaaacggtaatctagtcgggatggaatccagtcttgaagaattagaaaagtgtttacgattagagtcggttaatggcgttcgtgttgttggaattagtggaatggggggaataggaaagacaactcttgcccgtgcattatacgaaaagatttctgatcaatatgattttcattgttttgttaatgatgtaaacaaaatttatcaacattctggttcactaggtatacaaaaacaattactttctcagtgtctaaatgatgaaaatttagagatttgtaatgtttctaagggaacatatatggtatcaactatgctacgcagtaaacaaggacttatagttcttgataatgttaataaggatgaacaactatgtatgtttacagggggtagagagactctattacatgaatgctttggtgaaggaagcagaatcattataatttcaaggaatgaacacatattaaggacatatggagtaaatcatgcttaccaagtccggccattgaatcaagacaaggctgttaagttattttgcataaatgctttccattgtaactatattatgagtgattatgaatggttgaaacgtgatgtactatcacatgctcaaggccatcccttggcaattaaagtaataggcaaatctttgtttggtcgaaatgtttcacagtggagaggtacattggttaggctaagtgataataaaagtaaggatattatggatgtgttgcgaataagttatgatgatctagaagaaaaagataaagaaatatttttag

SEQ ID NO: 6493 - DNA, 669 bp, Glycine max
  misc_feature (1)..(1): n is a, c, g, or t
  misc_feature (8)..(9): n is a, c, g, or t
ntggcgcnncccacgcgtccgcccagcgtccgaattcctcaaccacacttgccatatcaaagaaaagagcatcaacatcagatcaaagatacaacatggaggcacttcaatcatgggtttcaaagcacaagctcgccagcattggggcactctgggcctctggaattggagcaacacttgtggcttattcatgcaaaaagtctccaatgaagccaagtctcaggcttatccatgctaggatgcatgctcaggctctaactttagcagtgctatccggtgcagctgcttatcattattatgagaaacgtgatgttcagccaaaaccagaggcagattatattattcctgctcccaatgtcacccagatggttgaatatgaacttcaatgtcctttctaaaaattaaaaataaaactgtaggggtcatgttattaagattaggagatattcctatcatcgagtttttgcttttgcctagaaagaatattaattgtttgtgtattttatcaatgatccgactccagaactagggggaatagctattgctatgcaatgttgcaatgcatctctatgtatgttctgagggtgcactatcttaattttctaatgtatatatacaagttttaagagaagtttcaattcagcaaaaaaaaaaaaaaaaaaaaaaaaa

SEQ ID NO: 6494 - DNA, 1267 bp, Glycine max
gacgagtggcacctcaggcgtcagcttcttccttttcatactgttgtacttttaccaaataagagaaacaaaaaacaaatccacacactccattttcgattcctttccatttctccgttccccttggaacgttttctctctgtgtgtctcgctagggcaaaaaccatgaacatcttcaggctcgccggtgatatgacccatcttctcagcattctcgtcctcctcctcaaaatctacgccaccaaatcatgctcagggatttctcgcaagactcaagagctctacgcgattgtgttcgtggcacgctatttggatctgttcacggacttcatctccgtttacaacaccttcatgaaggtggtgttcattgccagctccttagccattgtttggtgcatgcgttttcaccccatggtcaggagaagttacgatagggaactcgacacttttcgccattatttccttgttggggcaagctttgctttggcactcatcttgcatgaaaagttcactgttcaagagattttctgggcattttcaatatacttggaggcagttgcaatattaccccagttggttttgttgcaaaggagtggaaatgtggacaatttgactgggcaatacatattctttcttggtgcatatcgtgcattttacatcctgaactggatataccgctatctgactgagccacattttactagatggatagcttgtgtctcaggtgttgttcagacagctttgtatgcagatttcttctactattacttcatcagctggaagaacaattcgaaactgaagttgcctgcctgaattatctcaagttgttttggaatttagacctgtgtgaccagtcaccgctaaattttacagagcgtcgtggtttggatgatgttagttttgagagtaacgagacaaggctaactcctctccctgttcatgagtggggtaagtaagttttgtttttaaggttcaagggtaaacaggttttaacttctgatgaatataaccgtcccgtgggttaaaatgcaaatgttatgtgatgatgttttgtatattcacgtctccattgcatattattgtatagtttgtagtgtaaggtagctgattttggttatgatacgaatgatccctagcttaggtatgattacactgtaaaattataccatttcttcttttggcagaggtgactaaatgcaaattctgtcggaataccgtaacttgattgctatttctatttataatcgcaaattatgttaattggaca

SEQ ID NO: 6495 - DNA, 2813 bp, Glycine max
gatcagctacgtaggccccccccccgaagaaaaggttctctccctctctctcttcttctctttctctgcgtgtgtgttcgtgagtggagtggcgtatgtgtagctgcgctctctatcgccggcgctctcgtcggaatttccgttattgatttttccgatcaccggattcgatccaatccctaatccctaatcccgcgattccatcaattgaaaaaattgaatagccattgaaccgtttcgtttcgggggtagcggagatggacgtttacgcgagcagcgacgaagattaccattacgactccgaccacgaggactccgtcgaggcctacgaaaacgacgagaattacgccttgctctcttccaagggcaccactactaaggtgattacaaaggaatcactgctagctgcacagaaggaggatttgcgcagagtgatggacatgctatcggtgagagagcaacatgctcggacgctgcttatttttcatcgttgggatgtggagaatctgtttgaagtgttagtagacaaggggaaatcatttctctttgctgaagctggtgttagtgtggatgaacatcgcaactctgactcacctgttcctcctgcattcatgtgctacatctgtatggaggaagttcctagtagcaaaacaacgagaatggactgcggtcactgcttttgcaacggctgttggatagagcactttattgtcaagataaatgagggtcaaagtaagcgcattagatgcatggaacacaagtgcaattccatatgtgatgatgccgttgtaagaactctactcagtagagagcaccctcatatggcagagaaatatgaacgctttctgcttgaatcttacattgaagacaataagagagttaaatggtgccccagcacacctcattgtgggaatgcaatacgggtcgaggatgatgaactgtgtgaggtagaatgttcatgtggtgtacaattttgttttagttgtttgtcagaagcacactccccttgttcatgtctgatgtgggagctttgggctaagaagtgccgagacgaatcagaaactgttaattggataactgttcatacaaaaccatgtccaaagtgtcacaaaccagtggagaagaatggtggttgtaacttggttagctgtatctgtggccaagcattttgttggttgtgtggtggagctaccggccgagagcatacttggtcaagtatagctggtcatagctgtggtcgatacaaagagcaagaaaagacagctgaacgtgcaaagagggatctatatcgttatatgcattatcataaccgatataaagctcacacagactcctttaagattgaaagtaaactgaaagagactatacaagggaagattgccatttcagaagaaaaagattctacactcagagattatagctgggtaaataatggactctccagacttttcagatctaggcgagtcctatcatattcatatgcatttgcattttatatgtttggagatgagctttttaaggatgaaatgacagatgctcaacgggaaataaaacagaacttatttgaggatcaacagcaacagcttgaggcaaatgttgaaaagctctctaaaattttggaggagccttttgaaaccttttcagatgataaggttgttgagataaggatgcagatactcaacctttcaacaattattgacaaactttgtcaaaaaatgtatgaatgcattgagaatgatctattgggttctctcaatcttggcattcatagtattgctccatacaagtcaaagggcatcgagagggcatcagaactttcatttggctggaacaacaaagtcaataatactggtaaatgccttttgtgggttttgtttgaataattagctggaccaaaacccttttgcgttagcattgccattgtttgtgatacctcctctcataatgcattaacaggaaattaagtgagcccaattttgatttcttgcttccatttttgtttcttttgttatgcattaaaatgaagaagtattacttgtagatgaggttacgtatataattatgcttatagtgcttattgtagatcttgttgttatttaccaacatggaaatatggtggcaactcataaatttatatttttagcttccttatcttattatgttatgaatgttcttatgtatgtcttcttcagtttgactttgtggatgctcatcagaaaatgtttctgagtgaaaaggattattgtatctatgccgctagcgctggtgtaacagaagaacttgatcgaccatctggatcagggagttcagacgataatggatgttcttctcgtaaacgtgctagaaaagagggtcttggaggtggtggtttttttgatctaaacttgccagcagagtttgtagacagaaattgactttgaaggacaccttattatacgtacaggcgtacaggtctaacaacataaaattgctttgctttgctgcctttggaaggaaggaattaatctttttggatttcataccccatttgctttctcatatctttcttttagccagccatgtctctgctgagataaaagatatgtttccaaggtttcttattcctatgccatctacctttctgtttgaaatcctagcgctgtatatagatagccttggggcatttatttgctagtagttttatgtaaatggctaccttgaggacaactaggatgcttttattcctattttatggagttataggtggaggtaacttcactgatttttcttcaaacaagtttacactattttaacttgtttaagttacaattttc

SEQ ID NO: 6496 - DNA, 1048 bp, Glycine max
aagggaagattgccatttcagaagaaaaagattctacactcagagattatagctgggtaaataatggactctccagacttttcagatctaggcgagtcctatcatattcatatgcatttgcattttatatgtttggagatgagctttttaaggatgaaatgacagatgctcaacgggaaataaaacagaacttatttgaggatcaacagcaacagcttgaggcaaatgttgaaaagctctctaaaattttggaggagccttttgaaaccttttcagatgataaggttgttgagataaggatgcagatactcaacctttcaacaattattgacaaactttgtcaaaaaatgtatgaatgcattgagaatgatctattgggttctctcaatcttggcattcatagtattgctccatacaagtcaaagggcatcgagagggcatcagaactttcagttggctggaacaacaaagtcaataatactggtgtaacagaagaacttgatcgaccatctggatcagggagttcagaggatagtggatgctcttctcgtaagcgtcctagaaaagagggtcttggaggaggtggtttttttgatctaaacttgccagcagagtttgtagacagaaattgactttgaaggacaccttattatacgtacaggcgtacaggtctaacaacataaaattgctttgctgcctttggaaggaaggaattattctttttggatttcacaccccatttgctttctcatatctttcttttagccatatgtctctgctgagataagatatgtttccaaagtttcttattcctatgccatctacctttctgtttgaaatcctagcgctgtatatagataccttggcatttatttgctagtagttttatgtaaatggctaccttgaggacaacttctagggtgcttttattcctatcttatggagttattataggtggaggtaacttcactgatttttcttcccccctcttccataacttgcttcaaaatggataaagcaattgtctcggcttcttgaagggttaggc

SEQ ID NO: 6497 - DNA, 1731 bp, Glycine max
  misc_feature (68)..(77): n is a, c, g, or t
ttttttttttttttttttttttattttttttttttttttttttttttttttttttttttttttttttnnnnnnnnnnttttttttttttttttttttttttttggaatttgtttcaaacatctattatagatgataaaatatgagataactttcaaacataatccattatgcatcaaaccaggtgttatttcatttctcccttgtttggcaaattactatgtaaatgatctcttaaacaccattaagacaaaaactatggaaaaatgatcacctgtacaatagatgatacgggaggaaaaacattcgatcactaatgatctaattttccctcaaacacatcacacaaaatctataaacagattattgactacaatttacaaaaaagaaaaaaacaaattgctatataatagctgactgcagacatgtaaaaagggggtgaattttcttaaaaggaatttattgggactgtcatgcaacttagcatccgaaggaaaaaatctcaatgatcgccattgttcaccttgatctctataagttcctcaatagactgacggcatatagggcatttattggattgaagtcgatgagcatttgcacactcactgcacatacacatatgtcgacaaggtaaaacagcagtatcctttggttcagtcatgcatatgacacactccttcccaggatcattgtcatcaaaatcagctgcggatgagtttcctattccatataactccctcaactcataacgaacaccatcaatccacaaaatctgcttaactacttttattaggaatggaccagcaccattacttttctctaagacaccttgagttatttgcatgtgaggggatgcgtctagcaaggaatcaccaggagtttcatcttctgaggtagttttcaaacttgtttcagcacatattactagaggaaagacatcttctccaggtgagggctttgaaagatcatccaactcaaagaagcctaggtcaattcctgttcctgaaggctgagcaaatttctggccaactcctttctgaaaggggattctgaccggctgaaatgcctcgggatataatggaacaaacctacatttttcttcttccttggcaaagtataagatagtaatgctgccatcgtagacagcatcgaaaacgaaggagagaagatgaagatcggggttatggtcgtcgacctcgaggcgcagggtgtctttgtggacattgacgtagttccttatcttcttggcggtctggtggtcgacgtagggcggaggagtgggggcagcaggacgagggacgggccacgcggcgagctggggctggggctgggggtggtagtaatgctgcgggtagtgaaagcgaggggcgagagtgggagtgccgtaggaattggggttggagctgtaatagaaagaaattgagtgggtttgtggtggtggcggcggcggcatgggagggggaggggcgtaaggggttgctgaagggagaaagtaaccttgcggctgcggtggtggtgcagggtgggattctgtatggtagtagtaagaagggggtggaggtggtggtcggttttggaggtaattgtttcttcttctgccactccatgagatacccatcagaatcagaaacaaagaaagaaagaagaagatgaaacaaaaaagaggtagctccgaatcggatgcgtgttgtgagggaaaatgatgtctttctttgctctttcaacgcaaaatt

SEQ ID NO: 6498 - DNA, 2065 bp, Glycine max
  misc_feature (897)..(897): n is a, c, g, or t
ctttacctttcccggacctcacagtcgtcaattcagttcagccgcacgacctcctcccaagtcccaaccctccctctccctcacgccttgctctctcagccaccgggaggtcagccgtcaaggaagaaagccatcgcgagcacatccagcagacgaccacgaagccactgcagtcagtcacttggtcgggacgctaccgcttgtcacccatttacgagctcacaccgtcgcgattccaccgccgacagccactgtgacccccaaatgagtatcactagacagcgcccccttggtggtgggggtcatcatgtattggactacctggagcgcatgcaggcagagaatcctgctttcttctatgcagtccaggatgacaataatctcgcgtgtgggaatatagtttgggctgatgcgacttcgccaacgaaggcccccccccctggagatgctgttatattggacacaacctacaagactaaccgataccgggtgccatttacctctttcactgggttgaatcatcatgggcaacctgtgttatttggttgcgcattgattttcaatgaatctgagtcgtcatttatatggctattcaggacttggcttcatgccatgtctggccgccaccctgtctctattacaacagatttggaccctttcatacaagttactgttgcccaagttctcccttcaactcgccatcggttttgtaaatggagcatatttagagaaacccgaagcaaactggctcatttatgtcagtcacatcctgattttgaaactgaattcaagaaatgcgttcatgagagtgagactattgatgagtttgagtcttattggcacccactcttgggaaagattctacgtcatggacaatgaatggcttcagtcaatgtnacaatgcacgacaacattgggttcctgtgtacttgcgggacactttctttggagagatatctatgaatgagggaaatgaatatttgatttctttctttgatggatatgtgttctcatccaccactctacaggtattggttagacaatacgagaaagccgtgtcaagttggcacgaaaaagaattaaaagcagattatgacactactaatagtagtccagttttaaaaacaccatctcctatggaaaaacaagctgcgagtctttacacgagaaagatattcatgaaattccaagaggagttagtagagactcttgcaaatcctgctataaaaattgatgattcaggaacaatcactacatatcgagttgccaaatttggggaaaaccaaaaatctcatgttgtgacttttaattcttttgagatgaaagctagttgcagctgtcagatgtttgaattttcaggaattatttgtaggcatatactgtcagtcttcagagctaaaaatgttctcactcttccatctcagtatgtgttgacatgctggacaaggaatgctaaaaccggtacattgttagatgaacatgcatctgaattgccaagtacttctcgtgaatctgtaccagtttgttataacaatttacgacaagaagcaatcaaatatgttgaagaaggtgcaaaatcaatccaaatctatcatgttgccatgagagctctgaaagaagctgctaagaaggtttgcaccataaaaaatcagagttctggaacagcagagggagctacagcaaccaatggaagcaggggtgaattgcttgtagcagatgaagatgttccaagcaatcaatctgtggcggagaagcaaaagaaaataggagagttgactgctgagttagaggccacaaatcaacgatgtgaagtttatagagcaaacttgctggctgtgctaaaggatatggaagaacagaagttaaagctatcagtaaaggttcaaaatgcaagacttagtttgaaagagtgattccctgattgcaaagggttttaatgcatgcctgtcttgccattttgattcctcttagggtatgttaataacctttgcgtagtttatcgtggtccgtgtctgcaatctgattgaatatttgaatttctcgataagttattaattttattatt

SEQ ID NO: 6499 - DNA, 1678 bp, Glycine max
gccacgtaagctccggcttcggaggcccctcgagccgctcgagccgtccagcctcaggcacattagttcaagccttcaagcacaaaaatgataaccattgttgcttcttacaatgtcactccaaatcagccaactcccagtgatcctatttggctatccgatagtgatcaaattgggcacctacgtcatgtaaacactatctatgcctacaaatcaagacccaacaacaccattgatattgagaggatgaagaactctcttagcaagattttggtgccatactatccaatagctggcagattgaagctgacaaaaaatggtagaatggaagtggattgcaatgcaaaaggagtgacattgattgaagctgaaagcacagccacatttggtgattatggagactttgcaccttccgattccaccatggaacttgttccaaaagttgattatactcgaccctcagaggacatgccgctaatgctagtgcagttaacaaggttctgtggtggtgaaggtcttgccattggagttgctttctctcatcctttggttgatggtactgccgctattttcttcatcaaccgatgggcaaagctggttcgaggcgaagaactggatcccaatgaagttccttttcttgatcgaacactactcaaatttccagagccatcagaaccatgtgttgatctcccagagtggaagcctgtaaggttcatgccagacaacattgctgagcaaaacaagataagtgctatattgttgaaactctcatcaagccaagtggagaagctgaagaagaaggctaatgaacaaccttcaaaagaaggggtaagaccttatagcagatttgaagctatttcttctcatatatggagatgtgcatctaaggctcatcacgctcatgcatctgatgagaatcaccaaccaactgtagttacgtttagtgttgatattcgcagtagattgaatccacctctccctcagaattattttgggaatgctttggcaaaaacactgactcctaagtgtagtgtgggagatatcttattaaacccattaagctatggggctcaaaagataagggatgcggtttatgcggttacatatgagtatataaggtcacacataagttatgttttagggcaagagcaattggataacataagggcttttttctcgggacaaggagaccttattaatgaaccctattctgggaatcctcataacattctcatcacaagctggatgagcttgccagtgtatgatgcagattttggttggggaaagcctgtgcactttggtttagcaaaagtatttcgagaagttagggcacatattattataagccctgatggagatggtgttcttatttccatgaatttcctgacagcacttatggatctttttaaaaaattcttctacgaggatatatgaagaaatatccataccaaaccagctttgtgcaaggaagaattacatgtgactcgtcattttctgtgatcaataatttacatgtgatttaccgtttaatatgttaaataattaaagatcctgtttttattaaaaaaaaaaaaaaaaaatatttttcatggtggtatatttgagtgtataatctttgtttaaaaaaatctgtacatttaaattataaaatttatctaaggattgtgaaaattatgat

SEQ ID NO: 6500 - DNA, 1303 bp, Glycine max
aattcggctcgagggaaaccctagattgcagaggaaacggtgcaaaataagcccaacaacaaaagacaactaacgaggaaacaacgttactttcttcattatcgtgcaacatagcacaaaacccttaagccgttaagcaccttcaacgccgccgtagtttgttattggtttggtttgatggagatggagggtgagaaacagcacaagtttgatgtggacctcggcaacctcatggctttcgattcctatcacaccttcccttctcaaccatctctttccagggaggacctcatcaaacagtgtttactgaaaggcactcacttggttcaagctatcgcagatgccctctttatcttaccatcgaccgaagatttggatggaccccttgtcaccttgcctcccccactcactaaattgcctagagaaaaacatctgccaaaaccaaagcctcctactaaatgggaagcttttgccaaaaagaaaggcatacagaaacggaagaaagacaaaattgtatatgacgagcagtctggaacctggaaacgcagacatgggtatgatcgtgcaaatgatgaagaagctatacctatcattgaggcaaaaccaactgatgatccagaagaggatccttttgccaaaaggaaagaaaataagaagaatagaattgaaaaacaggagaaaaatcgattacagaacttgaaagaagctgcaaaatttggtgctttaccaagccatgttcagttggctgctacagctttgcctataacaggaactcaagcagcgcccaagaaagttacaaaggatgaactaggtaatgtagcaggaattgcagcaactgcaacagccagtgggggaaagtttgacaagaaattggcaggtgaaaagcctcagaaacatgaaggaaaatatcggaagttcctgccagtggtggaaggaaccgggataggatccctggagagggagcaaactgaaaaaatattgaacaagatcatctccaagaattctcataacatactcaacgttgaaaaggctgtcacgatgcacaatgtgaagaaagagaagaaacgaaggagcgagaaaggaaaggcttcagcaactactgacaagaaattgaaaactcagaaaaagtcttttaaaaagggaagctccaagaaaggcaaggcgaaaggaaaatagtttagattttataagaaaaagttttgtagagttcttggaaactctgtttactggtttcaatttttgtagacgataatttcatgtatcaatcgccatcctttttttatttaccaaaaaaaaaaaaaaa

SEQ ID NO: 6501 - DNA, 1929 bp, Glycine max
ctgttgctactccttcttcttctccaccgttttcttcaatccttcattcgttccaatggcgctagggttttatctcaattagaggcaccgaacgctccaaacggaaccatgaatctctcgttggcagctccttcggcatttcgcgggaatctcctcgttcctctgtcgcgctgcacctcttgcttcaaacttgatctccgttttcagcattccgacggttttcgccattcgcgttgtcgtcggagtttgttcaagctgattcgggatccgagatcgagcaggaggagagggattgcttgtagtgttaccgagccagataacggtagcgacgagaaggagaaagaagcagataaaaatggagaaacgctacgtgtggaagattcctctgagcaaagtatccctccacctgtagatgcagaacaactaaatgagtttagtgatgaaaataagggtcaaagtgatgtgcagaatatggatgatagcaatgaagttgccagtggatcacctctgccaggtgtgaagcctcagaaactggatgaagcaataaaaattcccaaggaaacaattgaaattcttaagaaccaagtttttggctttgatacttttttcgtaacaagccaagatccttatgagggtggagtgttgttcaaaggaaacttgcgagggcaagctgctaaaagttatgataaaatatctaagagattgaaagataaatttggagatgaatacaagcttttccttttagtaaatccagaggatgataagccagtggctgttgtggttccaagaacaaccttacaaccagagacaactgctgtacctgagtggtttgctgctggatcttttggactgattacagtttttaccttacttcttcgcaatgttcctgctttgcaatctgatttattatcaacttttgacaatctgaacttgttaaaggatggcctacctggtgcccttgttactgcacttattctgggggtacatgaacttggtcactttttagctgccaaagacactggagttaaacttggggtcccgtactttgttcctagttggcagataggctcttttggtgccattacaaggataagaaatatagtacccaatcgtgaagatctgctcaaggttgcagctgctggaccaatagctggctatgccttgggtcttttgcttctgcttctaggttttgtcttgcctcccagtgatggtattggtgttgttgttgatgcttctgtgtttcatgagtcgtttcttgctggcggtattgcaaagctgcttcttggtaacgttctcaaggaaggaactgcaatttctatcaaccctcttgtgatttgggcttgggcaggactcctcatcaatgccatcaacagcattcctgcaggagaacttgatggagggagaatttcttttgccctatggggaagaaaggcttcattacgcttcacaggggtttcaattgcattgctgggagtttcatcactgcttaatgatgtagctttctattgggtagttctcatattcttcttgcaaagaggtccaattgctcctctttctgaggaaataactgatcctggtgagaaatatgttgctattggagtaacagttttactcttaggcttgttggtatgcttgccatatcctttcccatttacagaagaaaccatcacaagtttctagaaataaatggctccatatactctggcagcatcgatttattctgctagtacatgaaattttgagaactgagtacacaggtaggattatcagtgaatcaaactgtcaacgttggttcgtacgcaaggtgaataatcaaacgtcaaaattttaggctgaaacgccctaagttttgttattcatgattcattaacatgggcgtttttctattaattttaagttccagtttctcacaacggtaaaaaaaaaaaa

SEQ ID NO: 6502 - DNA, 1807 bp, Glycine max
aattcggctcgaggtggcacaatcatcttgatccaaccgtaaagaaggatgcatggacagaggaggaggaactaatacttgcttactattaccaaatatacggcagtaagtgggcagaaattgcaaggattcttcccggaaggtactttgtttgaatgttaatatgcaggcttcaaaacattcatcaatacgtatgtataaaatatgattttaatcatgttaatatgatttgattttggttataatttttcaaaaaaaaaaatctgtttattttgagccaattatactattcaataatgttgaacttgaatctttttcaacatgctttggttttgtgatgtcataaatatttaattccaactttacgaaatatcattcacctcacttctttttcacgagatttcccactgacattaaggactaaaatgttcacttcataaaatcttcactttgttttctgactcttcaaatactattttctgctaatgacatggactaaagtaacctgcacatttaatttcaaggtctaaaatagaaattagaagtatattcaatgtttatgcatcttctctcttgtgattgtgacatgaccgtacttgtccatgttagttcgcctctcctttgagaaacaatgtaggctagcaaaagtagaacaatcatattgaagacattgataaatgtacatgcatttctggtttaagtgctacaagtctttctatatctaatgacccatgataattatttgtatcttttgggggagccaggactgacaatgctataaaaaatcattggaactgctcaatgaagaagaaattggatgcatcacccttagggtgtgacataaaagttgccccttccggtttctgtgcttctggaataaggcctgaacatgttgtggctaaagtggagggtcaaagtttcaatggaatggtttctcccaagcagagtcactggttgaatcgcagtgttgataacctgctacgtaggccccccccccaaaatgattcaggagaggaatcttgctctgcttcatccagggggactcctactcctagggcctcaagacagtttttggataattctctggattgtttacctctttccagtactgttacagatgaggcctatgagtcactgaaacggcaaaaggtttatttttcagatacagagcttaaagtgggtgatgaatctgacagtccccttttgaatttgagctactcaaaatctgccaaccgtgagaagaaaggtcaagctggaaatggaggcaattacaactcaaacaacactatgccacatagtgtagatgaattcagtgaatgtctaagtccaaaaacacacatggcattggcatgtgcatacaataacggttgtactcccccaacgtctatactcaagaatgacacaggcgacatcaacccagaaactttgctaagaaacttagcaatgacctatgagaatgttccttctattataaggaaaaggacacccaagaaggcaagctgttgtgaccgtgaccaagcaccttcgagaatgatcgtaaattctcctgaagcagaatgtgttattggcttagataatttaaaactgaacagggggtttattccattccttcgtagaccaaatactcagccatagctagatctatggaaggatgcataaaatgacagacatgatatgctagtcaattgtaatgctcctttgacatagcagaattgtttaatacagtttttacactagctcaactttattcaaactcgaattgaacttctttattcttaataatatattttttattgtaacacaaaaa

SEQ ID NO: 6503 - DNA, 861 bp, Glycine max
gaaatggggttattccacttcccccagcaaccagaagaagggtgtcatatctcaaaaagtctaatgaaggcgaaccatctaatctcaagctctaagaagagcaactctacttttatattcacaacaaaaaagaaaaaagagagcataaaccaatggctacttcactttcagcaactgggtgtgttggttcttccttctatggaagttggggaacttcaattgttggtgaggactacaccatgctggccaagtcagtgccatcacaagttcgcatggggaagggaaagcccacgagattgcagcctatgatgaagaatgttaatgaagggaaaggtatatttgcacctcttgtggtgatcactcgcaacatcgttggcaagaagcgtttcaaccagcttagaggcaaagcaattgcactacactcccaggtgatcacggaattctgcaaatcaataggagcagatggaaagcagaggcaagggctaatcaggttggccaagaagaatggagaatggcttggttttcttgcatgatagattaataacatatgttcccccatattttgtaactatcatgtgagaaagtatcaagttggaacttgatggttttcaattgacagcagaatgtaaactaggaacccatctctctagttgtgatttttcattcttaagtaatgttctctcttattttgttctgatacatgaaatattataaaaccagaggtgatctatatatcaacggtgatacaatgaacaaagcaatgttatttatacaccatatttttcacaaaaaaaaaaaaaaaaaaaaaaaaaaaaaaaaaaaaaaaaaaaaaaaaaaaaaaaaaaaaaaaaaaaaaaaaaa

SEQ ID NO: 6504 - DNA, 2317 bp, Glycine max
gtaccgggcccccccctccgagtcaagctacgtaggccccccccccccgatgcatgttgaccggtaaacatggcgaccttccacacagaaaccgtgcaatcagggttggccttgagcagactccacatcctattccactcggtggcactcttgtttctctattactaccgcataagccacatcttactggaaccaagctttgtatggattttcatgaccatagcggagcttatcttcggcgagctctggctcttcaaacaggcgttccggtggcggcccgtgtcgagggccgtcatgccggagaagctgccgagcgacggcaagcttccggcgctcgacatcttcgtctgcacggttgaccccgaaaaggagccgacggtgcaggtgatggacaccgtcatctccgccattgccatggactacccctccaacaagctcgccgtgtacctttccgacgatggcgggtgtccggtgactctgtatgggatcagagaggcttctcggttcgcaaaggagtgggttccgttctgcagaaagtatgggatcaattcacggtgccccaaggccttcttctctcccatgggggaggatgaacgtgaactgcttcttcttcgcaaccatgaattcttggcagagcaagaacaactcaaggctaaatacaatataatgcaaaaaaatattgacgaatttggaagagaccctaaaaatcgttccattgtgtttgatagaccagctcgcattgagattataaatgagcaatccgaaataccactggttgtttatgtgtctcgtgaaagaaggccaaatgttcctcatacatacaaagggggagccctcaacacattgctcagagtctcagggctattcagtaacgggccctatgtacttgtagttgattgtgatatgtattgcaatgatccatcatcagctaaacaagccatgtgcttttttcttgatcctgaaacctccaaagatattgcttttgtccaattccctcaaatgtttcacaaccttagcatgaaagacatctacgatagtcaacataggcatgcttttacaacaatgtggcaaggaatggatggactaagaggtccaggtctttctggtagtggcaattacttaagtagaagtgcattaatctttccaagcccatatgaaaaagacggctatgaacataatgcccaaaacaaatttggcaactctaccatgtacattgaatcattaaaggccattcaaggacaacaaacttataaaacgagcatttcaagaaatgtgattttacaggaagcacaagcagtggcctcttgttcctatgaaatagacacaaattggggtaatgagaggatggagatcaacttacctttaccccaaaagaccttgtttcttgggatgtgcccccactgacttcatggaaggcatgcttcagttggtgaaatggagttctgaacttttcttgctaggaatatccaaatacagccctttcacttatgggatttcaagaattcctattctgcacaactcagctacttgggcccccccccccccatgtcaatatattgttgccttaatagtatatggcatcattcctcaagtatgcttcttgaaaggaactcctgtgtttcctaaggttacagaaccatggtttgtagtttttgcaatattatatgtatcctctcaaagtcaacatttgattgaagtcctttatggtggtggctctttgggaacatggtgggatgaacaaagaatatggattgtaaagtcaattgttggaggcatatttggatctatactagcaatcaagaaacgttttgggttaaacaaagcaaaattcattttatcaaataaagttgttgccaaagagaagtttgagaaatatgaacaaggtaagttcgagttcgaaggtgcagctttgttcatgtctccattggttggattactcatagtgaatattctttgcttctttggtggtttatggagactatttaatgtgaaagattttgaaaagatgtctggccaactttttctacttggctatctggcggcgctcagttatcccatttttgaggggataataaccatgaaaagcaaggtgcaatagtagtttgtcaatgattaggctaatttaggtatttgaactttgttcacaaataatttgcttcatatgaaaatctaaagtgcatgctaaatgtttgtatcttaatatgtaattagcgtgcttttatttcatgcatgagaatatggctatcgattttaattaggagcaaaatgtatgttcttactccatttttaatgcaatttctttattttcttgccaatt

SEQ ID NO: 6505 - DNA, 1112 bp, Glycine max
tttttttttttttttttgctcacagtaaacttagactagcttaaattcatcatttcagaagctgatgtaatggtcaatggtcagacgatttctactacactactttctacatagataaacactaatgatctatcattccctgtgaagagaatagttaccttccaaggtaaacacttgtaaacaaattagcaatagggtacccctggagccacatcagggagttcccagtcattatctgaagacacaacaattgatgtttccaacactcactgatttacgctaggttgcttcttgaatactggggtaagtagcttctccaactccagtagaatctcatatttacgataggcttcatttcttttggccaagaacaaatcgctatctttgggcagattacttacagaactacatggaggtggggctgggtgcttcattgccacatccttctgaaccttcaatgatgagtctttatcaggctgttctacaccctttttcttttcccttctttttagtatcttgagatggcatttcttgatgtagtgcatcaaatgatatcgcgagtgccgcgagcacaactgttcttggaccttagggttatcagttaaccagtcagaaatctccttggatttaaccacatcttccttgtccagagtctccaaccacgaataaaccggaatccactgatcggttcgctgaaatcgtgcgtgcggaagatcgagctgattcacttccctttcctgattggggagtctcatgcaattctgaaaggagatgagtctgtggcagagatcggggcggggcatggatcggaggccttcggggagggaggcgaggttggagtcgatccaggcttcgacttcggccatgctcacctccttgggctccgggaaggagcagagccacgctcgtgccatcgtctcccattcttccgattgctgctcagcctctgcttcttgctcttctgtggttacatttgcgtcgccggagttcgacatgcggctaagacgacggttttgagttttttcactaaaattaaaaccacaacacttctcacgctaaacctcttggcttcatgaaactgttggggggggggggcctacgtagctgaaaat

SEQ ID NO: 6506 - DNA, 1616 bp, Glycine max
  misc_feature (1568)..(1568): n is a, c, g, or t
  misc_feature (1572)..(1572): n is a, c, g, or t
cccctcgagtagctacgtaggcccccccccccgtgtcagaaagcaaatattgcctattcggcaatatggcggaaaatggttcaattgagctgaacaagtttgtgttgttttgtttgttgttgctaatacaagtggcagtttctgaaatcatttttgaagagcgatttgatgatggatggcgaagtaggtgggtgaaatcagactggaaaagcagtgagggcaaagcaggttcattcaagcacacagctggaaaatgggctggtgatccagatgacaaaggtattcaaacatccagtgatgccaaacactttgccatctctgcaaaaataccagaattcacaaacaagaacagaacattggtccttcagtattctgtaaaatttgagcaagagattgaatgtggtggagggtacatcaagcttctctctggatttgttaatcaaaagaagtttggtggggatacaccatatattttaatgtttggaccagatttatgtggcacggatacaaagaagctccatgtgatactctcctaccacggtcaaaattaccccataaagaaggacctgcaatgtgaaactgacaggttaactcatttctacacattcattctcaggccagatgccacatacagtgtcctggttgataatagagagagagattctggaagcatgtatacagattgggatattcttcctccacgaaaaatcaaagatgtcaaggccaaaaagcctgcagactgggaggaaagagaatacattgaagaccctgatgatgtcaaacctgagggatatgattcaatcccaagagaaattcctgacccaaatgctaaagagcctgaaaactgggatgaagaggaagatgggaaatggaaaccaccaaagataccaaatccagcatacaaaggaccatggaaaagaaagaaaatcaagaaccctaactacaaagggaaatggaaaactccatggatagataatccagagtttgaagacgaccctgatctttatgtgcttaagcctatcaagtatgtaggtattgaagtttggcaggttaaaggcggttcagtttttgacaacgttttgatttgtgacgaccctgattatgcaaaacaagttgttgaggaggtgtttgccaacagggagattgaaaaggaaggttttgaggaagcagagaaagtgagaaaagccaaagaggaggaggaggctcaaagagcaagagaagaaggtgaaaggcgtagacgagagagaggtcatgatcgacgatatcgggacagatatagagacaaatatagaaggcatcgctatgattacgatggtcatgacgagctttgatgggataaaacgtccttctcaattatctggttgacaaatttcaagattgttatgaattatagttacattgatagtccatctcatgttactttccaagggaaactttttaattttaaataaaagtggtttatttgtcgcataaaaaaaaaaaaaaaaaatttttgtcttgtcttcagttgtcatgcatttactatagactggggaatataaacccaaacccaatttgccatcgataanaagnttgcaacaagggctatagaaatgtgcacgagttttttttttttt

SEQ ID NO: 6507 - DNA, 1629 bp, Glycine max
ccgggccccccctcgagtcagctacgtaggccccccccccccataagcagtgtcagaaagcaaatattgcctattccgcaatatggcggaaaatgcttcgattgagctgaacaagtttgtgttcttttgtttgttggtgctaatacaagtggcagtttctgaaatcatttttgaagagcgttttgatgatggatggcgaggtaggtgggtgaagtcagactggaaaagcagtgaaggcaaagcaggttcattcaagcacacagctggaaaatgggccagtgatccagatgataaaggtattcaaacatccagtgatgccaaacactttgccatctctgcaaaaataccagaattcacaaacaagaacagaacattggtccttcagtattctgtaaaatttgagcaagagattgaatgtggtggaggttacatcaagcttctctctggatttgttaatcaaaagaagtttggtggggatacaccatatattttaatgtttggaccagatttatgtggcacggatacaaagaagctccatgtgatactctcctaccacggtcaaaattaccccataaagaaggacctgcaatgtgaaactgacaggttaactcacttctacacattcattctcaggccagatgccacatacagtgtcctggttgacaatagagagagagattccggaagcatgtatacagattgggatattcttcctccacgaaaaatcaaagatgtcaaggccaaaaagcctaaagactgggaagaaagagaatacattgaagaccctaatgatgtcaaacctgagggatatgattcgatcccaagagaaattcctgacccaaatgctaaagagcctgaaaactgggatgaagaggaagatgggaaatggaaaccaccaaagataccaaatccagcatacaaaggaccatggaaaagaaagaaaatcaagaaccctaactacaaagggaaatggaaaactccatggatagataatccagaatttgaagacgaccctgatctttatgtgcttaagcctatcaagtatgtgggcattgaagtttggcaggttaaaggcggttcagtttttgacaatgttttgatttgtgatgaccctgattatgcaaaacaagttgttgaggaagtgtttgccaacagggagattgaaaaggaaggttttgaagaagcagagaaagtaaggaaagccaaagaggaggaggaggctcaaagagcaagagaagaaggtgaaaagcgtagacgagagagaggtcatgatcgacgataccgggacaaatatagagacaaatatagaaggcatcgccaccatgattacgatgatcatgacgagctttgatgggataaaacgtccttctcagttctcacttatttggttgacaagaatttcgagattgttatgaattatagttacgttgatagtccatctcatgttaatttccaagggaaacattttaattttaaataaaaagtagtctatttgctgcaaaaagaaaaaaaaaaaaaaaaaacaattctttcagttgtcatgcatttactacagactggggaatctaaacccaaacccaaacccaatttgccattgataagaagcttgcaacaagggctatagaaaaa

SEQ ID NO: 6508 - DNA, 1365 bp, Glycine max
tcagctacgtaggccccccccccccgtttggttttcttgatatcttttccaaattcaatgactgatcctggtatcgcgggattggctgtgacatatggacttaatctaaacaccctacaatttaatataatatggtccctttgcaatttggagaacaaaattatatctgttgaaagaatattccaatacacatcccttccaagtgaagctcctcttgtgatacatgataaccagccaaattattcttgaccatcatttggagaggttcatatccgggatttacaggtatatttcaaatgttatccgtttgttccattctgagctgaaggctacaattacatcttcttggtaacaagtctatccttgtttttatatggtatatacccctaatgaagaatcaagtgacgcaggttcgatatgctcctcacttgcctcttgttttacgaggtcttacttgcacttttactgctggagcaaaaactggtattgtgggaagaacaggaagtggaaaatcaaccctagtgcaaacacttttccgacttattgaacctgttgctggacaaatattgatagatagaattaacatttctttgattgaaattcatgatttgcggtccagactaagcatcattcctcaagatccaacaatgtttgaagggactgtaagaaccaacctggacccactggaagagtacacagatgaacaaatttgggaggctctagatatgtgccaacttggagatgaagtaagaaaaaaagaagggaagcttgactccatagttactgagaatggagaaaactggagtatgggtcaaaggcaattgttctgccttggccgtgttctacttaagaaaagcaagatcttggtgcttgatgaagctactgcatcagttgatacggccacaaataatactattcagcaaacagttaagcaaaaattttcagaatgcacagttattaccgttgctcataggataacttcaatccttgacagtgacatggttctgtttttaaatcaagggttgattgaggaatatgattcaccaaagaaactgcttaagaacaagtcttcatctctagctcaactagttgaagaatacacaaggaggtcaaattctggttttggaaattaaattgaaaatgaattagtattaacctcgaaccagacatgtctatatatatatatatatatatggccaccgttacacttcatgtagtgttctaccttactggactatggtagagattttactcactctgcttcacatcttactgagacttgtacgagactcactacactttacatcttactcatgctcaaataaattatgcaaactttgaactgtgatgattttatcttaaaaa

SEQ ID NO: 6509 - DNA, 1408 bp, Glycine max
acggctgcgagaagacgacagaatgttgaagaaaatagacggaaaaaatggcgtgcaggagcatgcttcgttcctcgattctggtggaacccttccaattgcaacctcttcattttagtaacagacccgttagggcttgtccgtttcgccgtggcaaaggagtgaccctccgttgctccagcaatgagacgccgtcgtttcaggacgatcaaggtccacctcaagaagccgtgttgaaggccatttccgaggtatctaaggcagaagggagggttggccaaactacgaacatggttattggaggcaccgtgtcggatgattctactaatgaatggctcactttggaccagaaggtgaactcatacccaactgttcggggattcactgcaataggaactggaggggaggacttcgttcaagccatggttgttgctgtggaatccgtaatccagcagcccattcctcagggacgtgtgaagcagaagttatcagcaaggggcaaatatgtatccgtaaacattggccctgtccaagttgtttccagtgaacaggtccaagctgtatataatgccatgaggagggatgacaggatgaaatattttttgtagtctgttagattttgaatagaatgcagtgttaccaagggatgaattaacacgtctgccttctagtagttaggctggttttgttatttgattaatccatggtatcattgcagtagatgtaatcatgatgcaaattggatctcttccgtattttgcgaagatgtaattagtatgatttgttgttaccgatagttatattaatataatattataaacagtatattctaaaaaaaaaagttgaagggggtgagtcgtagatgtcctgtttggtgccttaactgcagattagtttagtttaatttctgtacgcgttattgactattgagtgtacgaaataattggaaaatgacagttgatacacgctatgaaatatctatactttgatgagatatgtagaaattaaatgtgcgtccacccctttcacaagatgataagcaagcaatggagcgtgcagatgtggcccttaattggatttacactctgctaggccgccacatactagtttcattccttaattttaagtccttattctaatttcttgagtgaaaatttctgatctttactaggtaataactaataagcataaagggaaactgtcttgaagacttgaactgagaactatcttaaaaggaaaatttgatgttctcttatttctgctttaggtaatccatcttttctgcttttgacacgaaatgaaaacccattggctattgcggatgggaggaaaatctgacgggcgtgttccaactttcaattataataccataccttgctcttgtgcaacgattggcatctttagccag

SEQ ID NO: 6510 - DNA, 863 bp, Glycine max
gcacattaaatactctgcctgtccagctgaacaatggtcctgtacttcatgaaaaggtttgagtaattaattcagcatcatcaattactcaaaccttgagtagagaagtgcttgagggccacagaaagctagtgacactcgcagctacaagaacaaactcaggcacattaaatactctgcctgtccagctgaacaatggtcctgtacttcatgaaaaggtcgaggtgcctctggatcccacacaagagctggcaaggttgatttctgaacggaaatatgaggaggctttcattggagctctacatagaagtgatgtatccattgtatcttggttatgtactcaggttaatttacacggacttttgtcaatggttcctcttcctttaagccaaggtgtactgctttcacttcttcagcaattggcttgtgatattaacaatgatacaccgcgaaagattgtgtggttgactgatgtggctgctgccataaacccgtcagacccaacgattgcgatgcacacgcgatccatctttgagcaagtctatcagatactgaatcatcaacgtagcttgcctacaatgactggagttgatctctcaagtatccgtcttttattgcatgtcgtcaactccatgcttatgacatgtaaatgattttttccccctcatttccagaaatgtgcaaatcctttgccttgtgaacttataatatgatattggaattttgtacaaagctctgtgagtttcgttgtaatggtcgaaattgagtagtcagtgttgacaggtagttcatctttgaaaatattctgcagcaacaaaattggtttttttactcaatttaaacgctccattctatacggaagc

SEQ ID NO: 6511 - DNA, 1345 bp, Glycine max
  misc_feature (1158)..(1158): n is a, c, g, or t
  misc_feature (1187)..(1187): n is a, c, g, or t
  misc_feature (1212)..(1212): n is a, c, g, or t
  misc_feature (1222)..(1222): n is a, c, g, or t
  misc_feature (1225)..(1225): n is a, c, g, or t
  misc_feature (1250)..(1250): n is a, c, g, or t
  misc_feature (1253)..(1253): n is a, c, g, or t
  misc_feature (1260)..(1260): n is a, c, g, or t
  misc_feature (1269)..(1269): n is a, c, g, or t
  misc_feature (1275)..(1275): n is a, c, g, or t
  misc_feature (1306)..(1306): n is a, c, g, or t
cgtccgcggacgcgtgggtgctgatagtaaagaaaaattattttgctctcaggcttcagatcttggtctgctgcgggccccccccccccgttcgatatctgaggatacataccttatggaggaacctgggcaacttgattcaacaacaggaggggactcactggctcaaccgcttgatgccagtgaggatggactccaagactttgcaaaagatgcccatgaaaaggtttctgactcatctacatctgtggcagtgccaccatctcctgcacctaatgcaaaagggaaaaggcagaagggtaaaaattctcaaccagcaggcccatcttcctcatttccaagtgcgtgcaattcaactgattcattcaatgaaccaattggaaattctagcctcccatctgctgaaaatgctttccctcaaattctggcaatgcaagaatcgctcaatcagttattgacaatgcaaaaagagatgcagaagcaaatgacaatgatggttgctgttccagtgacaaaagaaggtagaaggcttgaggctgccctagggagaaacatggaaaaagctgtcaagtccaacagtgatgctttgtgggctcgaattcaggaggagaatgcaaaaagtgaaaagttgttacgagaccgtatccagcaagttacaggtttgattagtaactttatgaataaggatctaccagtgatactggagaaaacagtaaagaaggaaatggcttcagttgggcaagcagtagtacgtgcaatgtctcctgctgtggagaaaataatatcttcttctattgtggagtccttccagagaggagtgggtgataaggcagtgaaccaacttgatagatcagttaattcaaaacttgaagctactgtagctaggcaaatccaagcacaatttcagacaactggcaagcaggtgcttcaggagacactcaaatccagttttgaaacatcattggttcctgcatttgagatgtcatgtaaagccatgtttgagcaagtggatgctacatttcagaaaggcatgggtgaacattcaactgctgttcagcaacgccttgaatctgcacccacttcgttggcaatgacattaagggattccattaattcagcatcatcaattactcaacccttgagtagagaatgcttganggccacagaaagctagtgacactcgcagntcccaggaaccaacttaaggcaccnttaaatcttntgnctgtccacttgaacaatgggcccgnacnttattgnaaaaggtcnaggtgncctttgggatcccacacaagaacttggcaanggttgaattcttgaaccggaaattttaaggaggctttca

SEQ ID NO: 6512 - DNA, 939 bp, Glycine max
tgtctgtattccatgttcacctcttcctttgagcccaaggttatctaggaaactctctgatatcagaagtccacaatccaacttgagtgatcatgttggggaccatcccgttaatgattattcaatagacagacaaatggatacaattcacaggaacttgtctgacccattgaatagtgattcaaagaatgatgagaagaaaatgaagcaggatgacatttctagtgtacttaatccttctgtcttgtttaagcaaccaactcatctaattacaccatctgagatcaccaaagctggttcctcctctgagactaatataattgataggaaaaatgagggagaagcaaagatccaggatgttgttgatgtaggtaatgctgaagtggaagtgaaagtggtgggtgagacaagatctaatcaaagtgatgaatttggtgggcaagggtctcaacaaccttcagttgctgatagtaaagaaaaattattttgctctcaggcttcagatcttggtattgagatggcccgggaatgctgttcgatatctgaggatacataccttatggaggaacctgggcaacttgattcaacaacaggaggggactcactggctcaaccgcttgatgccagtgaggatggactccaagactttgcaaaagatgcccatgaaaaggtttctgactcatctacatctgtgggcagtgccaccatctcctgcacctaatgcaaaagggaaaaggcagaagggtaaaaattctcaaccagcaggcccatcttcctcatttccaagtgcgtgcaattcaactgattcattcaatgaaccaattggaaattctagcctcccatctgctgaaaatgctttccctcaaattctggcaatgcaagaatcgctcaatcaggtattgacaatgcaaaaagagatgcagaaagcaaatgacatga

SEQ ID NO: 6513 - DNA, 1866 bp, Glycine max
acttaccaatcgcgcgttgtcctccacgtccttatcctttcatcacctctctcttccaccaaacaataaaaacctccaaaccaactccagttaacgccatacacactctctctctctctctacaatggcctcagccgcagcccccacaactttctctctcctccactccaccaccccggcctcctcctcctccgccacctccgcctccccctcgcgcgtgcagctctcctcctccctccgctcgcgcccgctcgcgcgccgccttggcttcgccgcagcggacccgctgctcgcggcgaatgtcgcagcgcgcgtcgcagcggtgagaggaggaaagggcgcgaggggggtggtgtcgatggcgaagaagagcgtgggggagctgagcgcggcggacctgaaggggaagaaggtcttcgtcagggccgacctcaacgtcccgctcgacgacaaccagaacatcaccgacgacaccagaattcgcgccgccattcccaccatcaaacacctaatccaaaacggcgccaaagttattctctccagccacttggggaggccgaagggtgtcactcccaaatacagcttggcacctcttgtgccccggctttctgagctcattggtatccaggttgtcaaggctgaagacagtattggtccagaagtagaaaagttggtggcttctcttccagatggaggtgttcttcttctagaaaatgtgaggttttacaaggaggaagaaaagaatgatcccgagcatgcaaaaaagcttgcctctctggcagatctgtttgtgaatgatgcatttggtactgctcacagggcacatgcatcaacagagggtgttactaaatacctgaagccatctgttgctggttttcttttgcaaaaggaacttgattaccttgttggggcggtatcaagccccaaaaggccatttgctgccattgttggtggttccaaggtctcatctaaaattggagtgattgagtcacttttggaaaaagttgacattcttcttcttggtggaggaatgatcttcacattttacaaggcacaaggtctttcagtgggttcatcccttgtagaagaagataagttggatcttgctacatcactacttgcaaaagccaaggaaaagggggtgtctctcttgttaccaagtgatgtggtgattgcagacaaatttgcccccgatgcaaacagcaaggtcgtgccagcatctgccatccctgatggctggatgggattggatattggtccagattctgttaaatcattcagtgaagcattggatactacccaaaccatcatatggaatggaccaatgggagtgtttgagtttgacaagtttgctgttggtacagaggctattgcaaagaagctggctgatctcagtggaaagggggtgaccacaattatcggaggaggagattctgttgcagctgtggagaaagtaggagttgctagtgtcatgagccacatatctactggtggtggtgccagtttggagttattggaaggcaaagagcttccaggagtccttgctctcgatgaagccgtcccagttgccgtgtaagacaattttcagcttggaaaatttttccatcctcagatttcggtgttgtcaatcttgtaaaagagcatatgttgtaggacccttcggagtctgttagtgtaaattttatcatgcttgagttattattggcttcacacataaattgcgtgtaactgtaaaccctggctgagagccataaattcgaataaatcttttagttgctgccaaaaaaaaaaaaaaaaaaaaaaaaaaaaaaaaaaaaaaaaaaaaaaaaaaaaaaaaaattaaaaaaaaaaaaaaaaaaaaaaaaa

SEQ ID NO: 6514 - DNA, 2033 bp, Glycine max
attcccgggcccgcccctccgcgtccggagaaatccaaaatcctctcatcacacccaatcgttcccccattgtagtccacgtccacatcctttcatccccccccactcgttaaattcccaaacacactcaaactcaaacactctctctttctctctctacaatggcctcagccgcatcccccaccactttctctctcctccactccgccaccccttcctcctcctccaccgccacctccgcctccccctccccctcgcgcgtgcagctcacctcctccctccgcgcccgcccgctgcgccgcctgggcttcgccgcggcggacccgctgctcgcggcgagtgtagcggcgcgcgtggcggcggtgagaggaggaggaaagggcgcgaggggggtggtgtcgatggcgaagaagagcgtgggggacctgagcgcggcggacctgaaggggaagaaggtcttcgtcagggccgacctcaacgtcccgctcgacgacaaccagaacatcaccgacgacaccagaatccgcgccgccattcccaccatcaaacatctcatccaaaacggcgccaaagtcattctctccagccacttggggcggccgaagggtgtcactcccaaatacagcttggcgcctcttgtaccccggctttctgagctcattggtatccagattgtcaaggccgaggacagtattggtccagaagtagaaaagttggtggcttctcttccagatggaggtgttctccttctagaaaatgtgaggttttacaaggaggaagaaaagaatgaccccgagcatgcaaaaaagcttgcctctctggcagatctgtatgtgaatgatgcatttggtactgctcacagggcacatgcatcaacagagggtgttactaaatacctgaagccatctgttgctggttttcttttgcaaaaggaacttgattaccttgttggggcagtatcaaaccccaaaaggccatttgctgccattgttggtggttccaaagtctcatctaaaattggagtgattgagtcacttttagaaaaagttgacatccttcttcttggtggaggaatgatcttcacattttacaaggcacaaggtctttcagtgggttcatcccttgtagaagaagataagttggatcttgctacatcactacttgcaaaagccaaggaaaagggggtgtctctcttgttaccaagtgatgtggtgattgcagacaaatttgctcctgatgctaatagcaaggtcgtgccagcatctgccatccctgatggctggatgggattggatattggtccagattctgttaaatcattcagtgaagcattggatactacccaaaccatcatatggaatggaccaatgggagtgtttgagtttgacaagtttgctgttggtacagaggctattgcaaagaagctggctgacctcagtggaaagggggtgaccacaattattggaggaggagattctgttgcagctgtggagaaagtaggagttgctagtgtcatgagccacatatctactggtggtggtgccagtttggagttattggaaggcaaagagcttccaggagtccttgctcttgatgaagccgtcccagtcgctgtgtaagacacttttcatcttggaaaattttcccatcctcaggtgtcagtgttgtcaatcttgtaaaagagcatatgttgtaggacccttcgaagtctgttagtgtaaattttatcttgcttgagttattattggcttcacacataaattgcgtgtaactgtaaaccctggctgagagccataaattcaaataaatcttttagttgctggcaaaaaaaaaaaaaaaaaaaaaaaaaaaaaaaaaaaaaaaagaactagtaaaaaaaaaaaaaaaaaaaaaaaaaaaaaaaagaaaaaaaagcaaacaaattggggcaccagaaatgtaaaatggaacgcggccctgtaaaaaaaacattaagtgggggagctcttgacgggtcccatcttataaatcctcaaagtcaaagcccctttttt

SEQ ID NO: 6515 - DNA, 1027 bp, Glycine max
tcagctacgtaggcccaccatccataatccaagataaggagaaactgcgaaaatggcatcggagtcaggtcaaagtcccaatccttcttggtttacgcccaaaaggcttcttatgatattttgtctcattaacatgctaaactatgtggatcgaggagctatagccagtaacggtgtcaatggaagtcttgcaacttgcactgactctggaatttgtacaggtggcagtggaattcagggggattttaacttgaacaattttcaagatggagttctgtcatctgcatttatggttggacttctaattgcttccccaatatttgcttctctggccaaaagtcacaatccattccggcttattggtgttggattgtctgtttggactttagcgatagctggatgtggtagttcgttcgatttttggtctattgcaatatgccgaatgctagttggtgtaggtgaggcttccttcataagtcttgccgcaccatttatagatgacaatgcccctgatgcacagaaaacagcatggcttgctacattttacatgtgtataccagctgggactgctctgggctatgtttatggtggaattgttggaagccaatttaactggcgtgttgcattttgggttgaggcaattttgatgcttccttttcccattttgggttttgtaataaagcctttgcaattgaaaggttttgcacccttggaatccaaacaaacactaacatatactgaaacaaatgtttcagaaactggagatgatgacacgcttgctgaagatcaagccttgctcaaaggatccaagtcaacatccaaattgtggaatcagttcaccatcttctccaaagatatgcaggagctcttgcatgaccaagtgtatgttataaatgttctagggtacatagcatacaattttgtcattggagcttactcatactggggcccaaaggcaggatacagcatttaccatatgaataatgctgacttgttatttggaggcattacaattgtttgtggtatt

SEQ ID NO: 6516 - DNA, 2759 bp, Glycine max
  misc_feature (2704)..(2705): n is a, c, g, or t
  misc_feature (2712)..(2712): n is a, c, g, or t
  misc_feature (2717)..(2717): n is a, c, g, or t
  misc_feature (2721)..(2721): n is a, c, g, or t
  misc_feature (2724)..(2724): n is a, c, g, or t
  misc_feature (2731)..(2731): n is a, c, g, or t
gtgtgtcataacaaaagaggaagaacataggagagaaatctattcatatcatcatatcataggacaaaagcgagcaaattcagaggatgaatggggtcacacaccttgaaccagatgagtctgagtttgttgaagttgatccaactggaagatatggcagatacaatgaaatccttggcaaaggagcttcaaagacagtatatagagcattcgatgagtatcaagggattgaagttgcttggaaccaggtcaagttgtatgatttcctgcaaagccctgaagatcttgaaaggctttactgtgaaattcatctcctgaaaacattgaagcacagaaacattatgaagttctacacttcttgggtcgatactgctaataggaacatcaacttcgtgactgaaatgttcacatccggtacacttaggcagtataggctaaagcacaagagagttaacatcagagcagtgaagcattggtgtagacagatcttgagcggacttctctatcttcacagtcacgacccgcctgtgatccatagagatctaaaatgtgataatatttttgtcaatggaaaccaaggggaagtgaagattggggatcttggtttggcagcaattctccggatatctcatgctgctcattgtgtagggacgcccgagttcatggccccacaagtatatgaagaggcatataatgagttagttgacatatattcctttgggatgtgcatattagagatggtcacatttgaatatccttatagtgaatgtactcatccggctcaaatctacaagaaagttatttctgggaaaaagcctcatgctttgtatagagtgaaggatccagaagtgcgacaatttgttgaaaaatgcttggtcacagtgtctctaaggctttctgcaagagagcttctaaatgatccatttcttcaaattgatgattatgaatatgatttgaaaactgtagacaatggggaattggatgaatttggtcctctcatgagacagccattctttgatcttcatcgaagctatagtaacttcagtaatgaatacacgaatggctttgggtacgaaggagactggggtcctcatccggctgagatcgaacctagtggaattgaactttttgagtaccgtgatgatgacgaaccctctgaagatgtcgacataagcatcaagggcaagaggaaagatgatggtggcatctttttgagactaagaattgctgataaagaaggtcgcatccgaaatatttatttcccatttgacatagagctggacacagcaataagtgtggcaactgaaatggttgcagagctggacatgactgatcaggatgttaccagaatagcagatatgatagatggggaaattgcgtccttggtacctgaatggagaccaggaccaggaattgatgagactccccgttttgctaatcaaggtttctgtcacaattgtgtgtctaatcatacttctagcggttcttttctggattttctttcaaacaatccaggtaacaagaacttgcaacttctccacgcgtccgggcatggatgtgcttcaatgcatgggcggtttggggagattaccttccaatctgaagagtatgacaatcatgctagaggggatctgaacgtatcaagccaattagacagcttgcagtatcaagagttatggaatcagcatgaaagtcgtgaattgagtccggtagagtctgatcaaagtcattctgatgaacaatatgagcaattagataaaccgattcttgctaaagacaaagcacaggatgtttgggaagacaagttttcccccaatgcagcaaattctctaagaaatttatcaggaagtcatgatttctctactatccgatcgacctattgtgaccttgaggatgactatgagaaagagatccaaaaggaactcagatggctcagagccaagtaccaaatggagttaagggatcacaaggatcgacagtttgggcaatgctcgcatagttgtaacagtgagcacagaacagaaaatggctttttgtcaccttcactgacagaaacattaaaaggaggcaacaatgggactcagttgaaacccattactaccaagtggaattgtgattccagtagtcaccctcatgtccatgaaagcagccccaattcggacacccaaagggcccaaaattgtgaggcgattgaatcccctggagaaggtatggttactgcaaagagtttttatacaggctcattgctgccgcactctttgcacaggacagtttctctcccagttgatgctgttgatatataattttgtgagacactcattggattcttttgtagattatatatactccccatagaggctatctgatttctaaatccctccttatttttcataggattttcaatttacccacatggaaatcggtagccactagctataatccccccaccaccaccaccacaaaggcatcaacatacacttgagtgtttatttatctaggaaaaagaaaatcagattttggttacggatgttagtgatcgtgaatttgataattgaggcatgtaaaatatgaaagtagtagagtctatgtaaatctgtccaagtttattgtatgatgcaatttgtatctcccacgttatgaaaacaagtattgatagaccttagcgtgttaaaaaaagaaaaaaagaaaaagaaaagagggcggnnccgtctnctagnaggnatnccaaggncttacgtagcgcggtgcatgcgacgtca

SEQ ID NO: 6517 - DNA, 2522 bp, Glycine max
ggcgagtgagtgagtgagtgagtaagcaagcatatggcgagtaccttctgcttactccactctcccctctatcaattcccatcttcatcttcttcttcttctgggcccataaaattgcgagcttccacaacatcttgcttgcggcagcaagacaaagagccactccgcaacagaagaaccgttcttttgaccagcatcgctcttcttccgtttcgccgtttgaagcgggccccagctctcgaatccccacctccacctccaccccctacagaagaaaccgacgtgaagacacaagaggataaccagaaagccgagaaagcacctgaagtggaccaaccgtcaaattcctttcggtcagctccgtaggccccccccccattttcttctggtgtgttgggtgctctctatacacttgctcagaaagaaaagtccactgctgttgcaacaatagaaacaatgagcagcaaactgaaggaaaaggaagaactgattgtttccttgaagaagaactatgagttgaagttactaaacaagcgggaggaacaagccaagctacttgaaaaggcaaaggaagagcaactggcactgataaaccaactgaattctgcaaacagtactattaaccgcttggggcaggagcttaaaaatgagagaagtttgattgaggacctgaaacttcaaattgaccgacttaaagctgagctttcaaagactgatacagataagaaggatcttgaaaacaatttgaaagaaaagatagattccattggtgttttacaagaaagaatcaatctgctgagtgtggacctcaaggacaaagaagatgctgttcagaatctcaattcatcccaagcagaaaaggagttggaattgaagagtttgaagtctacctatgagcaaaccaaggatgacttaataaatgttcaattgcagattcaagggttgaaagatgaactactgaaaacccaagaggaactagaagctaaagattccttggtgatagaactaaattcaagagtgagttccttaactattgagaacaataattttaggagtaaatgtgatgtcatggagaaggaatacaatgatctaaagttcagtgctgtaaagaaggctgctttggactctaaggttttaagagaaaaagaagaggagcttcatcagctaaaggatcagtttgaacttgccctaggtgaagcaagcaaaagccagatcgtcattgctgatttatcccaagaaagagatgatttgaaggaggctctagataatgaatctagcaaggtgaatcatttgaagcaagaactccaagttaccctggagaatcttgcaaaatcaagaaatgagtctgctgaattggaaaaccttctaactttgtcaaacaaactgtgcaaagagctcgagctcgaggtctctaagctctcatctgagctcactgaggttaatgaatcgctacagagaaaccttgatgatgcgaaacatgaggcagaaatgctagcaagtgagcttacaactgccaaggaacacttgaaggaagcacaagcagagctgcaaggtgtgtcaaaagaattgacagctgctcttgaaaagaatgatagcctacaaaaagaattagttgaagtctacaaaaaggctgaaagcacagcagaggatttgaaggaacaaaaacagttagttgcttctctgaacaaagatttacaagcattagagcagcaagtctcaaaagacaaggagtcccgaaaatctcttgagagggacctggaggaggcgaccatatcactagatgaaatgaaccgaaatgcggtgatcctttctggggaactacagagagctaattctcttgtttctagccttgaaaaagagaaagatgtgcttattaagtccctaaccaaccaaagaaatgcatgcaaagaggcccaagacaacattgaagatgctcataaccttatcatgaaacttggcaaagaaagagagaatttagagaaaaaaggtaagaaatttgaagaggaattggcttctgccaagggtgagatattgcgcttgaagagtcgaatcaattcttcaaaagttgctgttaacaatggcccagtgcagaaagatggaggtgaaaaaaaggtcaacccttcaaaagttgcggtaaacaatgagcaagcacagaaagatgaaggtgaaaacaaggttactgtaagtgcacggaagactgtcagaagaagaaaggctaatccacaataacagagaaattagagagttttctattaaaaatattccgattaggatcatgatattctgtaataaactatttggaagccagttgattctattcacttttggcatgcaaatattttcatgttttgcaatagtattgtacaaattaaatgacactgtaggaattgttaagctaagctttttggagagttaaaaactgatagtaaacctaaaaaaaaaggtaagaatactattaccaaccttagtctgcaacattatacattagtgtatatacagctacttttccatgtctatgaagc

SEQ ID NO: 6518 - DNA, 1939 bp, Glycine max
caacagagtaatatgcaaaagctcagggacggaacccaagagcaagttctggagactgatcgtatcattatctgcagctacgtaggccccccccccttcatattaaagcagttaaataagtatcaggaatttgctgttctcttaggcacagctacagctaggtaaatggttcagacaaggaggcagagaatccttcttatgtctgatcttccaagaaaacagattgatagagtagcagacaatattgcaaaagatttaaatcatattgatgtccttacaaagaggtatcaatgctggttgcagccttaatatgaccaaatcatttgaaagagcagcagctaacagggcacgtgcaataattatactgccaacaaaaggagatcggtatgaagttgacacagatgcatttctttctgttttagcccttcaaccaattccaaacatggattctgtccccaccattgttgaggtttcaagttccaagacatgtgagttgttgaagtcaatctcagcattgaaagtagagccagtagaaaatgtggcatccaaactatttgttcaatgctctcggcagaagggacttataaagatctacaggcacttgctaaattatcgaaaaaatgtattcaatctttgcagcttgcctaatctagaaggactgacatatagacaaataagacatagatttccagaagctgttgtatgtggtctttaccggagtgggaaaatatacttccacccaaacgatggtgaaattctgcagcaaaccgacaaagtattgtttattggatcccttcgggatacaaatactaaaaagccagaagtaatcctagatgggaaagaaggaatgtatgaaattcataatgaggaaatacttgaaaaggatgtggaacatgccattgaattgagtaaagtaaggcttgctaatattgtaaaacggcctaatagatcaggttccaaggcatcagatgggaatcttggaccgaaagaatgcattcttttacttggatggcgccctgaggctgtagaaatgattcaagagtatgataactatcttggtcctggaagtgttttggaagtgttatcagacacaccattagatgacaggatcaataaggcaagcaacatccatggtcataacaaactcaggaatgtccgagtttcacatcggattggaaatcccatggactatgacaccttaaaggaaaccattttgcatattcagaattctttgaagaatgaggatgttcctatgtcaattgctgtcatatctgacagagactggcttcttggagatccatctaaggcagacaggctgtctgcttatgctctcctccttgctgaaaatatctgcaacaaactcggagttaaggtgcaaaatctagttgcagaaattgttgattcaaaattggggaaacaaattagtagaatcaggccatcagtgacctccattgcagcagaggaaataatgagcctcgtaacagctcaagtggccgagaacagtgaactgaatgaagtttggaaagacttactagatgcagagggagatgaaatatatattaaggatattggcctatacatgaaagaaggagagaatccatcattttctgagctttctgagagagcatatttacggagagaagtagctataggatatgtgaagaacaagaagaatgtaatcaaccctgttgccaagtctgagccactctctcttgaaatgactgactccttgatagtcatatctgagctggaaggagagcaacccgttgttttgtaatgctgaagctttaatcttgtcaagaatttttttggaaaattctaaccccaaaaatttggggccattgattttgatgattgatgattaggatgattcaatatcattgtgttactctttcatcattcgaaataaattgtgtatggtttctctgtcaaaaaaaaa

SEQ ID NO: 6519 - DNA, 1671 bp, Glycine max
cccactttcatcttcagttatctatcacttaagattgcatttctcaaagtctagttactcatcacagtaatcatttgcctctttctgagagacacaacatagatatgataataagtaacacacttatctaaatggctgccacgtgctgtagcttcactcaatcgtcttctggtttcaggaaactccatgagaacattcagctgcagagctacttcacaaggtaccagcaaagatcaacttgcagtgttgaaaatatcttccatagggactatggaggaaggtttttacaagttgaaggatggcatcaacatcagtatttgttatgtgcaagaggagttgagttgtccccttctgccaatgaagaagttggagaggagactgaggaggatatctcaaaggaaacgttgatttggagagccatcaagttgccaatttactctgttgcatttgttcctctcactgtaggcagtgcagcagtttattttcagacagggatcttctcagctagatgttattttgttctcctggcttcttcagttcttgctattacctggctcaatttaagcaatgatgtttatgattttgacactggagttgacaagaacaaaaaggaatcagttgtaaacctggcaggtagccgtaaaggaaccttcattgctgcctacttgtgccttgctattggcttccttgggctgacttggactgctgttgtggaaagaaacatacgttcaatattgtttcttgtttgtgcaattatttgtggctatatatatcagtgtccaccatttcggttaagctaccaggggctgggagagcccttgtgctttgcagcatttgggccttttgccacttgtgccttttatttattacatggcagttcaagtgtgatgaaccatttccccttaagtggaacggttctttcagcatcaattcttgttggcttcacaacatctcttatcttgttttgcagtcatttccatcaggtggaaggagacaaggaggttgggaaaatgtcacctttggttagacttggcactaaaaaaggtgcagaggtagtgaaaggggcagtctttatgctctatgctcttttggttgcttttggtctaatcaaggcacttcctctcacttgtatattcctttgtgcattgaccttgccgatgggaaacctggtagttagatttgtcgaagacaattacaagaacaaaaataagattttcatggctaagtacttctgtgtgaggcttcatgcattgtttggagttgcactggctttaggactagtgctggctagaaatacaaaatttacatcatggccaatattgagttgaagattggctggtcgaaagaggaagtaatgtagtgcactaagggtaagcttgaaagaaactgcatgacactgaaaccaatcaagagttgtgtgcagcaagcttacctcatcaatctgaacaggtcaggagatggttccactatctaggcgcctcattttaacttacaccaataaaccgtagttgattagcagcacgaaaacatttgctgcaaagaattttttgtgaaatcagaccacatgtgttgattcttttatttttgccatgaaaattggatttaccatatttggtgtaagttttttaatgaaaatatatggcagctatccttggaaggagttaaaaaaaa

SEQ ID NO: 6520 - DNA, 1848 bp, Glycine max
  misc_feature (574)..(574): n is a, c, g, or t
  misc_feature (1119)..(1119): n is a, c, g, or t
ctcgagccgtttcagcttcagtttctcttgtgtttctcaaagtcaagttactcatctcagcaatcatttgcctccttctgagagacacacacatagatagatatgataacgttgtaatcgagatggctgccacgtgttgcaacttcactcaagcttcttctagtttcaagaaactgcatgagaacattcagctgcagagctacttcacaaggtgccatcaaagatcagcgtgtagtgttgaaaaagacttccataggagatatggaggaaggttgcaagttgaaagatggcatcaatatcagcatgtgttatgtgcaagaggagtggagttgtccccttctgtcaatgaagatgttggagaggaaagtgaggaggatatttcaaaggaaaccttgatttggagagccatcaagttgccaatttactctgttgcatttgttcctctcactgtaagcagtgcagcagcttatttgcagacagggatattctcagctaggtgttattttgttctcctggcttcatcagttcttgttattacctggctcaatttaagcaatgatgtttatgattttgnacactggtagttgacaagaataaaaaggaatcagttgtaaacatggttggtagccgcaaaggaatcttcattgctgcctcctcgtgccttgctcttggcttccttgggctgacttggactgctgttgtgggaaagaaacttacgttccaatattgtttcttgtttgtgcaattatttgtggctatatatatcagtgtccaccatttcggttaagctaccaggggctaggagagcccttgtgctttgcagcatttggtccttttgccacttgtgctttttatttattacatgccagtgcaagggtgaagaaccatttcccattaagtggaacagttctttcagcatcaattcttgttggcttcacaacatcacttatcttgttttgcagtcatttccatcaggtggaaggagacaaggaggttgggaaaatgtcacctttggttagacttggcaataaaaaaggtgcagaggtagtgaaaggggcagtctttatgctctatgctcttttggttgcttttggtctaatcaaggcacttcctctcacnttgtatatccctttgtacattgaccttgccgttgggaaacctggtagttagatttgttgaagacaattacaaggacaaaaataagattttcatggctaagtacttttgtgtgaggctgcatgctatgtttggagttgcactggctttaggactagtgctggctaggaatacaaaatttacatcatggccaatattgagttgaagattggcttgtcgaaagaggaagtaatgtagtgtactaaggggattgctcaagaggaccaaggatgcaagtctgcatggtgcaacagccattaagatttcggtcatgagcaatttttctgcagggggttttgaatcagttctcattttcttcccatttccgtggccaaataagattgaaagaaactgcatgacactgataccaatcaagagttgtgtgcagcaagcttacctcatcaatctcaggtcaggagatggttccactatctaggcacctcgttttaacattctccaataaaccttagttgatgcaacatttgctgcaaagaattttttgtgaaatcagaccacatgttgattcttttatttttgccaagaatctttgcaaattacagtggaaattggatttacaacatttggtgtaagttcttgaatgacaatatatggcagctagccttggaaaggagttaaagagctaaaatgcttttatctttagtaattaatgtaaatttcaaaataaaaattctc

SEQ ID NO: 6521 - DNA, 1654 bp, Glycine max
tcagctacgtaggccccccccccgattgtgtgcaagagagtcatgtcgagaacatgggaaggtgattgtgggtgcggcgttgcgacagctaacagatcggtggccgcggagttgcgactgctaacatatgggcgaccggggcgttgcggcgcaagtccattatgctcactctgcgtttttctccgaacttttgcctcgttcttgaaattcttttcctttcactcattgcagctatatatgtgacaccgagaggacgcccgatagatgcattggggcatgcttttaatttcctagatctcccaaacaaattgtagcataagtcccatggccaaagagactagtgttgtttatctatatcccagcaaatcacaagtttggggtgagaattttgatcataaaaaacttgtaataacaacactagctgctaatggaaagaaggaggagagtaatggagcacctaatgacacatatcctgcgtttcccgggtggtatgctgatgtttcctggccaggagaagcacacacatataaaatagaaaagattctattccacgggaaatcagaattccaagagcttcttgtatttgagtcttctagacaaggcaaggttgcaattcttgatgggcatatccagctgacagaaaacgatgaatttgcttaccaagagatgctcactcaccttgcactctgttccattccagatccaaagaaggtgctgcttattggagggggagatggtggaattcttagggaaatatcacgccattcttctgttgagcatattgatatatgcgaactagaccaaatggtcattgatgtttattcggagtttttcccggatatagctgttggttacgaggatccccgagtgcatgttcatatcagcgatggagttgcgtttatcaattctgttcctgagggcacttacgatgtcattatatcggatgcttttccagcaatggggcatagtgctgatgttcttgctgatgaatgcttcttagaatcagtagcaaaggctcttcgacccggaggagtgttctctgctccagcagacagcctgtggcataagaactttgtggttgcagacaccatagcaaattgcaagaagatattcaaaggctccgttaactatgcttggaccacggttcctacatatgcaagtggggtgattggattcatgctttgctctacggagggtccaccagtgaacttcaaacatccaataaataaattgaatccagagaaaaatggggtggcaaagggacctactaagttttataacccagagatccatgctgctgcattctgtctgccttcttttgtggacaaggttgattgatccaacagacattcataaatgactcggtagcattaaggaattgctgttagttaccctttgtttttgctgtgtcgttctgcatatttatgatattatccttttattatgttatttagttttattttatattccctaaaatattagatgttacacacgtgtatgattatcatctaatgtaaggtttgcacctattgaggtatcaatgaaatgaaatctgaaatttagttttttctctttaaaaaaaaaaaaaaaaaaaaataactcgagcacgaggccctctctctctctctctctctctctctctctctctctctct

SEQ ID NO: 6522 - DNA, 1817 bp, Glycine max
tcagctacgtaggccccccccccgattacgcttagcaggtcttgaaggaggcaatggctcgcctgagctccgatcaggtcttgaaggacaacaatgccgccgacccaacttccgttaccactctttacctcactcacaaagctctttccgatataacgttcttggccaatttcataaacttggaaaagcttgacctcaagctcaacaatctcacttcacttgaggggttgagatcatgtgttaatttaaagtggctatccgttgtagaaaacaaattagaaagcttggaaggaattcaaggacttactaagctcactgtgctaaatgcaggtaaaaataagcttaaatctattgatcaggtcatgtcagttgttagcctccgagcactgattttgaatgaaaatgagatttcctctatttgcaaacttgatcagctgaaagacttgaacactcttgttctatccaaaaatcctatacgcaaaattggtgaggctctgatgaaggtgaaatctatcacaaagctttcgctctcatattgcgagcttcagggtattgacacttcactcaagtcttgtgttgagttgagcgagctccgccttgctcacaatgagattaagtgtctcccagaggaattaaagctcaattcaaagctccggagtttagatttggggaataatgtgataacgaggtggtcagaactaaaggtcctcaaattgctcacgaatcttagaaatcttaatctacaaggaaatcctgttgccacagttgataaagttacgagaaaggttaagaaagcgctgcccaaactacagatattcaatgctagaccagtagataaagataccgagaataagaaaggtagcatagttgatggaactcatgatttttcagtggatcaggcagatcatccatcagatcaaaatgaggacaatcatcttgaagctgctgctgatcttgactcagggagaaaatcaactaagaaaaggaagagaactgctgatgcatccaataaggaagacagggttgctgatgaggaaaagaaaggtcataaaaaggacaggacagatagaaaaaatgacggtcctgagatggataataaatcaactaagaaaaaggcaaaaaaggatgacaagcccttggacaagggatttgctcttgaggagaatgtttctaaggttgagaagaaactgaagaagaaacataagaatgaggaacaaagtgagcttgatgttatcgatgatgcagaagcttcatttgcggagctttttaaaatcaatgatgcagaaaatctgaatcttgttgatgaaatgagagcacgagacaaagtgcctaaggatgtgaaattggcaggtgacacagtgacctcatttgcgaaacgtaagaatgctaaaatgcagaatattgaatctctatcagctccagaagcagaagttggaatgggagggccatcaacatggggtgatgagtgatgatatctggacatatgctacagatgcatcaaaccttgtctgcaaggagttgaggaccaattttgagtttgactctgctgttgaatttcgcattgcatttgtcagatgtttgagtcgagctcctcagctattttctgcttctgaattccatggtatttttgctatgctttaagctggtggttatgttgttaatcggtgaattgtatgtcagattcaggaacttccgttcaaactttttttttacccttttttagtgagtttattgcaatcagttccaataactttcttcatcatttccattatgttttatgccccttaccccttttttaaaaaaaaaaaaaaaaaagc

SEQ ID NO: 6523 - DNA, 3174 bp, Glycine max
  misc_feature (338)..(338): n is a, c, g, or t
ccacgcgtccgggtaatacggggtggaggttaaggaatgatccagaaggcactggcagggtgattccgcgacgagacggtgccggttgagcggtaagtgtgtccaagaataaacatgtcggccaagttcctgaccgtgccgccatttgagtgcgcctggagagaggatttgaaattccgggaggcaggccggggttgcgtggcctttgaagcattcgcctgcaacgatgtcacactggttttccgggagaatgtgggaagccagggctaccattataaaagagatagcagtcctcactacacaatcatattggggagtcacaggaatcggcgactcanaattgaggtcaatggaaaagctgttgtcgatgtggcaggggttggcctctgctgctcttcctcctttcagaggtattggatcagcatctatgatggcttgattagtataggcaatgggaaataccctttccaggatgttgttttccagtgggtggattcttatcccaattgtaatgttcagtatattggcctcagcagctgggataaacatgttaagtatagaaatgttaatgtcttgtctctaacacacactcatgtgcccctctcgaagcatgtcgtttttggtgattatcaagttgaggacgaggttgatgcagcagactgttacaattacaaaaacatggattatgacaaatgggggctcaaaaaaattcctcgagagttgggacttgtctgatgtgttattcatcgttggtaaagaggaaaaacccgttcccgctcacaaggcaattttagctgcatctggaaagttttctctgtgctcctcctcctttgtcatcaacctacccactgtatcttatctacttttccgtgcactgcttcactacatctatgttggctggacccagattccccaggaacaactcggttctttgagggatttaagtctacagtttgaagtgacaccactggtgaagcagtgtgaagagactatggaacggtttaagctagataagaagttgtttgacacgggcaagaatgtggagttaacatatccatctatccgacctcattgttcaactttgccctcacttcctgtcagcactcagcaactgaaacaattgaaattaacaggccagtacagtgatgtaaacatctacattgagggttatgggctcattgcacgagctcataaaattgttcttagcttatggagtatcccctttgctcggatgttcacaaatggaatgagtgaaagcatgtcctcggaggttactttaagggatgtcccaccggaagctttcaaggctatgcttaactttttatatgatgggcaattgaatgacaaagttatagattctggtgctttgttgctccaactccttctattagctgatcaatttggagtgacttttcttcaactcagctacgtaggccccccccccaacaagaatgctgcaaaatgcttttagaatgtctctcagaggactcagtatgtccactcctccaagtggtttcttcaatgccatcatgtagacttattaaagaatcattgcagaggagaatttccatgaactttgactattatatcagtgcgagtactgactttgtgttattagatgagacaactttaatcaatatcattaagcatccagatctgacagtaacgtctgaagagaaagtccttaatgcaattctaatgtttggcatgaatgcaaaacagttgtttgggtgggaagtggtggatcagttaatggaaaattcaaaaccagaactcctttttggtgagaggcttcagttaatctatgacttgttgccatttgtgcgatttccactactacaatattccttacttgagaagttgcagcatagcagcattggccggcatattcctgttttccaaaatcttgttaacgaggctatcaattttgttaaatgtgggctggcagagtcagaaaatgaagagaatgttagattccaacatagacggtccagttacagggaactccagtacatctgtgatggggatgaccatggagttctgtactttgctggaacatcctatggtgaacacccgtgggttaatcctcttttggcagagccaaggaaaattaccatcacagctagcagcccccactcaagatacactgatcccaaggttttggtctcaagaacctaccagggaacatgttttgctgggcctcgattggaaaatggacagaactgtagctggtggatggtggatcttggccaagatcatcaggtacgcaatatgccgattgtttgtgtttccaagtattttatattagtactcgcttttgatcatgcactttgagcatgtggatattcgaagattttatttccaccttccaacctcatttatcaaatttatagaagtataattgcacctcaatatgagtagatcaacttcttatttgatggaatcaacattctgattaaaaaaaaggaaaatcgatgaatgcagcttatgtgcaactactataccctgaggcaggacggttctaaggccttcccgagatgttggaatgttcagggctcacttgacggaaagagctggacaaacttgagagtccatgaaaatgatcggagtatatgtaaacctggccagtttgcctcttggcccataattggccccaacgctctgcttcccttcaggtatttccgggttgtgctcacaggaaccaccaccgatgccaccaatccctggaatttctgcatttgttacttggaattgtatggctacttcctttaaaagcctagccatgccaataccataccttcctaaaatacaattccagctccttcatgtacattatggtttgcttattgactaaattatttgaatcaagtcatggataaagggttgtggttctaagagaagatgaagtttctttattgttcttatttcatcattcaaacttgtaggctgctttatatgtaattatgtagactgtagtatctctagtcttcccataatttcaatcgacaaaatccttttcacaaataagaaaggtgcaccagacgatgaaaaaccaccttttgatatatgaaactcacgatggaaaaaaaatcagtaccaagcatcaatattgccaatttcattcgcagtaaagctctaaaataaaatattttcacgaaaaaaaaaaaaaaaaaa

SEQ ID NO: 6524 - DNA, 1031 bp, Glycine max
  misc_feature (1021)..(1028): n is a, c, g, or t
ttggaattgagcagctagtgtagagataaatgggaattaattaattaattagagataaatgtgaaaggaacgatccatcgacacaacactagtttgcgggtagcgagtagcgatgcattggtgcgttcgagagagtcgatgatgacaaggcaaggcacgtgtatatattcgcagtcgcaggtggtctgattacgccaactacagtacaacgaggtaatagtcgatggttcttcagattttggtttgaagcccaaaattagttttagtgatatggggactgcatcatctatgttaactcaatacgacatcgaggaagttcaggaacactgcaataatttattttcccagcaggaaattgtgtccttgtatcaaaggttttgtcaacttgaccgcaacgccaagggatttatttccgcagatgagttcttgtccgttcccgaatttgccatgaatccactttctcagaggctgctcaagatggtcgacggtttgaattttaaagactttgtggccttcttatctgcattcagtgccaaagcgagcgcacaacaaaaaatagagcttattttcaaagtatatgattcagaccgcaatggaaaggtgtctttcaaagatatgctggaagtgctaaaagatttgtcgggtccattcatgtctgatgaacaaagagaggaagttctcagccaagttctaagagaagcgggatacacaaaggactcctacttgacattggatgacttcattaaggttcttggtcaatctgacctaaaaatggatgttgaagtccctgttgattgaaactacctgcagttttccctgttctcttgaaagataaaaattgtaaactctattcataggattcttgtaacatatttcacgtggaaatgaaaagtgcacaaatactgttgtcccccttcttctggggattcttgtaatgctgttgttttccagccactagctgttttagagccaatttgagaagctcgagcatgatttagtttttcaaaaaaaaaaaaaaaannnnnnnnaaa

SEQ ID NO: 6525 - DNA, 1556 bp, Glycine max
agaagaaaactttatgaaagtgttaaaatcagagtcagctacgtaggcccccccccccaccgttaaacgaaagtaagaactaacatctcgttcaccgcttgtactttggatgatgatgaggtgagtgtgtaacgagaaggtagggtagggtgcagattgcagaggattgggaattttgaatttgaacaacaatccgagcttgcttgtttcctcgttctgttctgagctctaatggaagcactatcccttcccataaacactctcaccaattcctctgccaaacaacacatttatctgagtgcttcttccaattatgcctcagtctcttcttccttacaactcaatccttctctcccaaccagacccctcactctgaggaaaagcgcggttcgagtccaagccgagaatgaggattttgaattgaagcaaatgagggacatggctgctgccagaaagagatgggaagctctgataagagatggaaaaattaaagttcttactcctagggaagctgggtatgcagttcagctttcaaacaagccccttcttgatgtccgtccctcaaatgaacacaaaaaggcatgggtgagagcttcaacctggattccaatatttgatgttgataataagctagattttggaaccattcccagaaaagtcacaagctttgttatgggaggttggtggagtggcatgcctacactgtcttatgacagtcagttcttagccaaagttgaggagaagttccccaaagatgctgaattaattgttgtatgccagaagggactgagatcacttgctgcctgtgaactgctgtataatgctggctataaaaatctgttttgggttcaaggaggatatgaagctgctgaagaagaggatctcattgtagagggcccaatgcctctcaagtttgctggaattggtggcgtttcagaattccttggttggactgatcaacaaagagcagctgcagccaaggaaggttggggatatagattagtgttttctgcacgcctgattggactcattctcgttgttgatgcactatatattggtgctcagcaaattgggcgctatcttcaggatatcaggacccattgaggtaagttttcggttaatcctcacggagacaatattccttgcggataagcatatacagacagcaggctaaggaactcaattttggaagctgacccttggcagaggctttccgagattgtcataattgccccatcttatttcactactggattataattgcaaatagttaggcagccattttaatgtaggtttcttccatgtagctatgtactaataccttgtttggccaaaatgcttgtgttttttctttgaagtttccataacaaaaaattcaatagtgtcatattactgctccattaatgttactgttatggttatgtgtatgtattgtaactggccatgcattgtatgatatactaactagattaattctgaatcctggttacattgctgcagaagccttctggccacagtgactgtttattaatgtactgtgtgtttgtgtacgtttg

SEQ ID NO: 6526 - DNA, 2962 bp, Glycine max
  misc_feature (2956)..(2956): n is a, c, g, or t
gtcgacgtacgatattacggctgcgagaggacgacggaagggcatcacctataagaatttcaaatgcagataagtttacaaacaaggaaattattgggaaagatgatcctcatgatattgctgctgtggatagtccaagaagatgctcagatcatgaggatgatggtgggagtgatcgatctggaacagctaagaaggataaatctttcaccattgcccataggtcagattttcaggacaggggtgttaatcacatgtcagatactaaacttaaagctcaaacaaccagctattgtaccaatgggggtgtggacactatagtcctagatgggacacatccaggcacagagcagattaatcatcctggtgaagacaagattgatgtttattatgctactacatctcaagtaaggaaaaatggcatagaatcaggtttggaggacaacaatgtcaatgacagctgtaagtcagagtcccatgcagataaggtcaagagtactagttctccatgtcaactgaaagatcagtctcctctacatgaggcaaaacataaggatggaaaaattaagttgcaggagaagtttgggttcaagcctgaccaaaatgagattatacatgctggcaagaaagattatacaggaaaaaatgagagcaggaataaggagaatcactcgaatcggggtcacgactttcaggatgttagtacagatgccccatgcaaacaggaggtatttcatgctcctattcagaatcagtttccggactgtgatactgaaagatccacaaagaggtctcttttggaaagaactgatcaagaagtacatggaaaagggaagccattgtcatcattgccatatgaaggatctcaagttgagatattaaggtcgttgcccacgaccagttggcttacttaaaggaaatggagccacggaacgtccggatccttccaaagttgatgatgtgtcaaagttacaaaagaagcaattgaaaaagactgaccatcaaaatggaaatctgcaaattggttcaagaaatcccatacttaatggtcacaagtccaaggagcttgatgcccctagtccagctagaaggggattcttcctcccatgctgctaacaatgctctgaaagaagctaaaagatctaaaacatctggcttgatcgtcttaagaatactggatccagcgttgagggcactagtctttacttcgaggcagctacgtaggccccccccccccaatttctccatggagcctctctgttagaatctggcaacaatgataatgctaaacacaatgagatgattcaatcaatgcaaatatatagtagcacagcaaaattgtgcgagttttgtgcttattaatatgagaaatcaaaagacatggcttcagctgctcttgcctacaaatgcatggaggtagcatatatgagggtagtatattcttcacacactagtgcaagcagagatcggcatgagttacagacagcactgcaaatggttcctcttggcgagtctccatcatcatctgcctctgatgtagacaatgttaacaactctacagcagctgacaaggtcaccatatctaagagtgtcaattcgccccaagtagctggaaaccatgttatttctgcacgaaatcgtcccaattttgtgcgattgctcaattttgctcaggatgttaattttgccatggaagcctcaaggaaatcacggaatgcttttgtagctgctaattctagcctggctgtggacaagattgcagatggtatctcctctatcaagaaggctcttgattttagctttcaagatgtggaggaattactacgtttggtaaaggttgctgcagaggccattaatcgataaaggatccatttaatcaaagatgatcctagctcgttaagaagatgtgtttctttgtcatgtataatatcttcactctgacaaaaagacagtctgaattaaattgtgaaggggaagattcattttgttggatcttgatctggtcttgccatctggtgaaagctattactgtctctatacatatttttgccatacacagatggaagtctcagtttacagtcagaggaattcagttgctctctgttgtgtacaagaataagctctttgcaaaccttgagatacgtgggaggcacttggaagtaaacttctgtaatgcagattctgagctacttttttgtgcggaaagatgctacatccagattatgaattgaagatataataggtgaatgtgggtagacttagaagtttgaaactatttgctatctttgtcctcttctcattctggagggtttattattttgtcaatgtgtaaatgtataaagttgtaatttctggtgagaggtagttgtggattttgcattactgcaatcatgcttctaccagtgggtactgcactttctcctcttgtccaatctctgcagaaaggaaagtcaaagagagccaggctaatgttgtcttgtacaatgtcaggattagtggtagaacaatactctttactcattttattgttgatagaggccaagctgaaaacagaaaaggagggatgtacagcaagcatttttttaaagtggcaggcaattagctgcaaatggattgtcaacttatagggatgcagtggacgtgtaaataaacattatagattcaagttagagacagtgcaagctggttgctgtcttcttgcagaatctgacaggtttgagcaactgaggtaaattccagatagagctacaattgagctggccaaatctgtctgtaactgaccttggtggagttctttttatctattttttccccctgcttttcccttagtcaacagtattacatgtatttttttatacagttgatagtattgggcatttaattttaaaatttgactttacttacctgttcttataatgtacatactacattgctttattcatctaccttttagttnccgggg

SEQ ID NO: 6527 - DNA, 2008 bp, Glycine max
cccacgcgctcgccccgatgcggttgtaacttctctcttcaaccctagcttagggtttatgctctaaaaccctcccttttcaggtttattgggagagaaaaatgctcgtattgtttgaaacacccgcgggttttgccctgtttaaagtgctggatgaaggcaagctttctaaagttgaggacttgtggaagaacttttccagtgcagatactgctagacaggtggtcaagttgaaagcattttctaaatttgagaacacttcagaagctctagaggcagctactttacttattgatggaaaagctagcaagggtctccgcaagttcctgcgtgttcattgtgaaaatgaaacactaggtgtggcagattcaaagcttgggaatgtgatcaaggagaaattgaaaatcgactgtattcacaacaatgcagttatggagttgatgagaggcgttagaaatcagttaactgaacttatatctggtctagctgttcaagacatggccccaatgagcttgggtttatctcacagcttatccagatacaaattgaagtttagtgcagagaaggtggataccatgattgtccaggccattggtttactagatgatcttgataaagagttgaatacctatgccatgagggttcgagaatggtatggttggcattttcccgagcttactaaaataatacaggataacatcctatatgccagggcagtcaagttgatgggtgatcgtgttaatgcagctagcctggatttctctgagattttgccagaggaagttgaggcagagctgaaggaggcatctgtaatatctatgggaactgaaattggtgagcttgatttggcaaatattcgagaactctgtgaccaggttttgtctctctcggaatacagggcgcaactctatgattatctgaagagtagaatgaacaccattgcacccaatttgactgcaatggttggggagcttgttggtgctcgcctcattgcccatggtggtagcttattaaatcttgcaaagcagcctggcagtactgtgcaaattcttggtgctgagaaggctctctttagggcactaaagactaagcatgctactcccaagtatggtcttatataccatgcttccttgattggtcaggcagctccaaagttcaaggggaaaatttcccggtcacttgcagcaaagacggcattggctattaggtgtgatgctcttggagatagccaagataacaccatgggattggagaacagagccaagcttgaagcacgattgaggaaccttgaaggcaaagagttaggtcgttttgctggttctgccaagggaaagcccaagatagaagcatacgacaaggaccgaaagaaaggagctggaggactgataaccccggccaagacatataatccttcagctgattcagttattgggcaaatggtcaattctgctatggatgaagatgcacaagagccttctgttgctgataaaaagaaagaaaagaaagaaaagaaggaaaagaagaaaaaggagaaaaatgaaggggatgaaactgtgcaagctgatggtgacgttggtgaggaaccagaaccagaagttgtgaaaaaggaaaagaagaagaaaaggaaggaaactgagagtgctgagttgcagaatgggaatgacgataatgcaggagaaaagaagaaaaagagaaagaagcatgccgagaaggaagaatctcctgaaatgccaagcaagaagaaaggcaaaaaaaagaaaagtggggactaaggtgaagtcatctgctaatcaatctggtgaatgacaaccatttttgtatactccgggcagctcagtagtttgtttggtataatttttgttttcatttttatgcaatttgtagctttatacatcctttattattatttaatgggcttgagtggataatttgatgcaatcatgtttatgaatggaagatgagtggtgcgctaccctttgtaatgctatttttttacgcttcttttctg

SEQ ID NO: 6528 - DNA, 763 bp, Glycine max
ccacccggtcagctacgtaggcccccccccccgagtttcgctgccgcctcttcttcgagttgtaacctctctcttcaaccctaacttagggtttatgttctaaaacccttttcaggttgattggaggagataaaaatgctcgtgttgtttgaaacccctgcgggttttgccctgtttaaagtgctggatgaaggcaagctttctaaagttgaggacttgtggaagaacttttccagtgcagatactgctagacaggtggtcaagttgaaagcattttctaaatttgagaacacttcagaagctctagaggcagctactttacttattgatggaaaagctagcaagggtctgcgcaagttcctgcgtgttcattgtgaaaatgaaacactaggtgtggcagattcaaagcttgggaatgtgatcaaggagaaattgaaaattgactgtattcacaacaatgcagttatggagttgatgagaggcgttagaaatcagttaactgaacttatatctggtctagctgttcaagacatggccccaatgagcttgggtttatctcacagcttatccagatacaaattgaagtttagtgcagagaaggtggataccatgattgtccaggctattggtttactagatgatcttgataaagagttgaatacctatgccatgagggttcgagaatggtatggttggcattttcccgagcttactaaaatatacaggacaacatcctatatgccagggcagtcaagttgatggg

SEQ ID NO: 6529 - DNA, 1108 bp, Glycine max
  misc_feature (302)..(302): n is a, c, g, or t
  misc_feature (402)..(402): n is a, c, g, or t
  misc_feature (1107)..(1107): n is a, c, g, or t
atcccccccacccttggagaggggggactgtgtgggggcccttttttttttttatcccccccgggcgaaaaagggggggtttctcccacgcgggtttaattggggttcccccccgaggtttttcccccccccccccgttgtaataaaagcggcccccggggggcccgggaaaattgcccccccttttggggggaattgggttcccgggccccccccctgggggggtgccgggtatggataaacttttttttttttttttcttgctaaaaatgcaatctttttttcaataaagcagccagccngaccccccaagtttttcatggccaagctttatgtccttttctcagcgaaagagcgcttgagtttgatacgacgcgatgccaaaccattaaaaagaaaacnatagtaaaatccttttttccccttcgacacatcaccaaccgacaaaccccaagctaaaattattcactgcatatatcatgcggtacgccaagcagatggatgcaaagcccacagtagagcaaacttagtcccagacgaccaaaataacagcatatcagggcgggcttagaaaccctgctcgaccaggtagtcgccgagcctctccacgaccaaattgcactggccaggagtcatgggctcatcgtagataccaagaatcagggccatgccggtcttcttgatagtaatgccaccggtgcccttctttcctcggatgacaaccccaggttcaccttggatgaccatgtactttgtgcctccaaggaaaagaccagttggtgcaaggtgtccaggttcttcaaagtctttaacgatgccagcaatctcctcaggcttgaacttggggaagttgggggactcggcccagacgctgccgtcgtggccgaggatggcggcggaggtgaggtgctggccgtcgatctcgcagcacaggtggtcgtcgacgtacgtctgccacgacatcctcccccttctccggcggcgacttctctgggcggctgctgcggcggatgctgcgtggagcgcacgcggtctcggctgggctggggatgctttgcttggacctggatgtgtcgtgctttgacggctggctgggatttttctttnc

SEQ ID NO: 6530 - DNA, 859 bp, Glycine max
actccccattctccattcccccctcccccgccgtctcgtcccagctcgccctccagaggttttagtcttcctccatggcggccctcatcaagctcggaagccttcttaggcagagtgctgtggctagcagtgcctccaccggctcggctcctgccctgttcaacgctgcccgcttcatgtgcgccggccagcctgctgatggctccaagcttttcgtcggtggtctcgcctgggctactgatgatcattcgctgaaggaggcgtttcaatgctttggtgaggtcgttgaagctcgtgttatcactgacagagagactggaaggtctagagggtttggttttgtgagcttcgccagcggcgaggatgcaaagagtgctgcagaaaacatggacggcaaggagcttgcggggaggaacgtccgtgtgaacttcgccaacgagcgaccttcgggtggtggcggcggcggcggcttctctcgtggcggcggtggctatggaggtggtggcggcggctatggtggcggtggctttggtggtggcggcggatacggtggtggccgtggtggtggtggcggcggctatggtggtgaccgtgagtcctactaagaagagcactggctatcaaatttaaaataatgagtttttaggacagtgtcttgattatgtggaacctaatgttacgtctgtctgttatctgcgatagttgaactcaataggggcagagatgtggttctatgttatttttggttttgcttttttcttgatgatgcaagagttaatttgtgtatgctgcttcgaggcttggatgagtctcaaggaagtttcatgcattttgccgtgaaaaaaaaaaaaaaaaaagc

SEQ ID NO: 6531 - DNA, 1612 bp, Glycine max
ggaatacacgaagcataggcaatgaaatgaggcgtttgacttaccttcttggtcctgcagctacgtaggccccccccccaatctaatcccaaaaagcttattagtctctctcgatcaatcgaaccagcgagcaagattgtctctctcctaggccatgcgaccaccctgttcctccgccatcgccctctccagagaggtttcctttttcgttttcgccgatttctccatcgattccgccagccatgactgccgacacccacgccgctcctaatatcaatcccaagggcctcctctgcaatgccgccgccggtgcttccgccggggttattgctgctacatttgtgtgtcctttagatgtcatcaaaactaggtttcaggttcacggtgtcccgcagctcgcgcatcgaagtgctaaaggcagcataatagttgctagtttggaacaagtgtttcacaaggagggattacgtggcatgtaccgtggactcgcgcccactgtgctggctttacttccaaattgggcggtttattttagtgcatatgagcagcttaagagccttcttcagtctgatgatagccatcatctttcaattggagctaatatgatagctgcttctggtgctggagctgcgactaccatgtttacaaatcccctttgggttgtcaagactagactccaaacacagggaatgagacctggtgttgtgccatataggggcacactatctgcattgaggagaattgcacacgaggagggcattcgagggctgtacagtggccttgttcctgctctggctggtatcagtcatgttgccatccaatttcctacatatgagacaataaaattttatttggcaaatcaagatgacacagcaatggaaaaacttggtgcacgtgatgttgcaattgcatcatcagtttccaaaatttttgcatccacgttgacatatcctcatgaggttgtacgttccagactgcaagaacaagggcatcattcggagaaacggtactctggtgtgattgattgtattagaaaggtttttcatcaagaaggtgtatcaggcttttaccgaggctgtgccaccaatcttctgaggacaacgccagctgctgtgattacattcaccagctttgaaatgatacaccgatttcttgtttcttattttccttctgatccacggcctcatattttgtgacgattgatcttggtgtaatctgtcttctgtagcagttagattccaatacataagctagtccagctgagtaatccttctcttggcgatgcagatatcattctttgtgatttggttgcttatgtatggtagagccccattatattctatcctggcaacctcaattgagcccggtttccctggtcaaacttgtagatttgagtgataacgacgataaagatgataaagtgatacgagatgtcctctgcttgcttattttattttgaaactgccgaatcctttaaaacatatccagcacgatctggatttgctgtattgatgagaatcatgcaatcagcgaatctaaatcgttagacgaagataagacagtttatattttgttttggtaaattggacatggagaacacatttaagatttc

SEQ ID NO: 6532 - DNA, 1461 bp, Glycine max
gcaccagggacagcgaagtcacggctgcgagaagacgacagaagggctggacagagagctgtatacactactggtaaaggggcttctgccgtgggtcttacagctgccgttcataaggatccagtcacaagggagtggactcttgaagggggagcacttgttctagctgacaaaggaatttgtcttattgatgagtttgacaagatgaatgatcaggatagggtgagtatccatgaagccatggagcagcagagtataagcatatcaaaagctggaattgttacatctcttcaggcacgctgctctgttattgctgctgcaaatcctgttggaggaagatatgattcctcaaaaacattctctcaaaatgttgaattgacagatccaattatttctcgttttgatatcctctgtgttgtgaaggatgttgttgatccagtcactgatgaaatgcttgcaacgtttgtcgttgacagtcacttcaagtcacaacccaagggtgccaagcaagatgataagtcctttagtgagttccaagatgtccatgcatctgccatgccagctgatccagagatacttcctcaacagctactgaagaagtacattacatatgccaagttgaatatttagctacgtaggccccccccccccatggataaactgtcacatgtctatgccgaactacggagggaatcttcacacggacaaggagtccctattgctgtaaggcacattgaatcaatgataaggatgtctgaagctcatgcgagaatgcatctcaggcaacatgttacacaagaggatgtggacatggcaattcgtgttcttcttgaatcattcatttcaactcaaaaatttggggtgcagaaggctcttcaaaagagctttagaaagtatatgactttcaagaaggactacaatgaactgctcctttatattcttcgcgagcttgtaaagaatgctttgcattttgaagaaattgtcaccggatctgcttctggtttaacgcacatagatgtcaaagtagatgatctctacaacaaggctcaagagcatgatatttatgatctgaaaccattcttcaatagcagccacttttcaagggccaattttgtattggatgaagaacggagagtgatcagacatcaccttaccagatgaaagtagactgtatctgggttttatcatccatctagtttaggttgaatgtttgatcttaaggttttgaccatcgactccggcagttactttgttgctaaatgtagtatctcctttgaattttattacatatattttatctgtatttaaaaacgtattccttcgataacaaaaaaaatgtattccttcactgctttgaatatttcttcaagtttcttattagttaggttacgtattactgccgatacggccttgacttcacaataaatatgcaatttgaatgttaaaaaaaaaaaaaaaaaa

SEQ ID NO: 6533 - DNA, 1554 bp, Glycine max
ttctctctttctcactctttctttcctctctctgtttaatggttagggtttcgtagggccgtcatcggaatgttccagaaggcccttccgtctctctttgccctttccaattccgttatacgacggcgtttcgtgccaaccatgcgttgaattgttttttttttttctttttccttcagtggcggcagttctggtatggaaatgtatgatgtttctgaaactagaaatgcagatgcttatttgattgaaggcactgatttaaactcacatctgacaagcccaaatattcaacaatttcaagccatgtttaatgatggagcccctgaatttgttgttgatcagaacttgtattatcctgctgccaccaattatgggtattactgtacaggatttgaatcacccggagaatgggaggaccaccataggatttttggtgtagatggtcctgatattcagtacacaggtgcacaaaacgaaagttttccatatatatattatacacctagctatggatttgcacagtctccatacaatccatacaatccttatattcctggtgcaatgataggagttgatggttcatttggaggggccagagcaatattactccctccccaattatcaaaaccctatttcttcacatgcttatattcctcttgttcaaccagacaatttccctaatagttctgttgactcattgtttgataccagagcttctgtcagcagacctgatggaaaaggtttaaaacctaagttcaattcagcttctggttcctttactaggaactcttcaaaatcattatcaaatcccacaagttccttacccaggatatcagaaggtccgagagataatactggggtgaagaaagatatgacaagtggcaggggttttcttaatatggcttcctcacctgtccatcaggccagaagcattgatgcctcgacccatgctgtagatatttccaatggaaatgttttgtcccatagtaatcaattaaaaatagcttcccctctgagtagtggattttctgattatggatctaatgctaatggacagtctgtggttgctaaacttcgaccaaaggttcatgtaggtaaaggactgagtgaagtaaatggaagttctgatgttttaggtgagcaaaatcggggcccgagaattagtaattataagtcaaaatttccactggctgtcaaagcctatgcaaataaaggagatgacaatacacaagagaatatcatcatttctactgatcaatataacagggaggatttccctgtcaattatgaaaatgcaaagttttttgttataaaatcgtacagtgaagatgatgtgcacaaaagcattaaatataatgtgtggtcatcaacacctcatggaaactagaagctgcagagtactcatgaagatgctaagagaattgcttctggaaattttggaagctgccctatctttctttccttttctggtaatgcaagtgggtcaattttgggggggttgcagagatgattggaccccggtggcctccaataaggacatggacttttggcagc

SEQ ID NO: 6534 - DNA, 1292 bp, Glycine max
ccccccctgtcaattatgaaaatgcaaagtttctgggccggaattcccgggtcggcccagcgtccgatgatgtgcacaaaagcattaaatataatgtgtggtcatcaacacctcatggaaacaagaagctgcagagtgctcatgaagatgctaagagaatagcttctggaaattttggaagctgccctatctttcttttcttttctgttaatgcaagtggtcaattttgtggggttgcagagatgattggacctgttgacttcaataaggacatggacttttggcagcaagataaatggagtgggagcttccctgtaaagtggcacatcataaaagatgtgccaaatgcaaattttaggcacattatactagagaacaatgagaacaaacctgtcactaatagcagagacacacaagagataatgtatagtaaaggtttggaaatgcttaaaatattcaaaaaccatcatttgaagacatctttgcttgatgactttatatattatgaaaatcgtcagaagatcatgctggaagaaaagaccaagttgctaatcagaagttttgaaaatccattaatgttacccacattagaaccacctcggaagttgaattttgtcgttgacatccctccagtcagtgttgagaagaaggcaaagatggatgatgagtttgatagcctaaaacagacttcaagtgctggacatattgttagtagttctgaggtcacaagcaccgcatctgtggatgaaaaggctgagaaaggttcagttgagaaagaagatattgcttctgtccttaagattggttcagttactattaccccaaaacaggtggagactaaaccatctggcattagtgttgctaataaggaaccgcttgatgttatcacagtaggctcaatgcaagtcaaagttaatggatttgccgagtcttcgggtcttttgaagattgggagtatcccacttgatccaagaacactacagctggacggaggtactcgtgttaaaaatggatcttaaagttttcttataaatgtcgaggcacgttttggatctttatgaaaagatggatcaatgcatgcctgattgtgccactgttgggaagttgggtttctattcaatcttttttttttactgcttttttgtttgctactgattgatataaagggtcatactgatgtcatggatctttcgagcggtgttgattcaaaatgcttttaatgaaagtgtaacctctctagtgtgaatagcattttcaggaatagtatttttagaaatataatttaattcgtg

SEQ ID NO: 6535 - DNA, 1551 bp, Glycine max
  misc_feature (62)..(62): n is a, c, g, or t
tcgagtcagctacgtagtgcccccccccccctttttgttataaaatcatatagtgaggatgntgtgcacaatagcattaaatataatgtgtggtcgtcaacacctcatggaaacaagaagttggagaatgcttatgaggatgcaaagaaaatagcagctgaaaagtctgaagtgtgccctattttcctattgttttctgttaatgcaagtggacagttctgtggggttgcagagatggttggtacagttgactttagcaagaatatggacttttggcagcaagataaatggagtggaagctttcctgtgaagtggcacattataaaagatgtaccaaatccaaattttaggcacattatactggagaacaatgaaaataagccagtaactaatagcagagacgcacaagagataatgtatttgaaaggtttggaaatgctgaaaatattcaaaaatcatacattgaagacatctttgcttgatgactttatgtactatgaaaaccgtcaaaagatcatgcaggatgagaaagccaagtttctagtcaagagttttgatagtccaatatttgtaccagtattagaagctccccaaaagttgaatttttttgttgatgtaccaacagacaattatgagaagaatttgaagcccaaggatgattctgatggcttgaaacatatttcattttcaagtcctgagcagattgttggtaattctgatgtcactggcatcaagcatgcgcatgatgaaaaagatgagaaaattgctgttgataaagaacatatttcttctatcttaaagattggttcagtcactattgcccccaaacaagttgaggctaagcaatccgtcagcaatggtaataaagaaccagttgatgttcttacagtaggctcaatgcaggtcaaagttaatgggtttccttcgtcttctggtttcttgaaggttggcagtaccccatttgatgcaagagcattgcaaccgggaaaaggagatgctgccgttaaaagtggatcacaacgttaaattttgctttgctttgcatttgaggcacatctgattttagtcttcttttggtagatggattaattgtttgcccaattgtattaaactgttgggaagttgagcttctttttgatctttttgttttcatttactaatgatgctttggtacaaggctgttatatcgtgggtgtttgagcagtgttgacatctaaagcttctattggatagtttaacccttatttttttttgttgcttttcgcctgttgttggtcaacatgaaaggggtgagtctgttcatccaatttatgtcgagaaatttgttttaacttcttgccacattcgttgagtgagtcattgttatattaacaagatcgcatttctattctgttggtttgaatgtatttcattctgatttggtttaggacgggaaaatgtaagaaatgattaaacgagccttttaagattacagtatacctgtatttggtttatttaagctcaatctgttatgccatctaatctatggtggaatctgttaagtgtagttgg

SEQ ID NO: 6536 - DNA, 1863 bp, Glycine max
  misc_feature (1638)..(1643): n is a, c, g, or t
ttggcttctggtagtagtgttttatgttacgcacacaccaaaacggctctctcgcagcccaaaagcttcgccgtttcggttcgcgctttagggtttcgcgaaatgtcgtacgaatccgctacttcttcttcttcgctgttcgctctctccaattccaattcccctccgcgctcttcactaaccatgcattgatattcgtcttcctcttctcctcttcggtggtggcagttctggtatggaagtgtatgatgtttctgaaactagaaaccatgatgcagacatgattgaaggtgctgatttaaattcacacttcacgagcccaaatattgaacgaactgaggtcatgattaacgaaggagcccctgagttttttgttgaccagaacttgtattaccctgctgccaccaattatgggtattactgctcaggatttggaacacccggggaacaggaggaccagcataggatttttggtgtagatggtcccaatattcagttcacgggtgcacaaaatgaaagttttccgtatgtatattatagctatggatatgcacagtctccatacaatccatacaatccttacattcctggtgctatgattggagctgatggctcatttggaggaggacaacattattataccctccccaattatcaaagtccagtttctgcacctggttatattccccttgttcaacctgacaatttttctgatagttctgcggattccttttttggagccagtgcttctgtcagtaaacctgatggaagaggtttgaaacctaagttcaattcagcttctggtaacttttctaggaactcttcaatttttttatcgaatcagacaagttccttggccagggcatcagaaaggccgagagctaatgatgggaggaagcaaggtttgacacatgcaagtgtttctgggagtagttttctcaatttagcttcaccagctgttcatcaggtattagttttacccttgtttagtttacatttggactgttgtcctgtgcattcctgcagattgttaaacgagtatcaacatttctgagtgaaattagttgctactactatacttggttaaagttttccttgaccaaaatgttttttttctttcacaagtacacctagtggaggcaatgactagatgactattagtttgtggcctttcagaagatcttcatataaataaaacctagatgaatttttgttcataatgtctaggtggtttgaagatacttttctgtttttgtaggatagaaaatctaggttggtgttcttttcaacttatagttataatttctattgggaatgttatgtcccatcatcaattgaaaatagtttcttcaaatattgaattttctgatttttgatctaatgcctatggacagtctgcagttgctaaacttaggccgaagcttcacattggcaaagcagtgccaaatggtggaaatgggagctctgatgtattgggtgagcaaaatcgaggccctagagttggtagatcaaaacatcagctgtctgtgaaagcctatacaaccatggcaggagatggtaatgaacagggaaacattgtcatttatcctgatcaatataatatggaggactttccccttggctatgaaaatgccaagnnnnnngttataaaatcatatagtgaggatgatgtgcacaaaagcattaaatataatgtgtggtcgtcaacacctcatggaaacaagaagttggagaatgcttatgaggatgcaaagaaaatagcagctgaaaagtctgaagtgtgccctattttcctattgttttctgtgagtgttcattatcttgatacgatcaatgtgttttgatcctggttccttataattt

SEQ ID NO: 6537 - DNA, 2045 bp, Glycine max
ttgttcggctgcgagaagacgacagaagggggccttcttaggcactaaaatagagactgtatttatcctgagggaaattgaggggcagggtgataataacagtaacagggatgagtgatatcatttcatttcagagggattaattattgttttatttttaagtgtggagtgctgtgcaggtcaaggcccttttacttgttcgtccggttgttcccatcttctctctcgtaccaatcaaatcacacttttgtgttgtgttgggaaaccctaaaccccgttttcggtgagatcgagatcgatcgaacatggatgaggagtacgatgtgatcgtgttgggcacgggtctcaaggagtgcattctcagcggtcttctctccgtcgatggcctcaaggttctgcatatggataggaacgactattacggaggagaatccacttcgctcaatcttattcagctttggaagagattctctgtcctcctcttcagctttggaagagattcaggggagatgacaagcctcctccacatttgggcgctagcagggactacaacatcgatatgaaccctaagtttattatggctaatggcaatttggtgcgggttctcatacataccgatgttactaagtatctctctttcaaagctgtggatgggagctatgtgtttaataaaggaaaggttcataaggtgcctgcaaacgacatggaggccttgaagtccccacttatggggctatttgaaaaacgccgggcacgcaagtttttcatttatgtgcaaaactacaacgagagcgatcccaagacccacgaggggatggacttgacaagagtgactactaaagagttgatagcaaaatacggccttgatgataacactatagacttcattggtcatgctttggcgcttcatagcgatgatcgctacttggctgagccagcactggacaccgtgaagagaatgaagttatatgcagagtctcttgcacgctttcaaggagggtcaccttacatatatcctttgtatggtttaggagagcttccccaggcatttgcacggcttagtgctgtttatggtggaacatatatgttgaataagcctgagtgcaaggtagaatttgatgaggaaggaaaggttgttggtgttacatctgaaggggaaactgcaaagtgtaaaaaagttgtttgtgatccatcatatttgcctggcaaggtgaggaaggttggtagggttgcaagggcgatagccatcatgagccacccaatccccagcactgatgattcccattcagtgcaaattattttaccacagaaacagttgggtcggaagtcagacatgtacctattttgttgttcgtatactcacaatgttgctccaaagggaaaatttattgcatttgtatcaactgaggcagagacagatcagccggcaattgaactgaaacctggaattgaccttctaggacctgttgatgagatattttttgatatctatgacagatatgaaccagtcaacgaacccactttggacaactgctttatatcaacaagttatgatgctactactcactttgagtcgactgtggatgacgttctcaacatgtatacattgataactggaaaggttattgacctcagtgtggatcttagtgctgctagtgctgcagaagagtaaagaaaactcggtgatgatctgttgctgatgggttccgtgatgatggacttgacaacgaatgttattaacgttttataataaatattttctttttttaaaacaagatttgtgtggctggggaactttttcccgtccagaagctctgttgtgtgttcacatacattgccttctgcagtggttttagtttggtaatgtagtgttattttcatattgttaaatgttaattgcacgtctctccaaccatttcatacccctggcaatttgtgtttggatacttttatctttcattagttgaaactcatgtgggttgtattaatcttcattttaattcaaatataaaaaaaattataaataacaaggcttaaaaaaaacc

SEQ ID NO: 6538 - DNA, 1944 bp, Glycine max
gcggtcgcacccggggtgcccctacccatatccccggatcccaccacgcgcgcgtttttgacagagaactggtgacccacattgggcattggggtggcctctttctttgcttcttcttcccaattgattgaagcaaatccatctatcggagtctgcatgattgctttagcattttttaaaaaaattcttctgcaatctgcttaagaattcaagtgaatatctgaggagatttctttttgtagttttaagtatataatccttttatcaatctctacaatactttggttagagagtttttctctctttttttcttttgttttctagtaaaaccaaaaaaatccacatgtttgtgtttgttaaggaattaggaaaacacacaaacatgataacacaagccaacaaaacaacaattaaaacacacccagagagagaggtacagagtgaaaacaccctttaaggctttgctttaactactgagctactacagaagtggccctcctttttttttttcatttctagttttgtaccttcctttctttcttgtttcttctccctaaccattttttctctcgtctctcaagcataataggttattaggtgattgattctgttttcttcatagcaggattttcaataaaccaccatccaatacaatctcactcaagcaactctttctttctttcttcttcctttgttgcctttgaattttctctaatccttgtggccaaaccaaaccatattacaaattgatgtctaatttgtacaatcagatttccttaccttcaccccaaagagccaattcaccaaacataaacatgagaggcaattttgatgttgatagtcagtacttaacagagctgctagcagaacgacagaagcttggacctttcatgcaagttctacccttatgtacgagactcattaatcaagagattttaagggttaccggaaagaatgaatcattgcagaaccaaggatttagtgactttgatagaatgcgattcataaatccgagtcatatgacttctccaaactcaacatcaaacttcactggctggaaaagcctgtcacatgaaaggttagctggtgtacaaggactaagcatggattggcaaacttcaccggttgttccaagttctcccattgtgaagaagatattgcgcttggatattccgaaggatagctatccaaattttaattttgttggccggcttcttggccctaggggtaattcactgaagcgagtggaagctactacaggttgccgtgtatttatcagagggaaaggttcaattaaagacttagacaaggaagaattgctacgaggaaggcctggctatgagcacctgaatgatccgcttcacattctaattgaagctgaactacctgccagtgttgctgatgtaagattgatgcaagctcaagaaatcatacaagagctacttaaaccagtggatgagtcacaggacttttataaaaggcaacaactaagagaacttgctatgcttaattccaacttcagagaagagagccctcaactgagtggtagtgtctctccattcacttctaatgaaataaaacgggccaaaactgatcaatagtgattatatgttgagaattgttgcattgctttaatgcttcctgtaactaaattttgtaaagctgcaatggaaagaccttgctgatttgatgctgctgctttggagaacaaaataaaagggagaaaaacatattcattgtcacaatgtcactagacagaaaaaccattaaactatattttgacctatttattactctatttgtaatgcgtatcaatatgatgttgttgggatttttattaaaaaaaaaaaaaaaatttatagtcgtggccggcggcgtttccatatcagatgaaaaagaaaaggctgaagctgagaaaatactgcaaataaagaaagcggaagg

SEQ ID NO: 6539 - DNA, 1494 bp, Glycine max
ggtcgcgtgataccatttaatttcacagcgattaattatttatagttaagtgtggagtgcagtgcaggtcaaggcctgagattcggttctttacttgttgggttgttctgatcttctctcatagcaatcaaatcacactcccatcttctcatctcgtaaaccctaaaccccgttttcagtgacatcgagatcgatcgaacatggatgaggagtacgatgtgatcgtgttgggcacgggtctcaaggagtgcattctcagcggtcttctctccgtcgatggcctcaaggttctgcacatggacaggaatgactattacggaggagaatccacttcgctcaatcttattcagctttggaagagattcaggggagatgacaagcctcctccacatttgggagctagcagggactataacatcgatatgaaccctaagtttattatggctaatggcaatttggtgcgggttctcatacatactgatgttactaagtatctctctttcaaagctgtggatgggagctttgtgtttaataaaggaaaggttcataaggtgcccgcaaatgacatggaggccttgaagtctccacttatggggctatttgaaaaacgccgagcacgcaagtttttcatttatgtgcaaaattacaatgagagtgatcccaagacccatgaagggatggacttgacaagagtgactactaaagagttgatagcaaaatacggtcttgatgataacactatagacttcattggtcatgctttggcgcttcatagtgatgatcgctacttggctgagccagcactggacactgtgaagagaatgaagttatatgcagagtctcttgcacgctttcaaggagggtcaccttacatatatcctttgtatggtttaggagagcttccccaggcatttgcacggcttagtgctgtttatggtgggacatatatgttgaataagcctgagtgcaaggtagaatttgatgaggaaggaaaggttgttggtgtcacatctgaaggggaaactgcaaagtgcaaaaaagttgtttgtgatccatcatatttgcccggcaaggtgaggaaggttggtagggttgcaagagcaatagccataatgagtcacccaatccccagcactgatgattccccttcggtgcaaattattttaccacaggaaccagtggggtcggaagtcagacatgtacctattttgttgttcatatactcacaatgttgctccaaagggaaaatttattgcatttgtatcaaccgaggcagagacagatcagccagcaattgaactaaaacctggaattgaccttctaggacctgctgatgagatattttttgatatctatgacagatatgaaccggtcaatgaacccactttggaccactgctctgtatccacaagttatgatgctacctactcattttgagtcgacccggggatgctgctcctcaacatgtatacattgataacctggaaaacgtta

SEQ ID NO: 6540 - DNA, 1352 bp, Glycine max
ccacgcgtccgggcagggtgataataacagtaacaggggtccgggattacttttcatttcagagggattaattattgttttatttttaagtgtggagtgctgtgcaggtcaaggcccttttacttgttcgtccggttgttcccatcttctctctcgtaccaatcaaatcacacttttgtgttgtgttgggaaaccctaaaccccgttttcggtgagatcgagatcgatcgaacatggatgaggagtacgatgtgatcgtgttgggcacgggtctcaaggagtgcattctcagcggtcttctctccgtcgatggcctcaaggttctgcatatggataggaacgactattacggaggagaatccacttcgctcaatcttattcagctttggaagagattcaggggagatgacaagcctcctccacatttgggcgctagcagggactacaacatcgatatgaaccccaagtttattatggctaatggcaatttggtgcgggttctcatacataccgatgttacaaagtatctctatttcaaagctgtggatgggagctatgtgtttaataaaggaaaggttcataaggtgcctgcaaacgacatggaggccttgaagtccccacttatggggctatttgaaaaacgccgggcacgcaagtttttcatttatgtgcaaaactacaacgagagcgatcccaagacccacgaggggatggacttgacaagagtgtctactaaagagttgatagcaaaatacggccttgatgataacactatagacttcattggtcatgctttggcgcttcatagcgatgatcgctacttggctgagccagcactggacaccgtgaagagaatgaagttatatgcagagtctcttgcacgctttcaaggagggtcaccttacatatatcctttgtatggtttaggagagcttccccaggcatttgcacggcttagtgctgtttatggtggaacatatatgttgaataatcctaagtgcaaggtagaatttgatgaagaatgaaaggttgttggtgttacatctaaaggggaaactgcaaagtatgaaaaagttgtttgtgatccatcatatttacctaacaaagtaaagaaagttaataaggttacaaaggcgatatccatcataatccacccaatctccaccactaataattcccattcaatacaaattattttaccacacaaacactatagtcaaaatcatacatatacctatctcattttcgtatactcacaatattgctccgaactcaacattattagcattatatcaacctactcaaatacacatcacccctcaattcaacttgaacctccaattgaccttcta

SEQ ID NO: 6541 - DNA, 1349 bp, Glycine max
tcagctacggcggccccccgccgcgttcttcctaaaacaaatcgtgtaaaggcaaagtacagacaaagttagttagaaattgaaagggaaagggaaacgaaaatgagtagtagggtttggtgtgtggtgatggtatcagcgttggcgttgatgttacaatggcacgaagcattcagctcctacgctggctccgcaagtgcgatcatcgacccttccaaggtcaaacaagtttcgtggaaaccgagagctttcgtttacgagggttttctgacggaattggaatgcgatcacttgatttccatcgccaaatcggagctcaagagatccgcggtggccgataatttgtccggcgagagcaagttgagcgaagtcagaacgagctccggcatgttcattcccaagaacaaggatctgattgttgctggtattgaagacaagatttcatcatggacctttcttccaaaagaaaatggagaagacatacaagtattaagatatgagcacgggcagaaatatgatcctcattatgattactttgctgataaagttaatatagctcggggtggacaccgagttgccacagttctcatgtatctcactgatgtaaccaaaggtggtgagacagtgttccctgatgcagaggaatctccacgtcacagaggttctgaaacaaaggaagatctctctgagtgtgcccaaaaaggaatagcagtgaaaccgcgaagaggggatgcacttcttttctttagtctctacccaaatgctatcccagacacactgagtctacatgcaggatgccctgtaattgaaggtgagaaatggtcagcaacaaaatggattcatgtggactcatttgacaaggtggtgggagatggaggggattgcaatgataagcacgaaaactgtgagagatgggctacccttggagaatgtactagtaatcccgaatatatggttggatctccaggccttcctggctactgcatgaaaagttgcaaggaatgttagaagtgttactgaatgctttccagattccacatggtatttttgacgttgactcaaatttcaattggttctcagatttttattatgtattttctttttttgtgaattgtattgtattctgtctcattataattagctctcagatagtgttctagtgcatggtcacacttcaagaggtacatttcgtcggatactttgtatgtaaaactacaaaaaaggaagtatacgttgttttatcccaaaaaaaaaaaaaaaaaaaaaaaagaaaaaaaaaaaaaaaaaaaaaaaaaaaaaaaaaaaaaaaaaaaaaaaaaaaaaaaaaaaaaaaaagaaagaaacaataa

SEQ ID NO: 6542 - DNA, 1923 bp, Glycine max
ggtccgccacaccttcttcctctctctgtatactgaacaaaaacaaaaagagagttcagaatttttagatctcacctatttaactacctcgtaacattctcttctgtgtcctaatcggaactcgcaaagattttgttatagtgatctgatgccatcttagggtttttgaattgcgatgggtctgggaaacgatgacgatgacggagacacgctcaagtccttcggttcagtgtgttgttcgatttgcctcgaggctgttaccgataacggtgatcgatcctgggccaagcttcaatgcggacatcaatttcatctcgattgcattggctcagccttcaatataaagggggcaatgcagtgccccaattgtcgtaaggttgaaaaaggtcagtggctttatgctaatggttgtcgatcatatccagaatttagcatggatgaatggacacatgatgaggatctatatgatcttagctactctgaaatgtcctttggagttcactggtgcccttttggtaacttgacccgacttccttcatctttcgaggaaggggatttttcttcaactgcgtatcatgatgtactgggacaacatgctatatttgctgaacatacggctgtatcatctgctagtcatccttgcccatatattgcctactttggaccaatacatccctccacctccaattctggtggaactgtttccgaagcttctaatttcaaccactggaatggtccacctgtacctggtgacatgccaacctcctacacatttcctgcagtggatcttcattatcacagttgggaacacaattcctctcatttctcttctgccaacagccgtctaggcactgcagaacaggcctcagtatcacctggtagtcaaaggcctgccagggttggttcagaggtccctagatccgggtcttttatgcatcccttccttgttggtcacagttctgctgctagggctggaaactctgttgcatcttcaatgatccctccttatccaggcagcaatgctcgggcccgtgatagagtccaagctcttcaagcatattatcaacctcagcaacctcataattctaccacaatacggacacctgttgcttctagcactcgaagatccagtagtcatagtgggcctgttcaattagcaccagtggcctcgccaccagaccaaagtgctggcttcgtatatattccatcaggttcttcaggacgcaattttcaggaagaaacccatttgccaagtcgattccatgcttgggaaagagagcacttgccttcattggcgttaaaccatgttggtagagaatcaagttggagagcataccaccagactgccagtgtgtcagacccaagtatcagatccagcagctttcgattaaggcacgaatccgacagaatgccttcacaaaatcggtgatatacttgttttatgtcaaactacagttattgtcgaaaatcaaaatttatgtatgcttgagaaacgttacataatgcttttagcctggctggcatgttatgacagactttatactctggctggccttggaattcatctttcgggcagccatgtggcagtgtgatggacattggtctcctctagtttctttgccttggagggcataaaataagatcgtatctagttgggaaaatcaggtttgggaagaaatactggtgcattgtcatctcaagtgataaattagtggatgagagcatgtgtcgttgttggatttattgtagtgggtaaattatttactttgacatcgatgctcatgcaaatgctgtgtatcgagaatatgcttaatcttaccactgctcagtggcaatgtgattatagaccattactgtgcaaaaactgaccccaggagtttgaaaaaaaaaaaaaaaaaaaaaaaaaaaaaaaaaaggattttt

SEQ ID NO: 6543 - DNA, 1348 bp, Glycine max
ctgtgttacaagttcacctgctatcactaatactgttgccactgataccaagaaaagggggcttcaaatggtggaccagaatcagaagcaaataggtcataggaaatccatagatacctttgggcaaagaacatctcaatatagaggtgtaacaaggcataggtggactggtagatatgaagctcatctatgggacaacagctgcaagaaagagggccaaggaaggaaaggaaggcaagtttatctagggggttatgatatggaagaaaaagcagcaagagcttatgatatggccgcactcaagtattggggaccctcctctcatataaatttcccattggaaaattatcaaaacgaacttgaggaaatgaagaacatgacgagacaagaatatgttgctcatttacgaaggaaaagcagcggattctcaagaggggcctccatgtacagaggagtaacaaggcaccaccaacatggaaggtggcaagctcgaattggaagggtagccggaaacaaagatctatatcttggaacctttagtacccaagaggaagcagctgaagcctatgacattgctgctattaaattcagaggagttaatgctgtcactaactttgatataacaagatatgacgtggaaaaaattatggagagcaataaccttcttagcagtgaacaagctaagcggaaaagagagatggatgatggaactagaagcgaggctaccgttaaccaaaaaccttctacatatgaccacactcaagaaaccattctaatgcagaaaagatgcaaaaaccaatcagaatggaagatggttcagtttccatgcccccaacagcttgatcagaatcaaagaatcgagagttgtagaactcagcccttctcaacggacttagataacatgtttcgtcaccaagttgaggaacggagcaacatgggaacacacttgtcaaatccttcttctctggtgacaagtttgagtagctcaagagaagagagcccagataagacaagcatgccaatgctctttggaatgccttcaacagtgtccaaattattggctaacgtggattcttgggatctatcttccaatctcaggactgcgctttctatgcctcagatgccaatttttgctgcttggacagatgcataatcttatgttttttacctctatcaaaatagcaaatgcttgtttactaaaacaggatgttaatgcctagctagtacaatagagagcttgtgcggaattttaaaatgttaactgttacatcaagcattttcctcgtacaatgagaggaaagctcctaaagttttatatcctaggactccaaattcgtatcatcaaaaa

SEQ ID NO: 6544 - DNA, 1431 bp, Glycine max
tcgagtcagctacgtaggccccccccccggtgagttttaattcattgtctctacagtaatagtagtatttgcttaaacctcataaagatgcctcaaggtgattctaatggtagctccaagcagcttgctgcagttactaggcgtgtccctactcccgggaaggccacaatacttgcaataggcaaggccttccctagccaaatcatccctcaggagtgtttggtggagggctacattcgtgacactaagtgtgaagatgcatatattaaggagaaattagagcgtctttgcaagaacaccactgtgaagacaaggtacacagtgatgtcaaaggagatccttgacaagtacccagaattggccacagagggctcaccaaccataaggcaaaagcttgaaatagctaatccagcagtggtggagatggctacaaaggccagcctttgttgcatcaaggaatggggaaggcctgctcaagacatcacccacattgtctatgtttcctcgagtgaaatccgcctaccaggtggtgacctttacttggcgaatgagcttggccttcggagcgatgtcagtcgcgtaatgctctactttctaggttgctatggtggtgtcactggcctgagagttgccaaggacatagcagagaacaaccctggtagtagggttctgctgactacctctgagaccaccatacttgggttcagaccccccaacaaagctaggccatatgatcttgtgggggctgcactttttggtgatggtgctgcagctgtgataattggagccaaccctgtgatgggtcaagagtctcccttcatggagttgagctatgctgtccaaaagttcctgcttgacacacacaatgtgattgatgggagactctctgaagaaggcataaacttcaaacttggaagggaccttcctcagaaaattgaagacaacattgaggagttctgcaggaagctcatggctaaaagcagtgccaaggacttcaatgatttgttctgggctgttcaccctggggggcctgcaattctcaacaggcttgagagtacactcaaattgagcaatgacaagttggagtgcagtaggaaggcactaatggactatgggaatgttagcagcaacactatattctatgtcatggagtacatgagggagtatctgaaagaagatggagaagaatggggcctgggattggcatttggtccaggaattacttttgaaggcattctcctgcgcagcctttgatcttacacatgaatttgtcttcatattgtcctagcaaaggatgtactcaatagtctatggtgttctttttctgtggtttaaaattaaaatctcccttaacaattaataaagtttgatgtagcaaattactgtctgaatatcaatacagggaaatttatcaaaaaaaaaaaaaaaaaa

SEQ ID NO: 6545 - DNA, 1463 bp, Glycine max
agttcattcagacacgcatgtgcaaccattagccaataaccaaaccccccaacacacatatcagaacacacagcacaacacagttcaagtttctcgtttccctaaacagatcctaacaacacaacacaaacacggagaaacaaaaatgcacgcaaagacagactcagaggtaacaagcctcgccgcgtcttcccccacgcgctcccctccacgccgtcctctttactacgttcagtctccctcgcgagattctcacgacggcgagaaaaccgcaacgacgtcgtttcactccacgcccgttctcagcccctctgcttcccctcctcactcgcgccactcctcttccacgcgcttctcgaagaaggaccatagccatagtcttaagccgtggaagcaaatcgatgttattgaagaagaagggcttcttcaaggggatgatcgccgcaacgggcttccacgtcggtgctactttcttgctttcgttgttgggtttttggttctcttctcgttcttctcgcttatcctttggggggctagtagacccatgaagcccaagatcaccatcaggagcataacgtttgatcatgtaagggtccaagctggttcggatgcaacaggggtagccaccgatatgatcacattgaattccactttgaaattcacataccgcaacacaggcacattttttggggtccatgtcacatccacacccgtggaactttcttattcagacattgtaattgctgcgggaaatttgaagaagttttatcaatctaggaggagccaaagattgctgagtgtatcagtgatgggtaacaagatccctctatatggaagtggtgctagcctaagtagcacaacgggtgtgccaacactgcctgtgccattgaacctcaactttgtgctacgatctagggcttatgtgcttgggaaattggtgaagcctaagtactacaaaaccattaaatgttccatcacattggatcccaaaaagctcaatgctgctatttccctcaagaaatcttgcacatatgattaatatgcatatgatggagaacaagtggaatgcacatgtaaaagaattatttgaagaaaaaaaattaataaaaatattattttatgattaatgtgttcttttgatgtgaggaaagaaatggtacagctcagagggaagtgtgacaaggacgcgtttttggaaatgttttgctgcccaagttgcctcaaattgcggaaagacaaagacatgcatgttgggttcggtagagaaatgtaatcttctgattgatcatttcatgaagactttttttgtgttgatttaattatttgtgcgattttaatttattaattgtaaaagtgacaggtaatttgaattcattcagtttcaaagttgtaattgcatctttctccatgtaattatggtgtaattatagccatataaatttcgctttttgtaaaaaaaaaaa

SEQ ID NO: 6546 - DNA, 1573 bp, Glycine max
aagacctattcacacatgtgctagtggaaccaataaccaaaccccaacacacacataacacaaacaacacagatcaagtttctcattccctagacagatcccaacaacaacatagacaacacagagaatgcacgcaaagacagactcagaggtaacaagcctcgccgcgtcttcccccacgcgctcccctccacgccgtcctctctactatgttcagtctccctcacgagactctcacgacggcgagaaaaccgcaacgacgtcgtttcactcaacgcccgttctcagcccctctgcctctcctcctcactcgcgccactcctcctccacgcgcttctccaagaaagaccatagccacagcctcaagccgtggaagcaaatcgatgttattgaagaagaagggcttcttcaaggggatgatcaccataacgggcttccacgtcggtgctactttctcgcgttcgttgttgggtttttggttctcttctccttcttctcgcttatcctttggggggctagtaggcccatgaagcccaagatcaacatcaagagcataaagtttgatcatgttagggtccaagcaggttcggatgcaacaggggtagccaccgatatgattacattgaattccactttgaaattcgcataccgcaacacaggcacattttttggggtccatgtcacatccacacccgtggaactgtcctattcagacattgtaattgcttcgggaaatatgaagaagttttatcaatctaggaggagccaaaggttggtgagtgtagcagtgatgggtaacaagatccctctatatggaagtggtgctagcctaagtagcacaacgggtgtgcccactgtgcctgtgctattgaacctcaactttgtgctacgatctagggcttatgtgcttgggaaattggtgaagcctaaatactacaaaaccattcaatgttccataactttggatccaaaaaagctcaatgctgcgatttccctcaagaaatcttgcacatatgattgatacatgtgacggagagcaagtgggaattatttgaaaaataataataataataaaaatattgttttatgattaatgtgttcttttgatgtgaggaaagaaatggtacagccagagagcagtgtgccaaggacgcgtttttgggactgcttgggctgcccaaattgcctcaaattgcggtaagacaaagacatgcatgttgggttcggtagagaaatgtaatcttgtgattgatcatttcatgaagacatttttttgggttgattatttgtccgattttaatttattaattgtaaaagtgacaggtaatttgaattcattcaatctcagtgttgtaattgcatctttctccatgtaattatggtgtaattatagccatataaatttcgctttttgattgagttgtttctatctgttaggtaaggtccatggtgagagtgcatgttcaggatcaggtcaacgggtcatgaattgatttcattcactatgtttttcaaaattaacattattcttacgttaatttgtaggaaaaaaaaatggatgattttgcccaac

SEQ ID NO: 6547 - DNA, 998 bp, Glycine max
actcgagccgattcccccccggccacaacatttacattactctctcactttctccaatatggcttcttctcgaaatgagttttatgcacttatgctagtggtggtggttggctccatagtggcttcctgtggtgctaacttcaaccaagactttgatctaacttggggtgatcagcgtgctaagatattcaatggtggtcagcttctatctctttccctggacaaagtctctggctctggcttccaatccaagaaagagtacttatttggaaggatcgatatgcagctcaagctcgttgctggcaactctgccggcactgtcactgcttactacttgtcgtctcaagggccaactcatgacgagattgattttgaattcttgggaaacgtgagcggtgacccttacattctccacacaaacgtgtttacccaaggccaagggaacagagagcaacaattctacctctggttcgaccccaccagaaacttccacacttactccatcatctggaagccccaacacatcatattcttggtggataacattcccataagggtgttcaagaatggtgagactattggcgttcctttcccaaagaagcaacccatgagaatctattctagcctgtggaacgctgatgactgggccaccagaggtggtttggtgaaaactgattggtccaaggcaccctttacagcctactaccgcaatttcaaagccacagagttctccaccaattccttctctgatgctgcatggcagagcaacgagcttgatgcctatggcagaagaaaactgagatgggttcagaagtacttcatgatctataactactgcaacgatcttaagcgattcccacaaggcattcctgttgagtgcaggcgctgagacctcagacctatttttcttttctccttctgctttattcatcatcaaaataaatcaaattcgttgtaccactttcttgatttttaaaaaatatgttttatggccgtac

SEQ ID NO: 6548 - DNA, 1438 bp, Glycine max
tggccaaacaaaaacgttccagctttcaaaacttgctaagctggcaccagcttttggtcccaccagccccagttattgctccttcacgcgtcccaccatagtcccatactcaaatccccacctccatttctctctttttcacacacttattcttccactcatacgcctgcgcgacgaccacactccctcacatcacaagaagcacaatttctctctttctttttgtgtccaaaatggctcctagttctactcacaatactgggttctatgtgcttatgctagttgggatagtgattagcactatggttgctacctgtgctggtagcttctaccaagactttgatctaacatggggtggtgaccgtgctaagatattcaatggtggccagcttctatctctttcccttgacaaagtctctggctctggcttcaaatcaaagaaagaatacctatttgggaggattgatatgcagctcaagctcgttgctggcaactctgctggcactgtcactgcttactacttgtcatcccaagggccaacacatgatgagattgatttcgagtttttgggaaacctaagtggggacccttatattctccacacaaacatcttcacgcaaggcaaaggtaacagggagcaacagttctatctctggttcgaccccaccagaaacttccacacttattctatcatttggaagccccagcacatcatattcttggttgataacacaccaataagggtattcaagaatgctgaatctcttggtgttccttttccaaagaaccagcccatgagaatctattctagcctctggaatgctgatgactgggccaccagaggaggattggtgaaaactgattggtccaaagcaccctttacagcatactaccgcaatttcaaagccactgagttctcactcaagtcttccatttcaaattctggtgctgaatatgaggcaaatgagcttgattcttatagcagaagaagactgagatgggttcagaagtacttcatgatctataactactgcagtgatctcaagcgattcccacaaggtcttcctgctgaatgtagacgctgaaggttccaagagatgaagagaatggccactttctgattggatttgaatcgtctatgtaaaatatgctatgtttattatgtcttagattctttattgacttctgtcttttttttcttcctttttttttagtttctattttatagttgctaatgtatatgtatattaaggggtcttaacaataaatcatattctttgtaccacttttcttgtcaatatgggcagttagtctcatcctagctcgtccacccggtgaaattgatcatgttggaatcaatttctatctgttcatataataaaaaggtgtagtcaagtttaatagaacagtagttgtggtactggcgttgcactttgct

SEQ ID NO: 6549 - DNA, 2068 bp, Glycine max
ccacgcgtccgaacgactgccacgggacggcggcaccggacgaccttcccattgtttcctcaccgtgaacaacacaacacctcagctacgtaggccccccccccaaaagcctaacgaaccctaattcttgattattcctcaattctttgttcccttcccatcttggggacacaaattcgccttcttcctcatttcgcaaacaaattcctcttccaagcatccccaattttcttttaatctattttttcgcctttttatttcacccatttaaacctgtggcttcttttcgacgccccccccccccatgtgtcagaatggattagtgtaaattattgaaagatacccatatataaaagcatgggtagtagtgacatggacaaaactccgaaagagaaggagtctaagacacctccagctacgtcacaggagcagtcatcaacaactgccatgccaacaactaatcctgactggtctaactttcagacatattctcctatacctccacacgggttcttggcatcaagtccccaagcccacccatatatgtggggcgtccagcattatatgcctccctatggcactccaccacatccctatgttgcaatgtatccccatggtggcatatatgctcatccatctattcctccgggatcttatcctttcagtccttttgccatggcttctccaaatggtattgcagatgcttcgggaaatgccccaggccgcatcgaagttggtggtaaacctcctgaagtgaaggaaaaattacctatcaaaagatcaaaaggaagtgctagtggtggtaatttgaatatgtggattacagggaaaaataatgaacctggtaaaataccaggagaatctgctaatgggattcattccaaaagtggtgagagtgcaagtgacggaactagtgaaggaagtgatgagaactcccagaatgattctcaattgaaatcaagggagaggcaggactcttttgaagatgaaccatctcaaaatggaagttcagtacatgctcctcaaaatggggtacataatagacctcagacagttgttaatcaaactatgtctatcttacctatatctaccacaagtgctcctggagcagttcctggtcccacaactaatttaaatataggaatggattattggggcacaccaacttcgtccaccattcctgcattgcatggaaaggttccttctactgcagttgctggagggatgattgctgctggatcacgagatggtgttcagtcacaagtttggctgcaggacgaaagagagcttaaaagacaaaggcggaagcagtctaatcgggaatctgcacgcagatccaggttacggaagcaggctgaatgtgatgaactagctcagcgtgctgaagctttgaaagaagaaaatgccactctccgatcagaagtgagccagatcaggagtgagtatgagcagctacgttctgagaatgctgccctcaaggagagacttggggacatacctggtgtcgcgacgcctgggaaggaggatcttaggtctggtcagaatgatcagcatgtgagtaatgacactcaacagagtggtcagacagaggttgtgcagggtgttcattaggatcttgcttcctgctgcatgttgctttttaggtagataacctaaccaagtagcaacagcaagttctagtttttggttcaaattgtattaaaggtgatcatatgtagtattaggatctatttatgtcatatgatccctcattcctaatttgtcatgtttatgacggccaaaaacttgtattgtagttagtgtgtgaatacttggttataccttctctgctacttcaaaagttagtgttagcagtaagaaagtatgattagtgaaactagttattgtccattatatggattgccgtgcttctgcgcaaataatttaatcaggaagatatattaaggaaatggaaatgaagttcagccctgagaaagttatggtttgagtatagccagtcaaccatcgtggattttataagaattttgtattgcattatgaattatgaatacataatcacctatttatg

SEQ ID NO: 6550 - DNA, 1875 bp, Glycine max
gagattactcaacaactctttttgagaaggaagcatcgagaaggtttcagttctacatttttttatgcaaacaaggaagaattcaaaggggtagattctgttgaaccagatccttctgggttctgcaagcaggttgccgtgttgtttaaagaatggtacaggatatgtgaatttcctggtgccaatgatacagcttcagcccacttcatcttacaattgcatcagaatgggctgcttaaaggggatgatgttacagatcactttttccgacaattgatggaactagctattgcacattgcttatccactgaggtgattaatttggggtcactgcaatctcaaccaccgacaatgtcatttcttgcaattgatatttatgcaaagcttgtcttctcaatcttgaagggatcaaacgaacttgtccgcctcgccaggccccccccccttactgtcagattcattataaaagatgcagaggagaagaaggcctcttttaatccaaggccacttttcagattattcatcaactggcttctggatcttggttcacttgagcctgttactgatggtgcaaaccttcagattttaactggttttgccaatgcatttcatgctttgcagcccctcaaagttcctgcattcagttttgcatggcttgagttgattagtcacaggagcttcatgccaaaaatgttgactggtaatggtcaaaaaggttggccttatatccaaaggttgcttgtagatctgttccaatttatggagccttttctgaggcatgctgaacttggagaaccggttcgtgtcctctataaaggcacacttagggtgctcttagtgctacttcatgacttcccggagtttctctgtgattatcactttaccttttgtgatgttattcctccaagttgcatacagatgaggaatatcattctaagtgcatttccgcgcagtatgaggctgccagacccatctactcctaatttgaagatagatttgcttcaggaaataacccaatcgcctcgcattctttctgaggttgatgcagcacttaaagcaaagcagatgaaggttgatgtagatgaataccttaagacaaggcaacagagttcgccgtttttatctgaactgaaggataagctgcttctctcacccaatgaagcagcctctgctgggactcgatacaatgtgccgttaattaactcccttgtgctatatgttggaatgcaggcaatccatcagctccagggacgaactccccatactcaaacgtcagcaaatgctttccccttagccgtattttctgttggtgctgcattggatattttccagacactaattgtggacttggacactgaagggcgctaccttttcctaaatgctattgccaaccaactgcgttatcctaatactaatacacactacttttccttcatccttctgtacttgtttgcagaatcaaaccaggaagttatccaagaacaaattactagagtcttgttagaacgcctaattgttaaccgtcctcatccctggggtctcctcattacttttattgagctgattaagaatcctaggtacaatttctggaaccggagtttcataagatgtgcgccagagattgaaaaactttttgaatcggtgtcaagatcttgtggaggtccaaaaccagtggatgatagcatggtttcgggttgggtctgattgtccattgtccatagtcttttctgcttgttagttctgtgtaggctagctaaccatgttagttaggactatttatacactcttgttaatctaacagtgctgtttttacattgtaaatgacgttttagttttagtgaaaactcttctttcaagaaaaaaaaaaaaaaaaaa

SEQ ID NO: 6551 - DNA, 1397 bp, Glycine max
tcagctacgtaggccccccccctacttgttttgtttgatattgttttaaaacttggttcctttgtgggaatgtttcatcagttttgcatggcttgagttgattagtcacaggagcttcatgccaaaaatgttgactggtaatggtcaaaaaggttggccttatatccaaaggttgcttgtagatctgttccaatttatggagccttttctgaggcatgctgaacttggagaaccggttcgtgtcctctataaaggcacacttagggtgctcttagtgctacttcatgacttcccggagtttctctgtgattatcactttaccttttgtgatgttattcctccaagttgcatacagatgaggaatatcattctaagtgcatttccacgtagtatgaggctgccagatccatctactcctaatctgaagattgatttgcttcaagaaataacccaatcgcctcgcattctttcggaggttgatgcagcactcaaagcaaagcagatgaaggttgatgtagatgaataccttaagacaaggcaacagagttcgccgtttttatctgaactgaaggataagctgcttctctcacccaatgaagcagcttctgctgggactcgatataatgtgccgttaattaactcacttgtgctatatgttggaatgcaggcaatccatcagcttcagggacgaactccccatactcaaacatcagcaaatgctttccccttagccgtattttctgttggtgctgcattggatattttccagaccctaattgtggacttggatactgaagggcgctaccttttcctaaatgctattgccaaccaactgcgttatcctaatactaatacacactacttttccttcatccttctgtacttgtttgctgaatcaaaccaggaagttatccaagaacaaattactagagtcttgttagaacgcctaattgttaaccgtcctcatccctggggtctcctcattacttttattgagctgatcaagaatcctaggtacaatttctggaaccggagtttcataagatgtgcaccggagattgaaaaactttttgaatcagtgtcaagatcttgtggaggtccaaaaccagtggatgatagcatggtttcgggttgggtctgatttcccgtagtcttttgtggttgttagtcctgtgtaggttagccaaccatgttagttaggactatttatactgttgttaatctagcagtgttgtttttacattgtaaattatgttttagtgaaactctcttctttcagatgttatgaccatgtacttgtttatattgcagcatgagtcttaattccaaatcaaaaaaaaaaaaaaaaaaaaatataaaaaaaaaaaaaaaaaaaaaaaaaaaaaaaaaaaaaaaaa

SEQ ID NO: 6552 - DNA, 2517 bp, Glycine max
ggtccggtccggattcccgttgccgccccacgcggccgaggaaagatactccgaagttgtttctaggggttccggtggagatgagattgcacaaacacaaactgaatagtacttagtcaaacaaatttctataatcccacttcatttcccttgacaacaatgcgattttgttgactcattcggattcttcacgctgcgtgcgtgcggatagataataagcgcagcggaacagaacaagtttgaatttctacttttcgaactcaataaccgaaaataaaaaacccaatcggaagcgatggagaggtctagatctaagaggaactactactatgaccaagattatgattctgagaccttggcaaggacaagaccgcgctataaccaccactacagcaccggcgggaaccaccgccaccgcggcggcggcgccgcccgccatgcaaagacccaacaggactcgccgttgacggtcaccactagctaccgcattctatgccacgacctgaaggccggtggcgtcattggcaagtccggcagcatcataaagtccatacggcagcacaccggcgcgtggatcaacgtgcacgagctcatgccgggggacgaggagcggatcatcgagatttccgacacgcgccgccgcgacccggaggggagaatgccgtccttctcgccggcgcaggaggcgctgctgctgatccacgagcggattctcgagagcgacgctgccttcggggtggcggaggaggacgaggagtacggcggaaggggcggcggaagggaccgcatcgcgacgaggctggtggtgtcgcggatgcatgtggggtgtttgttggggaaaggagggaagattattgaacaaatgaggatggaaacaaagacgcaaattaggatactccctagagatcacaaccttcctcgttgtgtttccatgtctgaagaaattgttcaggttgtaggcgatgtaaatgctgtaaagaatgctctagtaattatttcatcacggttgagggagagtcagcaccgtgaccgcagtcatttccatggacgtgtacattcaccagagcgttttttctctcctgacgatgattatgttcctcatgtgactagtggatctcgcagatcttctgttgatggggcctcttttggatcacgaggatctaacacaaatagtagaaataataaccacccctcattgaattatgcaatggagcctggggctgctcctgttgttgatgatgcgcagggcttttatggggaggaacttgttttccgtatactctgtccaattgagaaagttgatcgtattattggggaatcagaaggaattgtagagttccttcagaatgaagttggcgtagatgttaaggtcactgatcctgttggtggttcagatgaacagataattatcattacttcagaggagggtcctgacgatgagctgttcccagctcaggaagctttgttacatgtacaaactcgcattgttgatcttgttctagataaggacaatactataaccaccaggcttgttgtcccatctagcgaaatcgaatgcttagatggaaaagatgtttctctatcggaaataaggaggttgactggtgctaatattcaaattttgcctagagacgagctacctctctgtgttgcaaaaactgatgaactggtacagatcgtaggagagattaaagcagcccgagatgctgttgttgaggtgacttcaagattaaggagttacttgtacagggatttctttcaaagggacacagtaccactaccagctcccttacctggtgcggcggcatcttcttccaataatatagttccggttactgaaactcccacaacctatcaaaatctgcaaactgttgcagcagcccttccatcaaaggaaactggaggatctagcactgagacgggaaagcagaaagaaagtgaccgccgggatgatttgcttagtggtttaaataggattgctgtgcctcttgttacgaggagtacacttgaagttgttttaccagagtacgcagtgccaaagcttgtagcaaaatccaaaagcaagcttgcccaaataagtgagttatcaggagccaatgtaacccttgtagaggatagaccagacgtgacacagaagattattcagatatctggtactccagagcaggcagagagagcccagagcttgctccaaggatttattttgagcacacaagaagacggcccttaaactacctgaaattccgaaagctgggtagtgtcgttgatttagtgcctgaggcattttgttccatgcactgattggttttccatatgtttacaagattgttgtggccaagggttgaaattttcaatgtgagagaagcatctcactgtatatgttgtacaagagagcttcttagttttgttagtctttttagctagtgcatgggagcaattgttagctaccccctggatgttgttttccttgtttatctcatctaatattaatttgagtaagtaatactcacagcctgc

SEQ ID NO: 6553 - DNA, 799 bp, Glycine max
cccacgcgtccgtctacatgcagctgctaattttggacagtacccttatggaggctatatcctaaaccgtccaactcaaagcagaagattgctcccagaaccaaaaaccaaagagtatgatgagatggtcaagaatcctcaagaggcttttttgagaacaattacaccaaagttccagacagttattgatcttacagtgatggagatattgtcaagccattcctctgatgagatctaccttggacagagggacactccaaattggacctctgatcagaatgcaaaagatgtatttgaaacatttacaaaaacacttgcagagattgagaaaaaaatctcagaaaggaacaacaaccaagagcttaaaaaccgaactgggccagccaaatttccctacactgtgcttcttcctaccagtgaaccagggttgacttttaggggaatccctaatagtgtctctatctaaaggagtgtgtgtggcggcttcctttagtattgtacttgcatcttccaataaaatatgcatgcttatgagcatgcatcgttgtgtctgtgtttgttttaagttatgttatatgtattgcttcagctttccattccactgtacgttaagccggaataaataagctcagtggcagatttcctgttatgaccgggaaattctttttatttgagctttgagttttcttttgttcaaaacttattattattattattattatttactttttccttctgagaacccccacgggcaagtgtggaattacaatggaggcctcctaccccacgaagaatggtt

SEQ ID NO: 6554 - DNA, 1891 bp, Glycine max
cgagccggccgccaatgatgatgatctgaggaaccgtgtttgtctcgtgtctcatctcatccatgaagagaaggagaagaagggatccaaaatcagaagaaagttacgatttttcgagatgggtctgtccaaggagaatctgaaaggtctcatactagctttggtgtcaagtgggttcattggggcaagttttatcattaagaagcaaggccttagaagagctgcagcagtttctggtgtcagggctggtgttggtggttattattatctcttggagccactatggtgggtgggaatgatcacaatgattgtaggagaggttgcaaactttgttgcatatgcgtttgctcctgcagtcctagttacccctcttggtgcactaagtattattgtgagtgctgttttggctgacattattctgaaagagaagctacacaatcttgggatattgggctgtataatgtgcattgctggtagtatcattattgttattcatgctcctaaggaacaacctattacatctgttctggaaatatggaatatggccactcaaccagcttttctggcatatgtgggctcagtaatagtgttggttttcattctggtcttccattttgcaccaagatgcgggcatacgaatgtgctagtttttactggcatttgttcattgatgggttccctctctgtgatgagtgttaaagcccttggaacttctttgaaattaacttttgaagggaaaaatcagttaatctacccagagacatggttttttatgttagttgtggctatatgtgtcatcatgcaaatgaattatcttaataaggctcttgacaccttcaacacagcaattgtatctcctatatactatgtcatgttcacaacacttacaatactagccagtgtaataatgtttaaggattgggatggccaaagtggtggaactattgtgtcagaaatatgtggcttcatcgttgtgctctctggaacaataatgttgcatgcgactaaggacttcgagagaagctcttcttttagaggtagtgatcctttatcgcctacgctatctgcccgactttttaccggaaatggtgactcattacttaagcaagatgaggaaaatggatctcccgagagtaatatgcgctcaagaaggcaagaattgtattagatggttaaagatcttaatttatttaattgtagggggaagaagaagcctttccctggagaatctgaatgagatgcccatcagattatactacaccatgaagctgtaggtaccaatgaaaccataaaatgatggaagatttgtgaagccattcttttaccctgagcatcttaggaatttatcctcatagattttagttctgactttgaaagatggttctggaaccaatgcttacataatgtatagcttgtccaccgtttcttgtgtcatgaatggtttgttcactagtcaaaagtagctaatatgctccaaatagttattagattgagatgattagttgtatttgtgaggctctctttacatgaaccaaaaaagtgagtgggggatggagattattagtttgtgaaaattatatgcatggtgattttgctttctttttcaattttatttatttgttttctttgtcaatttgacttagcatagagagattcatttgtggtttgtaagtaatgagatatgtacaggaagctaagagacttccctcaatgttagtttgctatgaataagaaatatgtcctcattcttacattaaaaaaaaaaaaaaaaaaaaaaaaaaaaaaaaaaaaaaaaaaaaaaaaaaataaaaaaaaaaaaaaaaaaaaaaaaaaaaaaaaaaaaaaaaaaaaaaaaaaaaaaaaaaaaaaaaaaaaaaaaaaaaaaaaaaaa

SEQ ID NO: 6555 - DNA, 1839 bp, Glycine max
agtgcgcacaccatgacttgcgtgcggctagcgtaggagaaccctagcgaagaagacgagaacgagatcctctatacctctctctcccgtaagtggaggttcagccgttggatcatacaaaatggctctgataatctaaatgaattaaagtttcggtgtctcgcacgcacgcacgcttcatggatgacatgaacgagttgaggaagaagagaaaaaccgcagacgccgagtgagagccgaaacttctctcatggaatcgcaaacggatctgctgaaccgacccggaatcttcttaattggatcctctaacgtcggcaaacgcactctcctatctcgattgacctctgttgatgttgaaggtgctgcttttgattcggcttctcaagtgaatgtccatgggtggactattaacaataagtactacactgctgatgtttctatctggatggctcatctcaatgacgatttttctgctgctaacgtgcccgtgtttcgacgaatgactgcgctggtgatggtttttgacatgaatgaaccatcctccctagcagcacttcgagaatgggtatcccacactgatattcagaactttgagatattgctgtgtattggaaacaaagtggacctggttactggtcacccagcccatgctgaatacagaagacggttgctgaaacttgaagactctgctgcagatctttattcagaagagtatggaatatctgaattggagggaaccagtttattgggggatgaagaaccgtcatgggacatcagaagatcctgcttggaatggtgcactgatcacaatattgagttcattgaggcatgtggttcaaatgctgattttgacaaatgcttgtccatagatggtgatttacaaggagttgagcgtctctacggtgcactttctgctcatatgtggcctggaatggtattgaaatctggcgataggataaatcaaccatcatttcctgagaaagaagagttatcttcagaagaatctgattatgaacaagagtatgaagtcttatcagctggctcagccgattgggatgaaagtgaacaaggatgggtttctgcatcgtccttaggtgcagggggatcagctcctcaaaacaatcctggcacagatggtcaacatgaggatgaaattaaatctgataaagagtctcatcccacaacctcaagccctacaattcaggatgagagtgacaaggatgtggtgcacaatatcatggattccaaaggcgatgggaaggaaaacgaggctaaatgtctcgaattagaggatttggaacagttaatgtctgagattgggaatatgcgtgcaggcttaagattgatgcccgattttcaaagaagggatatggctgcaaagctagccatgaaaatggcttccatatttgggggagagagtgatgaagaggaaatttagtagatgttggatgttagctcaatgattctgttatagctgtaaggatagatagatcatagatgaatgccattgttggtaattttgttatgagccatcacatggaaggagacgaacaatctctgtttgcacaaggatcaggggttccttcatgtttctgccgtttatgctactctggtcactgctgatcatgatttaagtttaattactcctgtttttgtcatacactgtttaatagtccgtatcttatggagcagaacattttgtttttcttcaaaatttcatggtaatttacatggtgttttgaaaaactgtggcaggcagtagttgttacttgctgcaatgttatttgaaaaattaaacaataagtcaataacaatgaatatatgttatattagactttt

SEQ ID NO: 6556 - DNA, 1556 bp, Glycine max
aagataatcccttttggaatagggcagtagtagcactagcaccgtagcaggaggcaggaggcaggaggcaggaggcaggaggcgagttaccttttatcgtggagtgcagcagattgagagcacttggttacccttttcacttaaaaacaatgcgaaaccttttgtagccgaaggcaaactcaaataaccatgtccaccaccacaatcccttcatccctcttatctcccagcctatcctccttcaaactctcgttcccttccaccaaactccaacccttgagtccccaattcagacgcaaccgtattggcttttccttttcttcccccaccttctctccgtggaagcgtttcgctgtaaacgacaacaacaaggagagtgacaacggcgatgttttgactgggttggatgaagtggagaaagaggcgcgtggaaatagcaccatgcccgaacgctttaggtacctcgccaaagaagttccgagtcttcctgttaggtggccatggcttgtggtactggcttttctggtctatgcttggagagctgttctatttgaactgtcaaactggaagaatggtgcatttgcaattgttcgttttttaggatacctcttgaaatatgcttttgcagtagtctaccaattcataggaagtccaatcacattttctattagatgcatagaggatttattttacacagttcgggcttcttactcttggataattcacaatgctcctgtaccagacctgaccatcatcattatgctggcatcaattgttttagctattggtgaagctactgtaccaaactccatcaacgaccaacataatgttttgactgtatctggtcttattggctatgctgctgttagaggatatatttctgaactttttttctggaccattctgcttggggtgtatgccttttcaaaatttgtcaagaagagagatgatgtttcagctgcaatgcctgttgcagctgtgcttgctggtgttggggagccttgggttagagctttggtgattatttcatacactgccttagccatatatcagtattccaaaacgtccacaggagggaaagaagttggagaagttgaaacaagacagatgaggcttccaattccacttcttcttgcatcttttgctattggtttgcgggttgctgctaagtgggttgggtatcggcacttgacatggatgagcagatgactgctgagaatcgtgtatctgtgtctaggaaagaatgaattctggtggtctatatagttgaggtaggattatgatatggatggataggggtttattttgttctccatgatgcaattattgtagtgttcttttcatgcttttaaataagcagtgaatcacaaggctgtgcctgagaatataagttcttgtcagacttcagtaaatgcattttgcaattttgatttgtggccagtgcagcctagatcttatttgtcataccaacattgagttttgtgtttgaaattttgtagagaattattggaatgaaatgcaagagaaagtgatggaatagaaaaggaatttggatt

SEQ ID NO: 6557 - DNA, 1405 bp, Glycine max
cgggtaccgggcccctcctcgtcgcggctgcgtcggccccccccccccccttatgccttcgtgcttcgcattgtgcttttactggtgattgcttggatgactctccttgtcttcaactctgctctgatagttgtaccaatttcacttgggcgggcacttttcaattctattcctcgccttcccataactcatgggattaaatgcaatgatctgtatgcatttatcattggaagctatgtgatctggactgctgttgctggagttagatactcaattgagcaaataagaaaaaggagatcttcggttttgtttggccaattatggaagtggtgtggcattcttgtgaagagttctgcacttctgtctatatggatatttgttatcccagtgcttattgggcttctctttgagcttttggtcattgtgccaatgagagttccagtggatgaaagtccagtattcctcctttatcaagactgggcattaggccttatatttctcaagatatggactagattggttatgttggaccacatgatgccgctggtggatgaaagttggcgagtcaaatttgagcgagtgagagaggatggtttctccaggctgcaaggtctttgggtccttcgggaaattgtacttccgatcataatgaagctgttgacagcattgtgtgtaccctacgttttggccaaaggtgtatttccagtgcttgggtatcccttggtaataaattctgccgtctatcggtttgcatggttgggatgcctctctttcagttttgtgtgcttctgtgccaagagattccatgtctggttcacaaatctccataattcaatacgcgatgaccggtatctgattggccggaggttgcataactttggagaacatgctgagaaagcaaatgtagcagaaacttctacaggggagcaggaagctattttactaggtacaggtttaaaccaacaagatcacgaagcagatgttggactacggttgaggcacgtaaatcaacaggtgggctgaattgtattttcagggaggaaggccactgtgtaggttgtgaagcctcgtgctgacatggttcatgaatcactgatgtatactctacacttgtgttgggttagttataatacctcgtcatgacacacctgtgcttatagttaacgttaaacattttgtgcgtgtcgtttaaaatttagctaataggaggaaaataaaattgttgatagcgcatttttttttcaaagaaattctttgtgaaatagggaagctggtcttgatcgtctgtctgagatatacttaaataacatagttatagtagttaattgttatggtaattatttattaatcagtactgcgcttcgctcggtgcgcccaccttcgacggcatcatgttcatacggtt

SEQ ID NO: 6558 - DNA, 1865 bp, Glycine max
  misc_feature (140)..(140): n is a, c, g, or t
tcttggtgtctatttgattggtaacatgacagctttgatagtcaagggatcaaagactgaaaagtttagggacaagatgacagaccttatgaaatatatgaacagaaataggctcggtcgggatatccgtgaacagatanaaggtcatgtgggtatacatatgagagtggctacactgaggcttctgtcattcaggatatccctatatctattcgagctaagatatcccaaacattatatttgccgtacattgaaaaggtttctctttttaagggatgctcttctgaattcagctacgtaggccccccccccagattgttattaggctccatgaggagttctttcttccaggggaagttataatggaacaaggaaatgttgtagatcaactatattttgtatgtcatggagtactggaggaagtaggcatagctgaagatgggactgaagaaactgtttcacttctgcagcctaacagttcattcggagaaatatctattctttgcaacattcctcagccatatactgtccgtgtttgtgaactgggtagactcctgcgacttgataaacaatcatttacaaatatcctagacatatacttttatgatggaaggaaagtattaaacaaccttctagagggaaaagaatcttttcgagataagcagttggagtcagacatcacatttcatattggaaagcaagaagctgagcttgctttgaaggtcaatagtgcagctttcaatggggatatgtatcagctaaaaggtttaattcgagcaggagctgatcccaacaaggcagattatgatggaaggtcacctttgcatcttgcagcatctagaggatatgaagatatcacacttttccttattcaagaacgtgtagatgtcaatattatagataacttcgggaacacacccttacttgaagcagttaagaatggacatgatcgggttgcttctttacttgttaaagaaggggcctctatgaagatcgaaaatgctggtagttttttgtgtactgcagttgcaaggggagattcagattatcttaaaagacttttatccaatggcatggatcctaacttaaaggattatgattaccgaagtcctcttcacgttgctgcagctgaaggtttatacttcatggcaaagttgctattagaagccggagctagtgtttttacacgagacagatggggaaataccccgcttgatgaagctcggatgtgtggaaataagaatctgatcaagctactggaagatgcaaaatcttctcaactgtcagaatttccatcccaagaatttacagataaaatgcatccaaagaagtgcacagtgttccctttccacccgtgggatccgaaagataatagaagacatggaattgtattatggattccacactctatcgaagagctaatcaaatcagcagcagaacaaatagaaatttctggcggttcttgtattttatcagaagatgctggtaaaattactgatgtggacatgatcaaggatggtcagaagctgtatttagtccatgaaacacattaggcctccatattatggctctttacaaccatataattaagtgccttgtaatgtgttgtgctttctacaaattagcacgtgatttgatcttgttaaccgctcaaaaactgtcttatatatcctgtcaaaatacagacgggtgatgaagatcaatactgcttagtgttgataccgtgatttcaatactgcttagtgttggtcatccattttgctattcagtattggctcggaagatttctttgtttttcttgtctgagcattaatattaattaagagatagttaattgaaacaaaaaagaaaaaaaaattattgtg

SEQ ID NO: 6559 - DNA, 1749 bp, Glycine max
tcgagtcagctacgtaggccccccccccccaattaaaccctagtttagagaaatgacattgcaacttatgattgcagccataagaataagaaccaacactgcaaccttaaaccccaaatgttcctcctcacacgccttacccgccaaaacccctcacgcgccacgctcctcacgcgccacctctcctcagccgcgtccaaactccactccaattacaccttcaaaccaccgtcttctctccctccccagccccaatgctccaatttccctccctccaagcccaaccagaaaaagcccaagcccaggtatcggcccccctcctccctcgaccaggccggccgcaagcccgtccggtccaacgacctgcccttcgacttccggttcagctacacggagagcagtgccaaggtgcgacccatcgggctcagggagcccaagtactcccccttcggaccgggccgggtcgaccgcaagtggaccggagtgtgcgcccccgcggtggaccccacggtggagagcctggagggtccggaggaccctaagttggaggaacagaggaagaagaagagagagatgattcaaggaaaaccgctttctagtgaagagagaaagacattggtttcgcaatttgagagaagcaaaactaatagacatgtcaatctcgggagggatggtctaactcacaacatgctgaatgttattcataatcattggaaatttgctgaagcagttagaatcaaatgcatgggtgttccaactatggacatgaataatatttgtacccagcttgaggacaaaacatttgggaaggtcattttcagacatgggggtacacttatactatacagaggcagaaattataatccgaaaaagaggcctgtaattcctgtcatgttgtggaagccccatgaacctgtatatcccagactgattaagacaacaattgatggcttaagtattaaggaaacaaaagaaatgcggaagagaggactatctgttcctgctttaacaaaacttgccaaaaatggttattatgcttttttggtacccatggtcagagatgctttcctctcctgcgaattggttcggatagactgcgagggacttgagaggaaagattacaagaaaataggctgcaaactcagggacatggtcccctgtattctggtgacttttgagaatgaacaaattgtggtttggagggggaaggattataagcccccgaaggatggatactttctcaaagatcgagaatcgtttgacgacgatgatgacttttgtgtgggaaaagagcaacaggctatgtaacacaccacaatcagatgtgataattaagtggaatctttgtgcaaattgctgccatgaatcagaagttcccttgagattggattgttgtgttctgtgtaaatgcagtcaatgatgaaatttgagatatttggatataacaagatatatctacactgttctttttccatgactcattgtaggcctttaaagttgtaaggaaaaatctgaatatataggatgagtttctaaccatatactggctatttaaactgcagagcttcagatattgggggtttggatttttcatattctctatgatctacaaatggtacacacagctgtttgttaggaatcacagattggaggtgtttatttagagtttttgcccattgtttttgtcacaaattcacaacagtcaattaggaatcaattcatggttttgccaaaaaaaaaaaaaaaaaa

SEQ ID NO: 6560 - DNA, 1374 bp, Glycine max
tcagctacgtaggccccccccccccccgtaatgtgtatgtgttgctcttctctctctctttcactttctattcacgctttctaatatcttgtttccgtgtggtagcatcattgcaatagccaagagatagaagggaaaagtgggaacacacagaaagccagagaaccagagagagagagagagagagagagagtgtgcttctctctgcacttgcactattgcaggcctcagctttgtttggttttggattgagaaagttgatatagttagagaaagagaaagtgtacatctttctatcatatagtgtatatatatatatatatattgcgtgtgtgagagatgcagcagcacctgatgcagatgcagcccatgatggcagcctactaccccaacaacgtcaccactgatcacattcagcagtatctggatgagaacaagtccttaattctgaagattgttgaaagccagaattctggcaagctgagcgagtgtgccgagaaccaagcaaggcttcagagaaatctcatgtacttagctgcaatagctgattctcaaccccaaccacccaccatgtctggtcagtaccctccgagtgggatgatgcagcagggagcacagtacatgcaggctcaacaacaggcacagcagatgacaccacaacaactaatggcagcacgctcatctcttttgtacgcacagcagccgtactcagcacttcaacagcagcaagccatgcacagtgcactggggtcgagttcggggctccacatgctgcaaagtgaaggcagcaatgtgaatgtgggaggagggtttcctgactttgtgcgtggcggcagctccacaggggagggtttgcacagtggtggaaggggtatcattggaagtagcaagcaggaaatggggggttcaagtgaaggccgcggtgaagggggtgaaaacctctacctcaaagttgctgatgatggaaactagctagctagccacccaaaatgaacaagcttttcttagtttaattagttaggaagacatcaagggatagtagcttgctgctgctgcttatatataatgtgtgcttcaacttgaggcaaacgcttgccttgatgtctctacattactattagtaacataaattagcacatcttctacttccttgcctaaatttctgatcacataacctgtttttctcatctccgaggtcggattagatttggtttcacatttatagtagtatcagtctttacatttcatatgatatttattttaatttttaagtatttttaaattaaaattttaacttatattaagtttacaataaagaaatatttttataaataagaatgtatttttagatttattaaaaaaaaaaaaaaaaaa

SEQ ID NO: 6561 - DNA, 1370 bp, Glycine max
  misc_feature (21)..(21): n is a, c, g, or t
  misc_feature (64)..(64): n is a, c, g, or t
  misc_feature (66)..(66): n is a, c, g, or t
tcgagtcagctacgtaggccntaccccccgacaccattctcttctctctccctgtgtttgtccncntaaataatatcagcttcctcggcccccccgcatcactgtaagacaaggtaaaagcgggaccagagagaaaacagggggatttgtttctctctgcagttgcactcttgcaggcaggtgcagctgtttcccgttctgctcctctcccaacccctctgtttctttggagtgagaaagttttatactttagaaccagctagcgagcaagtgagcgagtgtcatacatatatataaatagcgtgcgagaaatgcagcagcacctgatgcagatgcagcctatcatggcagcctactaccccaacaacgtcaccactgatcacattcaacagtacctggatgagaacaagtccttgatcctgaagattgttgaaagccagaattctggcaagctgagcgagtgtgcagagaaccaatcaaggctgcagagaaatctcatgtacctagctgcaatagctgattctcaaccccaaccatctccaatgcctggtcagtatccttctagtggacttatgcagcagggagcacactacatgcaggctcagcaggctcagcagatgtcacaacaacagctaatggcttcgcgctcctcactcttgtactcccaacagcctttctcagtgcttcaacagcagcaaggcatgcacagccaacttggcatgagctccaatggaagtcaaggcctccacatgttgcaaactgaagccactaatgttggaggcaatgcaaccataggaaccggaggaaggtttcccgactttgtacgcattgctagtggcaagcaagatattggaagttctggtgaaggccgaggaggaagctctagtggccattctggtgatggtggtgaaacccttaattacctgaaagctgctggtgatggaaactgaactagccagggagaatggtaaaagtttccttggcctttttagccgtttattgagttaggagaattaagtaggggaagggaaggaggaaagggaaaagttgctgcttagatatcttgtttgttaatcttgtgctgaaggcaaactgccttaacgtttctgtagtagtactagtaagtaacatgatgcatgctttaatttttcttgtgtaaagttctagtcataaatgtcaaggtcacaagttcctcccctttcaaaaaaaaaaattgttgtccaagaggaatatttggtgaaggatggtagatgcaattttgacgatgttcctgctttaaggagtttgatgcatcaaagttcaatcgcaacctaaacccatcatgccacgggaaataactaataattgattttgcaacttggtggtggatc

SEQ ID NO: 6562 - DNA, 1105 bp, Glycine max
  misc_feature (1067)..(1067): n is a, c, g, or t
atccctcccaatgataccggttttctattgttcctccggtttcgggtatccttcggttttgactctttcttgcttattgaaaaccatccaacagtgatcacaacctctcttgctgacataagatccaccgtggagtacattacctccttggatttcactgcaattgagtttcggcgtatggttggcatgtgccccgagattctgaccacccaagtctcagacctcatacctgtcttcaccttccttcatcgtgaggttcatgtgcctggctcggatattaagcgtgtaataaatcgtcgtcccaggttgcttgtctgcagtgttagtaagcgacttcgtcctaccctgtacttcctccaaagtattggcatagaagaggtaaacaagcacactgacttgctatcatgtagtgttgaggaaaagttcatgcccaggattgattactttgagaatattgggttttctcgccgtgatgcaacttcaatgttccgaagatttcctcagctattttgttatagtattaaaaataacttggagcctaaatacagttactttgtggtggagatggggagagatctgaaggagctgaaagaattcccacagtatttctcatttagcctagagaataggattaagcctaggcataaacagtgtgtagaaatgggggtgtgttttcctctccctgccttgttaaaaacaagtgaagtgaaatttcaaagtagattagacgtatgtgtaaattcttcaacccccttgaaaacatcccctctgtggtctgctggctgtgatgtttatgacgtatagaataacatttgcattgtatatttaattgcttttgtgaatttctaaaacagccattaggtgcttttggcctttcactatggaaaagttaatcagtcatgagccatcccttccaagcccttgtttgtattatgtgtgaaacgaagctttgcatgatttccaaagcaaacaaatttagctagctttggccataactcgtttctaatgagatagtagtacaaacggactctaacaagttggaatattggtgaaacaatgtccactgngtctgctttgctttggtactgtgacatgccaagtttaa

SEQ ID NO: 6563 - DNA, 826 bp, Glycine max
acacgccatcgatcctattgctctattattttcaccactactcagagttgttcatagccataccacaccacaacacaactcttgttcttccttgtttctctttctcccattatccatttagagaccccaaatggcctctgccaccactctcttcacccctaaccccatgttttcaactgaacaccactctctctctccatctccaaccattcccaaatccttcactggcctctgcaagcccttccattcaagggtccccacttccatcccctccttccattgcagaagacccaaattctttgtcagggccactgttataaagtggagatgtccaaagcaaactatccctcccgatgataccggtttccaaaagaaactcctgtatctggaatcaatcggtattgactctttctcgcttattgaaaaccatccaacagtgatcacaacttctcttgctgacataaaatccaccgtggaatacattacctccttggatttcaccgcaattgagtttcggcgtatggttggcatgtgccctgatattctgaccacccaagtctcagacctcatacctgtcttcaccttccttcatcgcgaggttcatgtgcctggctcgcatattaagcgggtaataaatcgccgtcccaggttgcttgtctgcagtgttagtaagcgacttcgtcctaccctatacttcctccaaagtattggcatagaagaggtaaacaagcacactgacttgctatcatgtagtgttgaagaaaagttcatgcccaggattgattactttgagaatattgggttttctcgccgtgatgcaacttca

SEQ ID NO: 6564 - DNA, 2130 bp, Glycine max
cccacgcctccgacaagctaggatcaatccagaagatgcgtatgctggtacttacactcattgtgaaatccacccatcactgattttcggtgtatgtgcttccatcataccatttcctgatcacaatcagtccccacgtaatacttatcagtccgcaatgggaaagcaagcaatgggaatatatgttaccaactaccagtttcgaatggataccttggcctatgttttatattatccacaaaagccactggtcactacaagagccatggagcatcttcatttccgtcaactcccagctggaattaatgccattgtagccattgcctgttactctggttataatcaagaagattccgtcatcatgaaccaatcgtcaatagaccgtggattctttcggtctctgtttttccgttcatatagagatgaagagaagaagatgggaaccctggtcaaagaagattttggccgtcctgatagagctaacaccatgggaatgagacatggttcttatgataagctggatgatgatggtcttgccccaccaggcacacgagtatctggtgaggatgttatcattggaaagaccaccccaatatctcaggaggaggcacagggacaagctttacgttacacaaggcgtgatcacagcataagcttacgtcacagtgaaactggaattgttgatcaagttttgctgaccacaaatgctgatggattgagatttgtgaaagtaagagtgagatctgttcgtataccacagattggtgataaattcagtagtagacatggtcagaaggggacagttggtatgacttatacacaagaagacatgccctggactgtggaaggcattacccctgatattattgtcaatccacatgctattccttctcgaatgacaattggtcagcttattgagtgtatcatggggaaggtggcagcccacatgggaaaagaaggagatgcaactccttttacagatgttactgtggacaatatcagtaaagctctacacaaatgtgggtaccaaatgcgtggttttgagactatgtacaatggtcatacagggagacgtctaagtgcaatgattttccttggccctacatattaccaaagactgaagcatatggttgacgacaagatccattctcgtggaaggggtcctgtgcagatcctcactaggcaacctgctgagggacgctcacgagatggaggtctccgatttggagagatggaacgagattgcatgatagctcatggagctgctcacttcttaaaggaaaggttgtttgatcaaagtgatgcatacagggtccatgtatgtgagcgttgtgggttgatagctattgcaaatctcaagaagaattcttttgagtgcaggggatgcaagaacaaaactgacattgttcaggtttacattccttatgcttgtaagctcctcttccaagagttaatggctatggcaatagctccaagaatgcttacaaaggaggtcaaaactacaaaccaaaagaagaagggagcctgataaacatgtttgaccaaagccacttgtcttatattctgattaaaagctctcgagaatatggaacaaacatggtatctaaatatacaaatttgatttgataatgtttttcaagtctcaaattacaggaacctttcaagtgttgggtaattcacaagcaaaaatagctttgataccttcattattgatgtttcccgctgcgttttctctattcaagggtgctcattccaagcgactaatgttaccgaccgagcactgtatatataatggaagtttttcaattccgagagcttgtttcttattcactaagcagagatgggttagcagaagtttctgtcgcgtaattctagtgagccccgtcttaaatgctgtgaaaggtcttatacccaatcaaccgagaattccagctccaattttggaaatccttttgttggtttagggggaggtcacccgaattggattatttaaatttagttgcaatgcttgagagctatggtatatggtacttgtaactcgagactctggcaattttaagttcaattcttgtacaatatagtgaaatgagagaatttatttgacaaagttgatttgtgagttttccattt

SEQ ID NO: 6565 - DNA, 504 bp, Glycine max
acctcctcattctagccaggcgagagcaaaaggtagggtttccagttgcaagccgccccgccgccgccgccatgggacactcgaacgtctggaactcgcaccccaagaactacggccccggatccagggtttgccgtgtctgcggcaactcgcatggcctgatccgcaagtacgggctgatgtgctgcaggcagtgcttccgcagcaacgccaaggacattggcttcatcaagtaccgttaagaatggaaacctcaaaggaagcaaggactaggaaattatcaacgaactgtggtgcttcatcgaggctgatctttatcctataagctatgtaatgaactactattatgtttgaatcctggtgacaaaaccgtgaaaccatgttagtgactgctgtttgagcatgtgaaaccgataattctgttactgtcgtgccattatggttagaaggttgctctgcatccttatatttttattattttgtgaaaaaaaaaagccgaccatg

SEQ ID NO: 6566 - DNA, 2304 bp, Glycine max
ggctcgagctcattcgtaatcccaaacacttcgtttcgaagtgaaacgaagtgttgctatcaacggaggagcgcctccaccggaacaaaactctccggcgatagttccgccaaacctctttcgttctccggcgcgatcgtggattcaatcgcccgtttccagtttctcattctagttgatcgagttcgtagggttttatggtgcttccttggacacacggtggcgatttgcattactcagtgggtggtggcacggtgaattattgagtctgatcatactcgtttttaaaaatcagagagaaatgtcttatcagcataaaagcttttggatgccacgggatgctggctgcatggctgaagaaaatgcgggatatgaaaattcttccagaattgaacccaagcgcagtcatcagtggtttatggatacaggtgaacctgaaatattcagcaacaagaaacaagcagttgaagctgttagtggcaggccaatttctggagtttcacatgcaaatgtttcccaatgggacaccaattcaggatttcactcagtcacaagtcaattttctgaccgtctttttggatctgatcttgctaggactgtgaatttggttgataagaatgtgccatctattgtaagtggaaatctgaacatgggaaggaaagattttgagcatcaatatggtaatgatccttctgtgggattgtcaatatcccattccatagcagacccttcatcatgtctcaattttggtggcatcagaaaagttaaagttaatcaagtcagagattctgacaactgcatgcctgctgcatccatggggccctcctatagtagggaagataatagtacaatttcagtaggtgctggctacaataagaatgatggcgacaatatttcattgggtcctacttataacaatggatatgacaacaccattgctatggggagcagaattagtaagactgatgacaatcttctttcaatggctcacaccttcagtaaaggggatgggggttttatgttgatgggccacaattatggcaagggagatgaaagtatcgtatcaatgggtcagccctttgacaagggagatggaaatttcatatcaatgggtcaatcatatgagaaggaagatggcaatttaatatctctgggcacctcatataccaaggtacatgaaagctttataccagttggtccaacctatggtaaatcaggagaaaatttcataactgttgctccttatgacaagggtactaatcatataatatcaatgggtccaacatatgataaggtggattcaaatattgcatcaacagttccatcatatgacagaggagattctagttccttacctgtgggtcaaaaccaccataagggtcagagcagttccatatctttcggaggttttcatgatgaccctggaccaaatatccctagcggaatcattagtggctatgatctgttgataggaagccagaactcagctcaaggtatggatagccagaacgacctgactgagacaaacactgaatcacttgtaaatagcattccaaaacccaatactaaaaatgatattgttaagaacaaagagcccaagacaaccaagaaggctcctactaacaacttcccttcaaatgtcaaaagtctactgtcaactggtatttttgatggtgttcaggtgaaatatgtttcatggtcacgggagaaaagtcttaaggggatcataaaaggaactgggtatttgtgttcatgtgacaactgcaaccagtcaaaggctcttaatgcatacgagtttgagcgtcatgctggtgccaagacaaaacatcctaacaatcacatatactttgagaatggaaaaaccatctatgctgttgttcaagagctgaaaaacactcctcaggatatgctttttgatgctattcaaaatgtgactggctctaccatcaaccaaaagaactttcgaatatggaaagcatcataccaagctgctactcgggagcttcagcgtatctatggaaaggatgatgtggtcattccgtcttgagttcccttttcttcttaaaagttcagaacagtggtagatatgtaatctgttcatagtgagtgattggcaggttaatattttaaaagactacttaaaattgaaaagttttagccaatgcttcttgtaggaacttgattgttttattaatagtaatgaagatgtctttttgtggttcagttgcaaaaaaaaaaaaaaaaaaaaaaaaaaaaaaaaaaaaaaaaaaaaaaaaaaaaaaaaaaaaaaaaaaaaaaaaaaaa

SEQ ID NO: 6567 - DNA, 2175 bp, Glycine max
cccacgcgtccgcgggcgcgtgcatttatagaaagaaaaaaaagaagaagaaagagttctgaccatggctgcatcattatttatgccttcatccatagtggacgaagaagcgaggtttgaagccgaagtggcggaggtgcaagcatggtggaactctgagaggttcaggctaacaaaaagaccatacacagcaagagatgtggtgtccctccgaggcaacctcagacaaacctatgcctcgaacgagatggcgaaaaagctctggtgccttctgaagaaccaccaagccaacggcacagcctcaaggacttttggtgcacttgatcctgttcaggtcactcaaatggccaagcacttggacacaatctatgtctcagggtggcagtgctcagccacacacaccacgagcaacgagccgggccctgaccttgctgattacccttatgatactgtcccaaacaaggttgagcacctcttctttgctcagcagtaccatgacaggaagcaaagagaggagaggatgagaatgagcagggaagagagggcaaggaccccttatgttgattacttgaggccaatcatagctgatggcgacactggttttggtggtaccacagcaactgtcaagctttgcaagctatttgtggagagaggtgctgccggaatccacattgaggaccagtcttcagtgaccaaaaagtgtggccacatggctggaaaagtgcttgttgccatcagtgaacacatcaataggcttgtggctgcaagacttcagtttgatgtcatgggggtggaaactgttttggtggcaagaacagatgcagaagctgctaatttgattcaatcaaacattgacacaagggaccatcaatttatcttgggagtgaccaaccccaaccttaaagggaagagtttagcaactcttatgcaacaaggcatggctgctgggaagagtggagctgagcttcaggctttggaggatgagtggctctcaaaggcacagttgaagactctctcagaagcagttgtggaggcaattgagaggcagaacattggagaggaagagaagagaaggaagctgaatgagtggatgcaccattcaagctatgaaaggtgtctttccaatgaggagggtagggagatagctgaaaagttaggagtaaggaacctcttttgggattgggacttgcctaggactagagaagggttctacaggttcaaagggtcagtgattgcatcagttgttagaggttgggcttttgctccacatgctgatgtgatatggatggaaactgcaagcccaaatgtgattgagtgcacacagttttctgagggggttaggtcaaagcaccctcagatgatgctggggtacaacctctctccatctttcaactgggatgcttctggcatgagtgatgaacaaatgagggacttcattccaaagattgcaaagttggggtatgtgtggcagttcatcacagtgggagggctgcattctaatgcactcattacttcaacatttgcaagggattttgccaataggggaatgctagcttatgtggagaggattcagagagaggagaggaacaatggggttgacacacttgctcaccagaaatgggctggtgctaactactatgataggtatctcaagactgtccagggaggtgtggcttcaactgctgcaatgggaaaaggagtaactgaagagcagtttaaagaatcatggactaggccaggagctgtagaaattgatagaggcagtattgtggttgctaaggccagaatgtgaaagtgctacttttgcagaactatactgccgagagtggaacttggggaaaattcaccaatttctgtgttggattggaatttggaataaatgtcctcaataattgaagtattaaacgggccattgaatcattctgctatttttgccttcataatttcttatatttcttacttgttcagactcttggccatgtgggcaaggagaacaaggaaaacttgtttttctgtgttttgtaatttgttttactcctactgttaaacatattttacttatagtgtatatttggacatgcaattgtggacaaggagcacaaagaaatctggttttactgttttgtaatttggaaaaaaaactccccggactatattttacttggtgcttattcg

SEQ ID NO: 6568 - DNA, 2085 bp, Glycine max
gttatataacatttatacaataaaaaaaaaagagttctggccatggctgcatcattatttatgccttcatccatagtggaggaagaagcgaggttcgaagccgaagtggcggaggtgcaagcatggtggaactctgagaggttcaggctaacaaaaaggccatacacagcaagagatgtagtgtccctccgaggcaacctcagacaaacctatgcctcgaacgagatggcgaaaaagctatggcgcctcctgaagaaccaccaagctaatggaacagcctcgaggacttttggtgcacttgatcctgttcaggtcacccaaatggccaagcacttggatacgatctatgtctcagggtggcagtgttcagccacacacaccacgagcaacgagcccggtcctgaccttgctgattacccttatgacactgtcccaaacaaggttgagcacctcttctttgctcagcagtaccatgacaggaagcaaaaagaggagaggatgagaatgagcagggaagagagggcaaggacaccttatgttgattacttgaggccaatcatagctgatggtgacactggctttggtggcaccacagcaactgtcaagctatgcaagctctttgttgagagaggtgctgctggaatccacattgaggaccagtcttcagtgaccaaaaaatgtggtcacatggctgggaaagtgcttgttgccatcagtgaacacatcaacaggcttgtggctgcaaggcttcagtttgatgtcatgggggtggaaactgttctggtggcaagaacagatgcagaagctgctaatttgattcaatcaaacattgacacaagggaccatcaatttatcttgggagtgaccaaccccaaccttaaggggaagagcttagcaactcttatgcaacaaggcatggctgctggaaaaaatggagctgagcttcaggctttggaggatgagtggctctcaaaggcacagttgaagactctctcagaagcagttgtggaggcaattgagaggcagaacaacattggagaggaagaaaaaagaaggaagctaaatgagtggatgcaccattcaagctatgaaaggtgcctttctaatgaggaaggtagggaaattgctgaaaagttaggagtgagaaacctcttttgggattgggacttgcctaggactagagaaggtttttataggttcaaaggttcagtgactgcatcagttgttagaggttgtgctttttctccacatgctgatgttatatggatggagactgcaagcccaaatgtggttgagtgcacagagttttccgagggggttaggtcaaagcaccctcagatgatgcttggatacaacctctctccatctttcaactgggatgcttctggaatgagtgatgaacaaatgaaggatttcattccaaagattgcaaagttggggtatgtgtggcagttcatcactgtgggaggtcttcattccaatgcactcataacttcaacatttgcaagggattttgccaataggggaatgctggcttatgtggagaggattcagagagaggagaggaacaatggggttgacacactagctcaccaaaaatgggctggtgctaattactatgataggtacctcaagactgtccagggaggtgtggcttcaactgctgcaatgggaaaaggagtaactgaagagcagtttaaagaatcatggactagatcaggagctgtaaacattgatagaggcagtattgtggttgctaaggccagaatgtgaaagtgctacttctgccgaactatgctgcatgctgagagtggaacttaatggaaaattcaccaatttctgtgttggattggaataaatgtcctcaataatataaacaggccattgaatcattctgctattttttcctgcataatttgttacatttcttactagttcagactctttagccatgtgggcaaggagaacaaggaaaacttgtttctgtgttttgtaatttgttttactcctactgttaaacatattttacttatagtgtgtatttggacatgcaattgtggacaaggagcacgaaatcttgtttta

SEQ ID NO: 6569 - DNA, 533 bp, Glycine max
  misc_feature (487)..(487): n is a, c, g, or t
  misc_feature (489)..(489): n is a, c, g, or t
  misc_feature (492)..(492): n is a, c, g, or t
aatttcctcacgcctttccccaccttccgtccttcccccgtcgtcgcggctccagctagggtttctcgcccccgccctcccgcctcaccgccggccccgtccgccatgtcgaagcaaggagggaaggccaagccgctcaagcaggccaaggtcgccgagaaggactacgacgagaatgacctggcatacctccagaagaagaaagatgagcaaaaggccctgaaggagctgaaggccaaggcaggccagaagggtgcgctgggaggatccggtctcaagaagagtgggaagaaatgagtctgcccacccattcgtaatacccagaaaatgataatctatctatctacctatctgtgtcgcgcttcactctctgtggttgtaacagactaccttcagttgtgttgagcattgtgcatcgtcgcagtacgtcgctgaaacctatggcatgtcagcagcctcttctgcttatctgtgatacagatggttngnagntaataatgacatgacttgttttgtgaaaaaaaaaaaaaaaa

SEQ ID NO: 6570 - DNA, 790 bp, Glycine max
atcaagtaccacaagctcatctaccaattcacaaacctagaaaaccactccaaagcaaacaagtaccagctaagaaggagctcaaatggcgtcccagctggttgagagccaccgtgccggcgccgaggtccacaaggggaacgatatctgcaagaagaagaccgtcgagcttctcgaagtgcttggcctcccgaaaggcctctttcctatggatgacatcgaggaggtcgggcacaactgtgagagtgggttcgtgtggatacttcaaaagaagaagaaagagcacatgttcaacaagctcaaccagaccgtctcctacgacactgaggtgaccgcttttgtggaaaagggcaagatgaagaaggtcaccggggtcaaggtcgaagagttttctttggtcgaggtctatgtagatgagtcttctgctgataaggtcaccatcaagaccgacaccggtctgtctgacacccatgatgcggccgtgttcgctctcggagaatagagctactagttaaaaatgccataataataaagtcagtgaatggttcggcactgcagttcacatgttatgcagaagtatatgtttccgttttctttgtaatctaataaaggctgttgcatgaatgttgcttcctttaagcccatgttatgcagaaatttatgtttctgttttctttgtaatgtagtaaaggatgttgcatgaatgttgcttcctttcagcctgtaagcgtacaccaaatgtaatgaataacacttataccgcctcctatatcccaaaaaaaaaaaaaaa

SEQ ID NO: 6571 - DNA, 460 bp, Glycine max
atatcagtcaagttgagagttagctcaaggtccatttagctgctcacggaatcgaggatgagctgcgccgccccaaaagcccccgccggagaggagaagaagacgtcatggcctgaggtagtgggaaagtccatcaaggaggccaaggagatcatccttaaggacatgcctgacgccgacatcgatgtccttcctgctggctcggcgatgaccctcgatttcaggaccaaccgtatccgcatcatcattgacactgtcgcgaccaccccttccattggttagcaagctttgcgagcgagagacaaagtggatgcacttatgcatgctgatgaataattagtttcaataatcatggatgaataaatacacgctgaccaatggtgtgtgtggatgtacttatggttcaatggccttgaccagttatttttaatttatgagatgtcggcttgttgttcataaa

SEQ ID NO: 6572 - DNA, 2293 bp, Glycine max
  misc_feature (75)..(75): n is a, c, g, or t
  misc_feature (85)..(86): n is a, c, g, or t
  misc_feature (195)..(195): n is a, c, g, or t
  misc_feature (211)..(211): n is a, c, g, or t
tcagctacgtaggccccccccccgtgatatctctgacacagatgaatttattcttgtaaaatctttgcccccggncgaaaggacnnagttttaagtgtgacttggagtacagatgctaactatatatattcaggaagtagtgatgggttgatacgatgctggaatgctacattgggcaatgaaatctataggatnacagctggacttgganggttgggcaatggacatgaactttgtatatggtcattactgtctttaaggtctggtacacttgttagtgcggacagcagtggtagtgtccagttttgggacagtcaacatggaactctcttgcaagcacattctttacacaagggacatgtacatgctctggcagcatgtcctagtcataatagggtgttctctgctggttctgatggccaggtaattctttacaagctatctagtagtcagtcaacatcatccaatgatatcaattctccatcaacaatgaagagatggatctatgttcactatgtaagggctcatacacatgacatcagggccctagctgttgctgtaccgataagtcacgaagcagatattaagccagaaaagaggattaaaagagctcgacgtgcagaaaatcccattagtttccgttaccataagtgggctcatttgggggttcctatgcttatctcagctggagatgacacaaaactttttgcatacccagcgaaagaattcaccatgttttctcctcatgatatctgtcctgcgcctcagagaacacccattcaactagtgcataattctgtctttaaccaacgcaaactgcttttagtccaatcttcgcaaaagatagaggttcaattgctacaactaaaaaatgtccgcacctctggaggctttacaaagaacgttgtagtggctcaagttaacagtaaggcatctcagaagataatttgcagcaccatttctaattcaggggcgctatttgcatactctgatcataaaaagcctagtctttttcaattgaaaagggatgaagttggaaaaatcaagtgggatgttagaaaaagggagcttcctcagatattaccatttgcccattctatgattttcactcatgactcctccaagttgatagtagcaggtcacgataaaaggatatatgttgtgaatgttggggggccagatgaagttaagtcagaattactgcatacttttacaccccttcgcgaatcacaagatcaagaattacctccgactgagccacccataacaagattgtttactagttctgatgggcagtggttggcagctgtgaactgctttggggatatatatgtatttaacttggagatactaagccagcactggttcatttcaagattagatggcgcctctgttacagctggtggctttcctccccagaacgacaatgtactgatagttacaacttcctcaaatcaagtgtatgcttttgacgtagaggccaagcagttgggagaatggtccaaacggcacacatatgctcttcctaggagatacctggaatttcctggtgaagttattgggctctcattccctccatcagaaacttcatcttctccatcggcaacttcatcttcagttgttgtttacagctccagggctatgtgcttgattgactttgggttgcctgtggagcaagacgaaagtgatatgctaaatactaaagattcaagggcaatgaattcacaaaattttaatgttaagaagaggattgaagttaagaagatgattgaagttaagaaggaacataataggaggaactttgaagttatacctttcgagaatcctgttttatgtttaggtcatacttcaaaaaattccatctttatggtagacaaaccatggttgcaagttgtcaagagtttagaaggccgaccagtccacagacatatatatgggacatgaggcattaagcaacctagagaattgttctcagcttgagggggatacatgacggggataaaagttccttgttgtttttctttttgtctcttcatggctgggatctggaatcatgtattgtgttatcataatcaattttgttccattagtaatcgcttcacttcacaatttattttattttttatttacacatgttctgtacttttactctttaatcaatccctagctggtttttgatgtttgatgcagtagaatcttttgacacttctaacacaatgattaagatgtaattaaaatttcatataagaaatgtaatttgtgtggtataaataagggtatcaattactaggaa

SEQ ID NO: 6573 - DNA, 789 bp, Glycine max
tctatgcgccgccacccaaaaccctagccaagcacaccgccgcgctcacagcaaccaagcacaccgccgcagccaccatggcagccgttctcacccgcccgacgccgggcaccgtccagtgcttcggccggaagaagaccgccgtcgccgtggcctactgcaagcccgggcgcggcctcatcaaggtcaacggcgcgccgatcgagctcatccgccccgagatgctccgcctgaaggccttcgagccgatcctgctcgccggcaggtcccgcttcaaggacatcgacatgcgtatccgcgtccgcggcggagggaagacgagccagatctactccatccgccaggccatcgccaagtctctcgtcgcctactaccagaagtacgtcgacgaggcggccaagaaggaggtgaaggagatcttcggccgctacgaccggacgctcctcgtcgccgatccacgccgctgcgagcccaagaagtttggcggtcgcggtgcccgcgcgcgtttccagaagtcgtaccgttgagctccggcgagatctcttgttgggtatggcggcggtggcctactccttgcatctatctaccttttaccgctagtagtttgccatcttttggaccaatgaattggacatgatctctaagaactgtgagttgtctgcagtatcctgcctagttgaagaaggggttttgttatcataaacttatgttaatgatgaaactgaatgttctgtttgagcttaactgtttgcgatttgatatttagttgaaagaaaaaaaaaaaaaaaa

SEQ ID NO: 6574 - DNA, 669 bp, Glycine max
ctctcctctcgcatcccaccaccaagctccagacgcctcctcctcctcccccgccgccgccgcacgctccagagaccgcaggcatgggcgtcttcaccttcgtgtgccgcgactccggcgccgagtggtcggccaagcagcacaagggcgagctcgaggcctccgccgccaccccctacgacctgcagcgccagctcgtctccgccgcctgcgccgaggacaagtccggcggcgtccagtcctccttcaccatggtctcccccaagtccgccatcttccaggtggtcattggtggtgcctctgctggtccgatcggtggtggtgctgctgctggtggtgccgctgcatcaggtggagctgccgctgaggcccccaaggctgaggagaagaaggaagaggagaaggaggagagcgaggatgaccttggcttctccctcttcgattagatcttctttaccctgttgctcgccagaaatgacatggtcctattgccgcagtaattttgatgccatgcccacaggggttgtgaacctgcctagtttgattgtcaagagatgtatgtgctactttctgttcatgtgaggatttggttatgttattctgcagcattgaatatcctactatggctttagtcttgccggtttatagttttcaaataaaaaaaaaaaa

SEQ ID NO: 6575 - DNA, 1773 bp, Glycine max
tgtatttgctagacagaagagttgaaaaacaaaagaaaagcctaacctcaatctcttgttctagttcttaatcttgttgttctactatggaggaagaaagcacttcagcggaatccaatccttcttcgagcgaccgcatcaaactaaacgtgggcggaaagctcttcgagacgacgttctccacgctccgttctggcggcccggactcgctcctcttcgcgctctcgaaccgccgatccgccgacccgagccccgtcttcatcgaccgcgacccggagatcttctccgtcctcctctccctcctccgcacctcccaccttccctccgccgcgcgccgcttctccaagcacgagctcgccgacgaggccctcttctacggcatcgactcccacctccgggcggccgctgcccctccccccttctctggcatcgacgcggccctctccgcttccctccgccccgcctcggagggcctcccctcctctttcgtcgcctccccctccggcggcgtctggatcgcccacggcggccaaatctcctgctacgatcccatcctcacccacgccgccaccgtccgcacgcacctcgacgaaattgactccatctgcagagtctggcccgagatcgccgccgtcgggtccaaatccgacaccggcctccacttctacaacttctccggcagccgccacgttggatccgtccactggaccgatccgctcgatcctcgaatcttcaaagccagcgtcaacgccataacaagctcctcaaactccgttttcgcttcgttcgattgtccgcacagagagaattgcataatcgaagtcgataaggagaagcttctgatcgcgaatcagttcgctcggcaatcagggaaccaggcgaagaacatggttccccgaaagctgacgtggattccggcgaccggagttctcgtcggaagcgcggtcaccggcggcgcgttcggttactccggctacgtccggttgtgggacccgagatccggggacgtggtctgggagacaaacgagcctggtggttcgggacggagcagcaggtttggggattcgtttgctgacgtggaggcggacgtggaagggttgttgctgttcaagctgtgttctaagtccggggatttggctatggcggatatgcggtttttgaaggacgatccttgggtttatatgaaagagaagaaccctagtttggtgagttgtggtgaagtgaggaatagtgtggtgcattgttatagggggcaagtgtttgtggctagagaaggagcattggaggtttggtcaagggcggaacaaaaggaaaatagtgagggaaatgctgaagggttttttaggaggaattttgtggataagagggaggattcagagagaggggttataaagaagattgaaggtggtggggataggttgtttgttagtagggatagatgttgagggtattgaagtgtgggagagttctcattctgcaggagcaatttctgttttgtgacagtgagccaaatttttagttagctaggatttcagcattacacgaataaaatgtaatttttttttataagcgatgaataaaccatgacttcatgcaactttgatactagtgtatagacaaatgcctcactgaactttctttgccttcaaaacatggggcagtatttgctgcattttgttaactatgtatgtcatcttaatatattatacttttgttaaatccatttcttctcgaaaaaaaaaaaaaaaaagcttatcgataccgtcgacaaaa

SEQ ID NO: 6576 - DNA, 464 bp, Glycine max
atcttccgaaaccctagcccttcttccgccgccgccgaaccccagcgcacaggagccgcagcagaagggatcggagatggccaagtcgaagaaccacacggcgcacaaccagtcgtacaaggcgcacaggaacggcatcaagaagcccaagcgccagcgccaggcctccaccaaggggatggacccgaagttcctgaggaacctgaggtactcgaggaagcacaacgtcaaggctggtgagggagaggttgagaagtaagatggacgagtttctggtggtcgatatgtctcgtgtatcgctaggatctactgttttgaacttaatccagtgttctgtatgaccaaagaatatctatgtcgttacctaagttttgtcatgctgctggattggaaatgatatttgcagctttatgagaacttctttatctaaaaaatgtgtctttgcaaaacttcgaataaaaaag

SEQ ID NO: 6577 - DNA, 533 bp, Glycine max
aagaaaccacacccacaccaactttccccgtctgtctttcttctcggcggaggcgaacgacgaaccctagccgcgcgaggaacgccaagatccccaaggccggcgacgatggcggcggttcggtgcgcggcgaggaggctcggcggctctctgctccagcgaacgcaggcggcggtcgcggaggagggacgcctgctcgtgccaagcaggctcatgcgctcccgccagctctccactaaggtctccggcgagcgatcgcaggtggcggagcgacacctcctcgagccaggcagcctcatgcgctcccgccagctctccggcgagcatgctcgcaacatccagaagaaagaggatgactgctgggcggggttcaatgagacgctaaagaggttggacgagcttcaaaaaaagaagaaaccaagtgtctttcagcagcgcatgatatccatcgaccgtgcgttgaagagtttggtctatggatctttcaaggtgacagttgtgtatgtggctgctgctactgcttcccctggcag

SEQ ID NO: 6578 - DNA, 910 bp, Glycine max
atactgaatcacacggaaccttcaggcacacccacggcagaaaatggccaacggaggagacgagctgaagctgctgggcatgtgggcgagcccatacgtggtcagggtgcagctcgcgctccacctcaagggcgtgagctacgagtacgtcgaggaggacctcgccagcaagagcgagctcttcctccgctccaacccggtgcacaagacagtcccgatcctcatccacaacggcaagcccgtctgcgagtcccaggtcatcctccagtacatcgacgaggccttcgccggcgtcggtccgcccctcctccccgctgacccctacgagcgcgccgtcgcgcgattctgggccgcctacgtcgaggacaagctgctggcgccgtgggggaaggtgttcagggtgaagaccgacgaggagagggccgagtggacgaggcagacggcggcggcgctgggtcctctggaggatggcctcagggagtgctccaaggggaagggcttcttcggcggcgactgcgtcgggtacgttgacgtcctgctcggcagcatggtgccgtgggtgcgcgccaccgagaggctctccggcgacaagttaatagacgccggcaaggccccgctgctggcggcatggatggagcgcattagcgagctcgacgccgccaaggcggtcttccaggacgtcgacagggtggttgagtacgccggggcaatacaggcccggctttccgccgcggctgctgcaagcacccaataaagcggcatggtgacatggtgggtgggtggtgcatgcaaggagaaaatggccaagtgtggaattagctggaattactaaaatggccacgtttctgtttctttttctcgaataataatggcgacgtttctcaggaacacatcaaaaaaaaaaaaaaaa

SEQ ID NO: 6579 - DNA, 558 bp, Glycine max
ttgcttcttcacaaagaaagaaacttcgaccccaagacaacagggagagcagcgagagggaaaaaaagagaggctcagcagcggcgatggcgagcggcggcggcccgatgacgaagaaggagctgggcgagacccacgacgtcctccgcttcggcgtcaacgacagcgtccgcggcgacctcgcgccggcgcaccccgtccaggccaccatccacaaggagaacaagttctgggaggagaagaagaagttcgggaccgaggccatctacggatccgccttcaacatccgcagggatctcgacgcccagatcctctccaggttccaaaggcccccaggtgcattgccatcatctatgctaggatatgaggcgatgacaggttccttggatgattttggatttgaagattaccttaacttgccccaagactctgacagcctccgcataccggacatgcaccacgggatggaggttcgccttggcctgtcgaaggggcccatctgccccggtctctgttgattccacccatgtattagtcttgtgatacgtcgtgctcccc

SEQ ID NO: 6580 - DNA, 851 bp, Glycine max
aaaaaccctctgtttttcctctcctgccagtccccacatcgcctccgctccccgcagcgcaacccaggcgatccgcgccggctcctccccggcgcttcaggaaaaatggccgagcatctctttgaggacatcttccacgtgaccaggatcgacccggatggcaagaagttcgacagagttaatcgcattgaggctagaagtgagcagttggagatgtacatgcaattagatatcgctaccgatgtctacccaatgcatatgggtgacaagttcaccatggttttagctccgacactgaatctggatgggactccagacactggctactatacacaggctggtaggaaaacacttgctgacaagtatgactatgtaatgcatggaaagctttacaagatttcagaggacaattccagcaaggataaaggacctactaaagtggagatctatgcatcttttggtggcctcctgatgttgctcaaaggcgatccttcaagtgctgctaacctcgagctggatcaaaggctgttcctcctcatccgaaaggtgtaagcgtggcatctaccggataaccagtgcttgtagttcactcagggctatactgagcctgtgatcgtttggatgctaatcgccctacacccttatgtactcttttggcggtaatgttactctagattggtaccatggcttctctgtagcaccagtcacttattcttgccccccccccccccccctggagtgcattatgcgtgtgactaatgtatgtcattgatgttccgcgtaaattatgatgcagcatgaacgttatatttggtaataattattatcactgtgcaaaaaaaaaaaaaaaa

SEQ ID NO: 6581 - DNA, 1011 bp, Glycine max
gtgtgttctataataaggttgtatatggtttggtgggatttgtctagagtctttagaaaagatatccatggctgagtccgacaacgagtcaggaggtcacacggggaacgcgagcgggagcaacgagttgtccggttgcagggagcaagacaggttcctcccaatagcaaacgtgagcaggatcatgaagaaggcgttgccggcgaacgcgaagatatcgaaggaggcgaaggagacggtgcaggagtgcgtgtcggagttcatcagcttcataacaggagaggcttccgataagtgccagaaggagaagaggaagacgatcaacggcgacgatcttctctgggccatgactaccctgggcttcgaggactacgtggatcctctcaagatttacctgcacaagtatagggagatggagggggagaaaaccgctatgatgggaaggccacatgagagggatgagggttatggccatggccatggtcatgcaactcctatgatgacgatgatgatggggccatcagcccctgcaccagcaccagcaccagcaccagcaccagcaccagggacacgtgtatggatctggatcagcatcttctgcaagaactagataacatgtgtcatctgtttaagcttaattgattttattatgaggatgatatgatataagatttatattcgtatatgtttggttttagaaatacaccagctccagcttgtaattgcttgaaacttccttgttgagagaatatagacattattgtggatggtgatgtggcatatgtggcatacacagaatttttgtattcttctttctctctatggatttttgtgtaagggcaggactatggctttgtttgctgatcgtatagctagtatggtgctatctaggttcggatttttttctttttcatgtataatgaaaaattaacggaggaaattactcttacgttactttgaaattaattaactaactcccgcttctgcctttttttttttctcctttctgag

SEQ ID NO: 6582 - DNA, 594 bp, Glycine max
catctcaaatagctgcgccacaccaacagcagaaccttaaccagttacccagccacttatcaagcactgatggcaaagctagcgatgccgctcactgcgacattcctggccttcgggctggcagtgctcctcctgtccgccgctggtccggcggtcgcgcagaactgcaactgcccggcgggcatgtgctgcagccagtggggttactgcggcacgggcccggactactgcggcgccgggtgccagtcgggcccgtgcacggtggcgagcagtggcgccgcagctgcggaggcgtccggcggcaagcccgtggggagcgagcgcaccccataggtgacgtgggtgcacccgcctcaactcccaggcctgaaatgtgatggtcctccgatcttaatagaataaagctaagtaagtgaattgctgggagctaagtatagcaaagctgccgtgtaatggatacggctaatacgtaccgagtgagtacctcctagatggccagagcagtgttgtcgaggaggaaataagcctcggacaacgatggttgttcaatatatttgaatcaaatgttttaccgctttaaaaaaaaaaaaaaaa

SEQ ID NO: 6583 - DNA, 845 bp, Glycine max
acattgttttctatatatcccttttcaaccccctccttccctgtcgcctgccttccgttctagactccttctcccctccccaaacccagagcaagcaccatggctccgattggcgtgggcagcaccctccccgacggccagctcgcgtggttcgacgagagcgaccagatgcagcaggtctccatccactccctggccgccggcaagaaggtcatcctcttcggtgtccctggcgccttcacccccacctgcagcaatcagcatgtaccaggcttcattactcaggccgaggagctcaaagccaagggtgtagatgagatcctgcttgtcagcgttaatgacccctttgtcatgaaagcatgggcgaagacatacccagacaacaagcatgtgaagttccttgctgatggagcggcagcatacacaaaagcacttggtcttgagcttgatcttacggagaaaggattgggtcttcgttcgaggcggtttgctctccttgctgacgacctcaaggtcaccgtcgcaaacgtcgaggaaggtggccagttcacaatctctggtgccgaggagatcctcaaggcactgtaggagcttcagcgcttcggaatcgcagcgatcacccaaaccttgtgtcatatcgatgtagtttgaacttgtctgccgaactactagtgggaataaattgtcaatgtgcatttcttcatgtactttatgtgcggtgcaagtgacttcagagttttccggccaaattgttggttgtgttgcaaacattctgagattgttcaaggaaaatggtgtgggtggtatttgtgtgaatcgtcattaccttggaaatcaacaggcaa

SEQ ID NO: 6584 - DNA, 544 bp, Glycine max
aatcgagaagttttctatatatcccttttcaaccccctccctgtcgcctgccttccgttctagacccctccttctcccctccccaaacccagagcaagcaagcgcaaccatggctccgattggcgtgggcagcaccctccccgacggccagctcgcgtggttcgacgagagcgaacagatgcagcaggtctccatccactccctggccgccggcaagaaggtcatcctcttcggcgtccctggcgccttcacccccacctgcagcaatcagcatgtaccaggcttcattactcaggccgaggagctcaaagccaagggtgtagacgagatcctgcttgtcagcgttaatgacccctttgtcatgaaagcatgggcgaagacatacccagataacaagcatgtgaagttccttgctgatggagcggcagcatacacaaaagcacttggtcttgagcttgatcttagtgagaaaggattgggtctccgttcgaggcggtttgctctccttgctgacgacctcaaggtcaccgtcgcaaacgtcgag

SEQ ID NO: 6585 - DNA, 901 bp, Glycine max
cccgagccccctcccttcctgagataccaccgcgtgccctaggtctgacgcctcctatcaactcgaccacagagcggcggcggcggcggcggcggcagcggaggagagaggagagagctccagccatggtgcacgtcaacttctaccgcaactatggtaagacattcaagaaaccaaggcgtccttatgagaaggagcgtcttgatgcagaactaaagctggttggtgagtatggactgaggtgcaagcgtgagctctggagggttcagtatgcattgagcaggatccgtaatgctgcaagacacttgctcacactggatgagaagaatccccgccgtatctttgagggcgcggctcttctccgtcgcatgaaccgctatggtctccttgctgagggccaggataagcttgattacgtccttgccctgactgctgagaacttccttgcaaggcgccttcagactcttgtcttcaaggctggcatggcaaaatccatccaccatgcccgtgtcttgatcaggcaacgccacatcagggttggcaggcagatcgtcaatgtcccgtcgttcatggtgagggttgaatccgagaagcacatcgacttctcactgacaagtccattcggcggaggccctgcaggcagggtgaagagaaagaaccagaagaaggcaagtggtggcggcgacgccggtggtgatgaggaagaggaatgaggaactagtagctatcaccttatatttatcaaatgttggtgttatgagtactttagctgagaggcctgagactttcatgggttatcctcttgtcattttgtcactttatcactgttgttagcatgtatgcacttctttatgtttggagctatttggtcgtgatgttttcgaacaaaaaaaaaaaaaaa

SEQ ID NO: 6586 - DNA, 1361 bp, Glycine max
tcagctacgtaggcccccccccctctgaatttcaggtacctgattccaaattaattcaattgacccttttcattttcaatactgtaattcattgcatcatcaaggttccgcgatattgtgttgttagggttttcaattttctaaacctgcttgatcgaacagtaaccatcaatgaagggggaagtgcagcttcagcctccagcggttatgcaaaaccctagtgattcggaccctttgctccataaccaggaggaagaggatgggtctccgggaagctctggtgagatcaagaatgaggaagaagacgttgaggctggattactcccctgttgtcgaatttgcctcgaaagcgattccgacccagaggatgaattgatatctccgtgcatgtgcaaagggacccaacagtttgtccatcgttcatgtcttgatcattggcgctcagtaaaggaaggatttgccttctcacactgcacaacctgcaaagcccaatttcatcttagagttgaatcgtttgaggacaactcttggcgtaaaataaagttcagactttttgtggcaagggatgttttccttgtttttcttggctgtacaaactgtgattgcagctattggtggcttttcatacatcatggacaaagatggttccttcaggaactcgtttgatgatggttgggataggatactgtcaaggcatcctattccattttattattgcattggagtgctggccttctttgtattgattgggttttttggcctcatactgcattgctcctccctcatagcaatgaccccagaatggctggctgtcaaaactgttgttatggttggggcatcctggattgctttcctgcgtcaatggaggcatgctttgcccttgtggttgttttcgctgtcatctctgcaattcttggtatagcttatggttttcttgctgccaccatggccattcaaagaatatggcagaggcactaccatgcccgcgccaagagggagcttacaaaggaatacatagtagaggatcttggtggctgttatttcccacccaagttggacccagaacatgaaggtcgcttgaaaatgcttaagctcttgtaaattagggagcacgcacctgtagaaatgtttttgaataattttgagtatcaagttgtttctttatttgaccgttacggtctcgtgctcagcaaccttgtttgctagtgcttggaaatggtttatatcatcgttttcttttatttttttaaacaaagagtctggatccttgccagattctgtatactacaaatctgactggaaaaattatgaaaatatatgctgatacttgtccaaaaaaaaaaaaaaaaaactcgactcgt

SEQ ID NO: 6587 - DNA, 932 bp, Glycine max
  misc_feature (7)..(7): n is a, c, g, or t
ggtccgnattccgggtcgacccacgcgtccgcccgcccgtccggggatctaaccctaaacaaaaccttagcatactttattctcgcttggttgcagcttcagcagcagcggcaagcaactccatccgcaatgggaatcgatttgaaggcaggaggtaagtccaagaagaccaaacgtacagcccccaaatccaatgatatttacctcaagctcctcgtcaagctgtaccgttttcttgttcggaggactggtagtaacttcaatgccgtcatcctcaaacgccttttcatgagcaaggtcaacaagcccccgctatccctctctagattgattcgttacaccaagggaaaggaggataagatagctgtggtagtcggggccgtgaccgatgacattagggtgtatgaagtccctgctctgaaggtaactgccctgaggttcactgaaactgccagagctagaattgagaaggctggtggcgaatgcctcacctttgatcaactggctcttagagctccactcggccagaatacggttcttcttagaggtcccaagaatgcccgtgaggctgtcaagcactttggaccagctcctggtgtgccccatagccacaccaagccctatgtccgtgcaaagggaaggaaatttgagcgggctagaggaaaaaggaatagcagaggctttagagtttgagttctggagctcaaacatgaaggagttttcattttacctcatgatcattatgtattgttttcttgtgttttggaacaatttgttaattttggtttttatttttccttatctaagggaaaaaattgaaacgctttccccgaacaattttgttcttgcacacttttcagaggattaatgagtagctattgttctacttaaaaaaaaaaaaaaaaaaaaaaaaaaaaaaaaaatctagagga

SEQ ID NO: 6588 - DNA, 3293 bp, Glycine max
  misc_feature (1358)..(1358): n is a, c, g, or t
  misc_feature (1374)..(1374): n is a, c, g, or t
  misc_feature (1576)..(1576): n is a, c, g, or t
ctcgagccgaatcggctcgagtcccaatatacttttactctctattgctgagaagcgagaagaagaagaagcagtgacaccaacacacaaatagtgaagtgataatacccaacacacatcaaaatcaaaatcatatgcaacctcgaactccaaggttgtctctgcgctagggttctgggttcgcgaccaaatcgaagtgagcttgagagccctgcaaatggtcgtgttgctgttcgagacttcgattccgagatcgagcattcatggcgcggatatgctaaaccatacctatctttaaaccaactccaacacgaacaacgtgcgaatcctcggttcgaataaaaattgcaattcgctaagctcgatgactctcctatgttccgcaagcagatacaatgcatggaggaaagtgctgaactctcgagcgagcggcctcagaaattttacaaaggatgtagaaaatacactgaaggacttggggaggcctatgatggagatattgcatttgcaagtgccttggaaacttttggtggtgggcataatgacccaatcagtgtggcttttggaggtcctgttatgaccaaattcaccatagccttacgagaaattggtacatacaaggaagttcttcgatcacaggttgagcatatgttaaatgacagattgcttcagtttgtcaatattgatttacaagaggtcaaggaagcacggaaacgctttgacaaggctagccttatttatgaccagactcgtgaaaggtttctgtcactaagaaaaggcacaaaaactggtgtagctactgccctagaagaggagcttcatagtgcaagatctacatttgagcaagctcggtttaatctggttactgccttgtcaaatgttgaagcaaagaagagatttgaatttttggaagcagtcagtgggaccatggatgcacatcttcgttacttcaaacaggggtatgaattgttgcaccaaatggagccatatattaaccaggtcttgacttatgctcagcaatcaagagaaaggtccaattatgagcaggcagccctaaatgaaagaatgcaagagtacaaacgacagattgatcgggagagtaggtgggcttcaaatggttctaatgggtctcctaatggagatggtatacaagccattggtagaagttcacataagatgatagaggcagttatgcaatctgctgccaagggaaaggttcaaactattcgacaaggttatctctcaaagcgttcctcaaacttaaggggggactggaaaaggagattttttgttcttgatagtcggggaatgctgtattactaccgtaaacagtgcagcaaatcatctgggtctagtantcaacattctggccanaggaaatagttctgagcttggttctggacttttaagtcgatggctgtcttctcatcatcacggtggagtacatgatgagaaatctgttgctcatcacactgtgaaacttgcttacatcaacaattaaagtagatgctgaccaatcagatttgaggttttgcttccggatcatttcacctacaaagaactacactttgcaganagtgcgctggaccaaatggactggattgaaaaaatcactggtgttattgcttcattactgagttctcaaattcctgaaaggatgttgcctgcaagcccaatgggaagtggtcatcataggtctaccagtgagagtagttcttttgaaagttcagattttgatcactctgctgttgaagaatgtgcagcagatagaagttttacttctgcgcatctggagcgcccctcaagaagtttgcaacagcagcgatcctgcactaaaagtgagaagccaatagatgtgctgcgaagagtttgtgggaatgataaatgtgctgattgtggagctcctgaacctgattgggcatcgctaaatcttggtgttcttgtttgcattgagtgttctggtgtacatcgtaaccttggtgtccacatatcaaaggtcaggtctcttacattggatgttaaagtgtgggaaccttctgtcataagtttatttcagtcacttggaaatacttttgccaactcagtctgggaggaattattacaatcaagaagtgcctttcaggttgatcttgtccctacaggcttaagcaagtctgataaaccaatgatgttcttcatcaccaaaccttgtcaatctgattctctatctgtgaaggaaaagttcatccatgcaaagtatgctgagaagctttttgttcgcaagccaaaggacaatcaataccgtctcttggtagcacaacaaatctgggaggctgttcatgctaacgataaaaaagctgtataccgttacattgttaattctgatgttgatgttaatgctgtttatgagccaacatgcagcagctccttaacccttgctaaagtaatgctattacaagagcaaactagccatgatcacggctctactttagcagggaacacattggactggtcctccactaaagaaggccaggtcatggacaatctagatgggtgcaccctacttcatctcgcatgtgaaactgcagatattggcatggtggagctcctcctacagtatggtgcaaatgttaatgcaactgattcgagaggtcaaacacctctacatcgctgtattctcaaaggaagatctacatttgcaagattattgctttctaggggagccgatcctcgagctgtggatgagcagggaagaacccctattgagcttgctgctgagtcaaatgctggcggtgacagagaagtccatgctccatcgactgattctaatggatgagagtgataggcaaaaacctcggagtataatacatatataaaatatggaagattggattatgtaaatttgtatttcataaattgaaaagctggttttttttttttttttttaagtaaatgtcactagtgtgagggattaagggagagaggtaggttgaaatgcctgccccttagtcatgtgcaaaatagtgctaagatctgtattgtaaaatggccacattggtcttagtaaaagagttatgcatatgctgcactggtagcacccagcctgcacttcgtaatatgatgattgtgtatttttgtttacttttgaggtgaagctgcgatgcattaggctagggatttgtgtatgttgtgtacattggtttttgtgaaggtgttgttgtggctgtaatttacatttttgtatttttgggattacttggtgggacatgtgctgaggatgccatgtccctagttctctaaaaaaaaaattaaaa

SEQ ID NO: 6589 - DNA, 902 bp, Glycine max
  misc_feature (10)..(14): n is a, c, g, or t
  misc_feature (16)..(17): n is a, c, g, or t
  misc_feature (20)..(20): n is a, c, g, or t
  misc_feature (32)..(32): n is a, c, g, or t
  misc_feature (40)..(43): n is a, c, g, or t
  misc_feature (47)..(49): n is a, c, g, or t
  misc_feature (59)..(59): n is a, c, g, or t
  misc_feature (68)..(72): n is a, c, g, or t
ttaaagtaannnnntnncangagcaaactagncatgatcnnnnctcnnntttagcaggntacacattnnnnnggtcctccactaaagaaggccaggtcatggacaatctagaagggtgcaccctacttcatctcgcatgtgaaactgcagatattggcatggtgtacggctgcgagaagacgacagaaggggttaatgcaagtgattcgagaggtcaaacaccactacatcgctgtattctcaaaggaagatctacatttgctagattattgctttctaggggagccgatcctcgggctgtggatgagcagggaagaacccctattgagcttgctgcagagtcaaatgctggtggtgacagggaagtccatgctccattgactgattctaatggatgagagtgataggcaaaaatctcggagtataatacatatataaaatatggaagattggattatgtaaatttgtatttcataaattgaaaagctggtttttttgaaatgtcactagtgtgaaggattaagggagagaggtaggttgaaatgcctgccccttagtcattttgtgcaaaatagtgctaagatctgtaatgaaaaatggccacattggtcttagtaaaagagttatgcctctgctgcactggtagcacccagccagcactttgtaatatgatgtttgtgtaattttgtttacttttgaggtgaagctgcgatgcattaggctagggatttgtgtatgttgtgtacattggtttttgtgaaggtgttgtggctgtaattttccatttttgtatttttgggattacttggtgccttggtgggacaggtgctgaggatgtcatgtccctagttctctaatattctgatgtatttatttatatgataaaaaaattatatattttc

SEQ ID NO: 6590 - DNA, 741 bp, Glycine max
acttcattagacctactaaaccctcctagctcactctcgccagcactagctagctagcttagccggcagcaatggcgtccaggacctcggcggcgtgcctgctggcgctgctggtggccagcacgttcctggccggcgacgcgtgcaacagctgcaagcaccacacccctcccccggcgtccccgtccccgcccccgccagcgcctgctaccccgacgccatgcccgccaccgccgtcatcgggcggcacggggtactgccccacggacacactgaagctgggcgcctgcgccaacgtgctgggcctagtgagcgcgggcgtcggcaccgcccccagcggcggcggcgacaagtgctgcagcctcctcggcggcctggccgaccttgaggccgccgtgtgcctctgcaccgcgctcaaggccaacgtcctcggcatcgtcctcaacatccccatcaagctcagcctcctcctcaactactgcggcaagaccgcccccaagggcttccagtgcgcttaatccatcagttaatcaggcaaatcagcgcatgcatgcatcgtcagtgcatccatgcatgtatgttattttagttccaaatttgatttcatcatgcaataatcggtcggttgttaagtagtttttcttgcgtgtgttaatttatatgcactggtttggtgagattaatttgtcttagtttggctgtgtactacaagagatacatacgactgggtgtgcgtgtgtg

SEQ ID NO: 6591 - DNA, 489 bp, Glycine max
aattagacacacttaaaccctcctagctcactctcaccagcagtacctactagctagccggcagcaatggcgtccaggaccttctcggcggcgtgcctgctggcgctgctggtggccaacacgtccctcgccggcgatgcctgcggcagctgcaagcaccaaaccccgccgccggcctccccgtccccgcccccaccatcgccgtctacgacgccgtgcccacctccttcgtcaggcggcggcggcggcacgtcgtgccccacggacacactgaagctgggcgcctgcgccaacgtgctgggcctggtgaacgtgggcgtcggcaagccccccagcggcggcggcgacaagtgctgcagcctcctcggcggcctggccgacctcgaggccgccgtgtgcctctgcaccgcgctcaaggccaacgtcctcggcatcgtcctcaacatccccgtcaagctcagcctcctcctcaactactgcggcaagacc

SEQ ID NO: 6592 - DNA, 658 bp, Glycine max
atcaacccacgctagccataagcagtgagtcagtgcatcgaccttcgaccagctatatatttgcatcgatctggtcatggcagcagcaatgctcccgaggctcgttgtcgtggcggcgctggtcgcgctgatgggcgccgtcgctgtggcccagaatgtacctgccgtcggcggtgcgccggtctgcgacggtgtcgatcaaaatgtcgtgaatgcgtgcttcgagagctgtggaaaaggtatgaaaattgccactgccgacaggactacttcggcgggtaataccaaggttcaagtggactgctgtgtagcctttggaggccactcgtgcatgtgccagatgaagaaagcgtggaaggctcagggcaaaagtgctcagaacaatgtgcaatgcgtcagggaaaaggcatgctagtgagcttgtcgtgcatgcaagacctctagtttcgttggatatttgtgtttcttgcatattggtttcaagcggttgatgtccacctgctccttgcttgcttttatttgcttgtgtgtgtcatgtgagtgtgttatgtttttctacgtatgagagtgtcagttgagtctttttagtttgtaccaatcagaaataaatgtgggtggaatttcttgcttcatccaaaaaaaaaaaaaaaaaagctta

SEQ ID NO: 6593 - DNA, 729 bp, Glycine max
atcaagcgataatctcgtcgcgtcgttcgtacgcagtcaaaacgtccctaacgcgaccggacgcctcgcaaacccatttccctatccataaagaataaaaggcctccgcaaaccctaacctcaccggcggcggcggcggcagagatggaccccgactcagtggcgaaggcgttcgtcgagcactactaccgcacgttcgacaccaaccgggcggcgctggtggggctgtaccaggagggctccatgctctccttcgagggcgagaagttccagggagccgccgccatcgccaccaagctcacctccctccccttcaccaagtgcgcccacaccgtcgtcactgtcgactgccagcccgccggccccacgggcggtatgctcgtcttcgtctccggatccctccaagtcgacggcgagcaccacatcaagttctcccagatgttccacttgatgccactcggaccagggaacttctatgtgcacaacgacatgttccgcctgaactatggctaagaatcttaccagaggtcgtgcttccccatggaagacagaatgctctgcaaaacgaaataatctagttgtgttttttgtgttcaatggtgaaagctttgtggtgcttcctgctcagcagcatatgagattcagtggggataaaacatgacaccctttatggacctgggtctgaaaattgtactgtggtcattctcacatcaatgttatgtggaggtc

SEQ ID NO: 6594 - DNA, 634 bp, Glycine max
tcgaaattccaccagctccggagagctgcggagccagtaaactggcgctccgcaaatttcaactataactccaccagctcctggaatgaagctgtggagcgaagtacctccgaacagggcctatatttccctatataaactctatgcatccatggctcggccaactgaaagcacacacaaagacaagacaacgctacacgaagccattatggtttccgccatgaagctgtcggtcaccctcgtcctcctcctctcagggctcgtggtgttcggggagatcgtggacgccaaggccaaggcgccgtgcgccgtggtgtgcttccagggagggcacatcacctgcgacaactaccccggccaggagctcgacgggtgcgactgcgagtgcgcgccggccgacggcaagggctgcgtgctccacctcgacgacggcgtgacccacaccaactgcggcacgaccaaaaagttctagctgaattgttggtttgaatctgagttcaataaggctctgcaagcttggtgtcgaacaacgaaaatgttcgcgtgtctgtggtttggcagtgtaattcaactttacacgcttcgaataaaatttccgagcagaatgtggtaaaactccaaaaaaaaaaaaaaa

SEQ ID NO: 6595 - DNA, 1412 bp, Glycine max
ctcttcgtgatcacatacatcgtacacatagacattcataattcattgctatcaccacacacaagcctagctcctcatcataccactgcttttctcttccctctatcgtttgttctttccttcattcactctcgccgccgcgcgtgctaaaaaccgtctattccagaatgggcagcgagggcgtgccgtcgacggtggcggaggtcatgtcggtggcggccgtcgagctcactgacgcctccagctggtggcacgacatcgacgactctccgctgtggcaggatcgtatgtcctacactctcgccgtactctacggtatcgtggccaccgtagctttggttcaactggctcggatacatttgagagtgccggagtacggttggaccacgcagaaggtctttcactttctcaattttttggtgaatggggttcggtgtgtagttttcatcttctatcggaacgtgcagaggttgaagccagagattgttcaacacatcttgcttgacgtgccgagtcttgctttctttacaacatatgcacttttggtcctgttctgggctgagatttattaccaggcacgtgctgtatcaactgatgggctgaaaccaagtttctatacgattaatattgtggtttatgttgttcagattactttatggttaatattgtggtggaaacctatcagtggactgctcattttgtctaagatgttctttgcaggggtctctttgtgtgcagccattggctttcttctctatggtagaagactattcttaatgctacaacgctttcctgttgaatccaaagggcgatgtaagaagctgcaagaggttggatatgtgacaaccatatgttttttatgtttccttgtcagatgcattgtgatgtgttttaatgcatttgataaaaatgcgaaccttgatgttttggatcatcctattctaaacttcatatattacctggtggtggaaatattgccttcttctttggtccttttcattttgaggaagcttccacctaagcgtggtatcacacaatatcacccaattcgctgaaaaggggatttatcaatcgttcactattttcttgaatgattatcactctccaagggtaattttttagagtagagacaagtcagtcttctatgttcggtggcaaagcttgtatgctttgtctctagaacattatggtttagttttgcgatccagcatttcgacacgatgataattgggagaaggggatatagtgatatcttgtataattagtgttttgaactgctacgagttcgtaaaatgtattgcccctttgatttctcactcatattaacttactacattaatttctgcactatatccctaatttcatttctttagtggagctttagtttttgttttcaaaaaaaaaaaaaaaaa

SEQ ID NO: 6596 - DNA, 1222 bp, Glycine max
tgtttatggtcctgttggagaacaacattgtctttctcttctgtttctcctctcattgatgttgcttcttccccttttcttacccttcagaaaaaaaaaaaccaacacacttcaaatccattcttagaactcacaatttctcactgaaaaacaaaaatcactcatcacccttctgttccaaaactgcagatctcacacctcttattattatctctatgcaaaatgaacatgtcagatatgatatcttgtttcaacgagaacgcagtgaatgtgtcacactcctcatgttctagctactcaaacaacgcttgcatatctccaagtgttacaccttcaactcaaaattcagtgtcttctgtctacaaaaccaccctctcaaaccaaaagcagcttctgatcacagtcacgtggtgcaagagccactccaaccaaggactcaacgtaaccttcggcgaagagaacaacaaccctttggcaccatctttcagactcaacaccaattcacgctttttcaggaaaaagaaaggaagcaaagtgttggaatccgaagactcaaaagttgaagtcttctgggacctctcgaaggccaagtatggcactggccctgaacctgttgaagggttttacgtggcgattctcgttgatgcagaaataggcctcgctctcggtgaagatgtgaccaagaagttcaaaacaaagacccttttgggaaatgtttcgctgttatcacggcgtgagcattgctccggtaacgcggtctacgccaccaaggctcagttttgtgacactggaactcggcatgacattttgatcagatgcagtggcgagaatgaaggactcaaggctcctgctttgtctgtttgcatcgataagaagacggtgattcgtgtgaagaggctgcagtggaatttcaggggaaaccacacgattttcgtcgatgggttgcttgtggatttgctttgggatgttcataactggtttttcaatcctgcttctgggtatgctgtgttcatgttcaggaccaggagtggcttggatagcagattgtggttagaggagaagattgcacagaaagataaagatagagttgaattctccttgttgatctatgcctgtaagaacacatgaggggacccattcttcgtatcagatcagaggatttaatcacggtagacaactgtgctttatttctctgtattcttccttgggacctgaatggtac

SEQ ID NO: 6597 - DNA, 1394 bp, Glycine max
  misc_feature (3)..(3): n is a, c, g, or t
agntacgtaggcccccccccccgagcacaccaccgaggtttctgcctcaatcctctaatctcctctctcccctctcataacacacgagagagagagattgtgttgtgttgtgttgtgtcatgttaaatgcaaagtcttcttctcttcctctcgagtttccccctttcagaaacccaaggcacatgaaatgaaaatgcaaccataataacctccatttttctccctacaacccacaaaacaaaaaccaccattaacccatttctccaaaaacttgagatcttttgtgtcaaacaaccacaagtcccgcgtcgaacaaataaaagcaaacaaaagggtatataaagatagagcgattgagtccaattaaaaaaaaaatgagagacatagtttcttgtttcagtgagaacgcagtgaacgtttctcactcttcaatctcgtgttcttcctattcacacaacgcgtgcatctctccctcctccattgttgtaccctccacccaaaactcaatctccagcgtctacaaactagtcctctccacgctgaagcaagttctcgtcacggtcacatggtgtaggagccactccaaccaaggactcaccataaccttcaacgacgaggaccctccacttttcagactcaacaccaattcacgcttcttcagaaagaaaaaaggctccaaaatcctcgaatcttctgactcatcatcatccaaggtagaaatcttatgggatctctcaagcgccaagtacgaatcaggacccgaacctgttcagggctttcacgttgtgatcatcattgactcagaaataggcttggttctcggtgacactgctgctgaagaaatagtttccaagaggcaaaatttcaaaagcaataacaacaacaacacccctttggctaaagtttcactcttgtcacgaagagagcattgttctgggaacacgctttatacaactaaggttcagttctgtgacacaggtacgtggcacgatgttatgatcagatgcagtgtggagaatgagaatgaagggttgttcaagtcaccggttttgtgcgtgtgcattgataagaagactgtgattcgtgtgaagaggctgcagtggaattttagggggaaccagaccattttcgttgatgggttgcttgtggatttgctttgggatgttcatgattggttcttcaacccttcttcttctggttatgcggtgttcatgttcaggactaggagtggcatggatagcaggttgtggtttgaggaaaagaatgcacacaaagataaagacagcgttgaattctccttgttgatctatgcctgtaagacttcataagggaactgaactcttgttcttctaattggttttctttcttaacctttgttgtctctttagtttctt

SEQ ID NO: 6598 - DNA, 578 bp, Glycine max
agatcaacgcatccccaaaggccatatctctagggttttcgtccagcgaatcgaagaatcaagaggagtcgccatggcgtcgcggccgtcgctgaagccgaagccgaagggcaagggtgcgaagaggggctcgtccgcggccgaggacgagcagtccaccgcggcggtggcggtgcagctcgccaaggagtggagcacgtggacgatgaagacggcgaaggtggtggcgcactggggcttcatcccgctcatcatcgtcgtcggcatgactaagggagacgagcccaaacctagcttgctccagcttctgacccccgtctgatccaatccccggcgagccctaaactggatcgatccatctccttttagttactactagtagatgtttttgctgtttattgaatcctggtggttgagttcttgatccctgggtggtgatcttttatctgatctgtgtctaataatgttatgtggtcggatcgatcctggattggatcggatcttgttagatacctgagatgctacagatctgctattaatatattgtgctatgttaactttccaaaaaaaaaaaaaaa

SEQ ID NO: 6599 - DNA, 1066 bp, Glycine max
atatatacacttaagcaacagatatacaggacacgagtatcagggaggaagacgaggaaacgttgatggccggcggtgaagagctgaagctgctggggtggtgggcgcccggggtgagtccctacgtgctgcgcgcccagatggcgctcgccgtaaaggggctgagctacgactacctccccgaggaccgctggtccacgagcgacctcctcatcgcgtccaaccccgtgtacaagaaggtgcccgtcctcattcacaacggcaggcccgtctgcgagtcgctgctcatcctggagtacctcgacgacgccgtcggccttgccggcaacggcaagcccatcctccccgcagacccctacagccgcgccgtcgctcgcttctgggccgcctatgtgaacgacaagctgttcccttcgtgcaccgggatcctcaagactacgaagcaggaggagagagccggtaagatggaggagaccctgtccgggctcagacacttagaagctgtcatggcggagtgctccgaaggggaggcggaggcgccgttcttcggtggtgacgccatcgggttcctcgacatcgcgctcgggtgctatcttccctggtttgaggcagcaggccgcctggccggcttggggccgatcatcgacccggcgaggacgccgaaactagctgcgtgggcggagcggttcagcgtcgccgagccgatcaaggcgctgctgcctggggtcgacaagctggaggagtacatcactacggcgctttatccaaagtggaacatcgcggtcaccggcaactaattaaagatctcgtcgttccactatggcaaaagaaataaaaaatggcgtcgttcgattaccggcggaggatctctgccttgtgagtagctgttttcacgtcaagagttgaactgttactactaagtcgggtttctttttgcgagggttagtgggtcgtggtcatgaataatgcacaggcgtgcactctcttcgatctgagttgtgatatgttgtttcgtgaataaattgaagcgtcgtcgatcttgcatcttgcaaaaaaaaaaaaaaaa

SEQ ID NO: 6600 - DNA, 468 bp, Glycine max
agtttcagcgcagtgcactcggcagccaggaccaacgacgcggcgacgacggcgagcgtgaccgcgaccgcgcccagcccccctacagatccgcgcggcggccggcaagatgtttgacgatcaagacttgggtttcttcaccaacttcctggggatcttcatctttgtgttggtcatcgcgtaccactttgtgatggcagacccgaagtatgagaactgatcgccttttgtttagcaatgagaccgtattatactcggagcaaatagggaaatgtgtcggttaatggtaacagagtgcttgacagatctttttaagtgcaattatctggcattgtgacttgaatcatgtttaatctgttgaacaagtgaactgtggagatttcaaaagatcgatttactagcaaaaaaaaaaaaaaaatgcttgttatttgctgtttgattatgtgatctgtattgcctttggggttg

SEQ ID NO: 6601 - DNA, 1305 bp, Glycine max
  misc_feature (540)..(540): n is a, c, g, or t
catatccggatatttttgagcaggaaatcgaagtgccaggaccgaagaagcagagcaagcagtcatcaatggcgaaaggcacgcctgcgaccggttgggccgcgaaggacccgtccggtgtcctctccccctacagcttctcacgaagggctctgaaggacgacgatgtcaccatcaaggtgctcttctgcgggatctgccacaccgacctccacatcgccaagaacgagtggggaaacgccctctaccccgtcgtccccgggcatgagattgttggcgtcgtcaccgacgctggccccggcgtcaagaacttcaaggccggggacacggtgggcgtgggctacttcgtcgactcctgccgctcctgcgtgagctgcggcagcgggcacgagaaccactgccccacgctcgtgctcacctccaacgccgtggactacgacggcgccaccacccagggagggttctccgacgtcctcgtcgtcgaccagggctacgtcgtccgcgtcccggagggcctgccgctggacggggcggcgccgntgctctgcgccggcgtcacggtgtacagccccatgatggagttcggcctcaacgcgccggggaagcacctgggcgtggtcggcctcgggggcctcggccacatggccgtcaagttcggcaaggccttcgggatgaccgtcaccgtgatcagctcgtcgccgagtaagcgcgaggaggccgtccagcggctcggcgccgacgcgttcttggtcagccaggaccccgagcaaatgaaggcggcggccggcacgatggacggcatcatcgacacggtgtcggcggggcacccgatcgtgccgctgctggagctgctaaagccgagggggcagctggtggtggtgggcgcgcccagcacgccgctggagcttccggcctacgccatcatcggcggcggcaagcgcgtggccgggaacctcgtgggcagcatcggcagctgtcaggcgatgctcgacttcgcggggaagcacggcatcaccgccgacgtcgaggtcgtcaagatggactacgtcaacacggcggtcgagcggctggagaggaacgacgtgagataccgcttcgtcatcgacgtcgccggcagccagctgggcgccgccgcttagtacccacgcgtgtcgttttggttacctaccagctccagccacatgaaatcgtgatttgttgttttatttccacaaatgggttggtgcgtgcaattccagaattgcagttgaaataataagtgccatttttatttttgaaaccagttaaacaaaaaaaaaaaaaaaa

SEQ ID NO: 6602 - DNA, 504 bp, Glycine max
catcagtcacaaagccaaagcaaaagccacaagccaagaaccaatacttgatctgttgtttcctttagctcccggaagacttttagctgcaccgatcgatctcgatcatggaggatgagaggagcacccagtcgtaccagggaggtgaggccgccgagcaggtggaggtgacggacaggggcctcctcggcaacctcctcggcaagaagaaggctgaggaggacaaggagaaggaggaggagctggtcaccggcatggagaaggtctccgtggaagagcccgaggtcaagaaggaggagcacgaggatggcgagaagaaggagaccctcttctccaagctgcaccgatccagctccagctccagctcgtctagtgacgaggaagaagaggaggtgatcgatgacaacggcgaggtgatcaagaggaagaagaagaagggtctcaaggagaagctccaggagaagctgcccggccacaaggacaccgagggtgagcacgtgacgg

SEQ ID NO: 6603 - DNA, 1192 bp, Glycine max
cttctttaaacccctctattgtctacaccacttagttagaccccccattttcctcttcttcctgcctcgtctagggttgttatctcctctcttgtttggcagctattctttccggtggttccatagttccgttgacgcctttccttagttcctctcattcgaagttgtagggacagctgtgcaaggtggatatggaatgcgtggttcagggaattatagagacacagcatgttgaggccttggagattcttcttcaaggactatgtggcgttcagagagaacgattgaggatccatgaaatatgcctcaagagtggtcaacatctaggtactgtagcctcagaggttcgactgttgtgtgacctagagcaagctgaaccttcgtggactgttaaacatgtaggtggtgcaatgaggggagcaggcgcagagcaaatttctgttctggttaggtcaatggtggaaagcaaaacaagcaagaatgcactgcgcatgttttatacactggggtacaagttagaccatgagctgttgagggtgggattttccttcaatttccacaggggtgcacaaatcactgtaacggtttcatcaatcaataaaatgctgaagctgcatgcaactgacgaggccgtgccagtaacacctggtatacaaatggttgaagtaacagcacctgcaactgctgaaacctacactgaagttgcggctgctgtgtcatccttttgtgaataccttgcaccgcttctccacctgtcgaaaccaggcatttcaaccggtgttgttcctacagctgctgcagctgctgcatctctgatgtctgacggtgggagtacaacgttgtagtgggactgtactgttatctttataaatgcacacttgacaataacatgtgaaaatttaacgtaggaacatgtgaagttccatgaccccacttgcttacttcatataaagagaagtgaatattaattttcacttgacaagaacatgtgaaaatttaacgtaggaacttgtcttcggccttcccataaatcaattgaaatttgcacctacccttttgttttgttttattttttgtctgtactgaaaatgtataagttatcttttaggaaaatagcccacgatatgaatgaaaatcaagtgaacgtatgcaattatgcacctacccttttttttgaaaaaaaaaaaaaaaa

SEQ ID NO: 6604 - DNA, 872 bp, Glycine max
gcaaagcattatatctatctctcctccctctcttctttatatacaaaccaaatattcctcgaaagcctcaacttccaatccaacaacgacaccgtatcataccgtaacatgttcacagcaccttttcctacatccactgttactctctccggtgaaagcgtaacctcaccgccgcgccacgtcagattccggtcagtagtatcgttcgccaccgccactttcacggaggagcaacaacataaggcagctccgtatctgagacctcatcacgggatggctttgagcgcgacgctgtacgacattctggggatccgcgccacggcgtccggcgaggaaatcagggcggcgtaccggcgactggcgagggtgtgccaccctgacgtggcgccggtggagcgaaaggaatcctctgcgggcgagttcatgaagatccatgctgcgtactgcacgctctcggatcccgagaagcgcgacagctacgatagaagcttgttccggcgccagcagcgaccggtcaagacgacgtcgtcgggggcttccggctacggtgggcggaactgggaaacggaccagtgttggtagtgagttgagttgactcgtccgagtgggagcgcgctcgcttgaactaacttgctagctacttcggaattaggatcttgggcgcagttatttgaatcacctttaagtgtaaacagtacatactacgttgcaaattttaaaaatagaaagtgttaatctcaacagcctaaaatatcatttctctcccccaaaatattcaaatttgatttttttatctatttttttgtatttataaaatctaaacctacgtatttgatatctgtttactacaaatgtgtcacgtgtggcttccg

SEQ ID NO: 6605 - DNA, 933 bp, Glycine max
aatcaagctagcagagcgcaacacgcgtccatctccaagaagcggaagctagtggagcagagcaaaccaagcaaggttggatggcgccggcggtgaaggtgtacgggtgggccgtgtcgccgttcgtggcgcgcccactgctgtgcctggaggaggccggcgtcgagtacgagctcgtgtccatgagccgcgcggccggcgaccaccgccagccggacttcctcgcccggaaccccttcggccaggtccccgtcctcgaggacggcgacctcaccctcttcgagtcgcgcgcgatcgcgaggcacgtgctccggaagcacaagccggagctgctgggctgcggctcgccggaggcggaggcgatggtggacgtgtggctggaggtggaggcccaccagtacaaccccgcggccagcgccatcgtggtgcagtgcatcatcttgccgctactgggcggcgcgcgggaccaggcggtggtggacgagaacgtagccaagctcaagaaggtgctggaggtgtacgaggcacggctgtcggcgtccaggtacctcgccggggacgacatcagcctcgccgacctcagccacttccccttcacgcgctacttcatggagacggagtacgcgccgctggtggcggagctcccccacgtgaacgcgtggtgggaggggctcaaggccaggccggccgcgaggcaaggtgacggagctcatgccgccggaccttgggcttggaaagaaagcagagtagtgatgactgccgccaacgttcaccaggatcgagcaagtcactgtcgagtctccggttttgcgttgtacggcaccggggcaccggcctatatcttctgtaccagtggctcgtgttttgatgttttagtctcacgcttgaataaaatgcaagatatacccatcggttctaaaaaaaaaaaaaaaa

SEQ ID NO: 6606 - DNA, 497 bp, Glycine max
accacgaaccaaaaccagaccaaatcttcggcgagcccatcggcacattctgagagcggagaggaagcaggaggcggcggatcaaggagaggagactagaagatgggtggcggcatggaggtgaacaagaaccgctggatcgaggagtggaacgccggccgggagaacctcgagctcaacttccgctttacccgccgcagcctcgccgtcatcggcctcttcggcctcgccgtccccatcctcgtctacaagggcatcgttcgcgaattccatatgcaggacgaggacgccggccggccgtacaggaagttcctgtgagcgtcgcctccggtggatgtcgagactccgagccgtctgcagggtttcggtcagggagaaggaatctccattcggtttgtttcccgtactgttgtagtcagaccggagtattttgttctcacatgttgtgcgatatgtgttaaataagatgtaatgaaatgctgttcttgcaattgctg

SEQ ID NO: 6607 - DNA, 643 bp, Glycine max
aaaaagtccacaattcacaccgctcctacccagccacgcacgcgcggagaagagaagcagcaagccccatggccaagatctccttcctcctcgtggcgctcctcgtcctcgccgtcgggttccccgtggaggtgatgggaggtgggggcggcggcaacctcaagccatgggagtgctcgtccaagtgctcgtcgcggtgctcggggacgcagtacaagaaggcgtgcctgacctactgcaacaagtgctgcgccacctgcctctgcgtgccgccgggcacctacggcaacaagggcgcctgcccctgctacaacaactggaagaccaaggagggaggccccaagtgcccctagattcttggtctttcttcttcttcttcttcttcttctggggtgccagcttgcggttgatggctattcactgctctcccatgaagatgttactagatctgaatttacgtatgtgataggcatttagtggcatgtgaattgccctcccagtttcctgtgtttctatcagtaagatgtggaaaaatggaggcgctcccacatgagtttagtgggacctatcgagctttattgttccttgtgcgcctgtgcaccgtgcttccttcttgtctcaaaagtcagatgaagcatgcagc

SEQ ID NO: 6608 - DNA, 3643 bp, Glycine max
tctagaattaaccaaaacgtcacacctctttcaacaaccctgccgaatgcagagccgtatcctctgcttctcaacgcgtcgtttaccactccatcagcgtcgttttctcagccacttcattcccgaccaccaatacgacccgccgttctccccttccccaaaaccctactacaaatcaaagaagaaccacgcggagaagaagaaaaagaacaattccgaaaacggtgatccgaacaaaaacggagccccgaaactccctttcaagtcgaaccttccgttcgacttcagatactcttattcggagtccgacccttccgttgggcccatcagcttccgcgaatcgcccaagttctccccctttgggccgggccggatcgaccggaaatggaccggtgtttccgctccggttcagggtgaaccggaccgggagagggtcgaggaggagcggaaccggattctcggagaaccgcttagtgaggtggaggtggcagagctcatcgaacgctaccggcacagtgactgtgccaggcaaatcaatttaggtgtctccttattccctcaactattttcattttttttctttttttttcactggagaaaagaacaaaaagatgtttttgtttttttaaatattaattgatttcgttttattttattatcttgaatttttagatggttattcctgttatgcatatatctgggttaatatactatcggagatgcttctgtaaaatgcttgaattgatgaacgaatatgtgaacccagtaagtaattgtttttaaaataattattaaaaaagtcaatatttttattatactatgcataagtattcatgattagatgatagtttaaaaaatctgaacgctagcagcatcattttctaatgcactccttttaatatactctgccattggttaaaatttgttgacaactacaaaatcacaggtgagacttgtttgctaacaatataaggcgtgcttaaaagaagggtaaatacttggatccctccaagtatgaggcagtgacaaattggtatttttgcacattacaaaatgatctcacaaatttaacgacaagaccaatctgtcgcactttttgtacattagggactaaatttgaattcttcatttttcaggatcaatttgtcaccgcttcacactttcaaggatcaaaatgagtatttaccctaaaaagaatgtctcacaaagtgtttttctagcatttctcaaaaaatctctttaagtcttaatgcactgtattctaagtaaattcttgtaaaattcctgctggttgcttatctgaatgacttatttttggtttatttgttgttacttgtatcaatgtttctttcttcttttttttttctacccaatttgggaatttatttgcttatttcttattgaggttattgatgatacttgatttgatttagtgatggctgcactttttgataaagaagtgtagaattatacgtgttgattattaatggctaaagttgtaataaactttatatacatatttaaatttgtaacaaattacagagctgtaaacttaaaattcagagataaacttaacattcgatttctgtggtagttttaaataataggtataccagatttggggtttcacctacattaatgccattggtagttagggttattgggtttgagtgataatggagtggtgtagaagaaagaagaggaagaagaagacagaaaaggaagaactttataaaaatcttttagctttaaattagctattaagttaaaaaatatattgaaaattatcaaacgacttacttctaaagttcatagtttaacttcaactttaaaacagtttttaaactcaaaagttaggccatacaatacctaagagttataactcttcacttttctatctaaagggcatttggagaagacaaatttattttatatggatgagttgttatgcaattagctaatgatgtttgtgttgtactagggaaggggggagtcacacacaacatgttgggtgacatccataaccattggaaaaaggctgaagctgtgaggattaaatgcttgggtgtgccaactcttgacatggacaatgtttgcttccacctcgaggtcaacattgctgttttgcacttttaaaggattgatcattctgatttaaactctcaatttacatttcttttccctgatgtgtattgctgtgttcacaggacaagtctggtgggaaagttatctaccgcaacattaatatactgcttctgtacagaggacgaaattatgataccaagaactgtccagttatccctctcatgctgtggaagccttatgcacccatatatcctaggcttgtgaagaatgtaattgagggtttgacgtatgaggaaacaaaagaaatgagaaaaagtgggttgaattcagatcctctcctgaaactcagtaagtgaattattggggagtaggggctcacaaaatgttaccttttggtcctaatctagtttaaaagtagtattggattggtacatatgctaaattgtgctttcaatgttcagctagaaatggtgtttatgtgaatgtggtggagagggtgagggaggcttttaagactcaggaggttgtgaaactggactgtatccatgtgggaactagcgactgcaaaaagattggagtgaagctaagggtatgtctacttgacattcgattcatgataaatttcactgtttccctgattctgtctttgtgttgaatacatctgccatgtggtgcataagcatttaatggtaatcctgttattgcaggatttagtgccatgtgtccctatcttgtttaaggatgagcagataatcctctggagaggaaatttcaaggaagagcaaccttcagattcacaatgttagcaagtaatgcaaacttttgttattcgaaattactgtatggtaccatttccttgactaatggatctggttttgaatgggtttcttgatcacatttgtattcatcaaactataattgaatgctaaattccatgtctgcaggcgagaaatgcattgattcatggctgaaactcctcaatctgcttgtttgtagcgtgtttaaaagcctgttgagaagtaaaagatcatgtttgtgatgtggaagtataactattaccttctcagcaaacgtgaaaagccacatctgagataaggaaccaaacaccccattgctagttgctaccacccaagcagactgtcttgatggtctttatatgagagctgattattcaatatttctcagctactctgtggatacaatgtgctgtgttcttaggatcctcatgcatcatggcaatacgggtaagattgttgatgagaaatgcaacatgttacaaaaataattgtttgtggaaacaacctgcttgttttattggctgaaaattgaataaaaaaggaaaagaaaaatggaaactttgattaaaatcgtgggactcatttgtttacagtttgtgctcttcgtgtaaagaaattttgtactgtcaagccaacattctggtattatgtaataaacatatactatatgtaacacttcctatgactaagtgtatattttcatagccgaatcaacagtcaacatctatgatcttaaatcatatacaaaaaaaaaaaaaaaa

SEQ ID NO: 6609 - DNA, 794 bp, Glycine max
gagtcttctgcagagcatcatccatcccatccccaggtcataaacccaagtcggactcgccttcctcctcgccaactactcctctcctctcctccgcgcatcgcaccggggtcacctgagatcacacacacaatggtgaaggctgtggctgtgcttaccggcagtgagggtgtcaagggcaccatcttcttcacccaggagggagagggcccgaccaccgtgacgggaagtgtcaccggactcaaggaagggctccacggcttccatgtgcacgctcttggcgacaccaccaatggctgcatgtcaactggaccacacttcaaccccgctggtcatgtgcatggggcacccgaagatgaaatccgccatgctggtgatcttggaaatgtgacagctggagcggatggtgttgctagcatcaatattactgactgccatatcccccttactggaccaaattcaattgttggccgtgctgttgtcgtccatggtgatgctgatgatcttggcaagggtggacatgagctgagcaagagcactggaaacgctggtgcacgtgttgcttgcggaatcatcgggctccagggctaagatgtcatcttcgccgaccaacgtcgcacagatatgggaaccttttcagaatgcagatttgcaatctctattctaaataagcacatgatctttgatcacttgttagtgtgcaccagtcgtgtcaattcctatgtgttactctgaactttatcgctgtcatttggctatcgagatgtgtgactggaacaaaaaaaaaaaaaaaa

SEQ ID NO: 6610 - DNA, 1228 bp, Glycine max
ggaattgttgctgcagccacaggcatggatggacaaataaagacatctgatagggatgaaagagtgatctgttacattgtaaattcagctgaatattgccacaaaacggctggtgaactggctgaaagtgtttctaaaataattgaccctcaatattcagatggggtggatatgtctgaagtgcaggatgaattctcggccgttataacaaaatcattggtgaccttagtgcatggcctggaaactaaatttgacatggaaatggctgcaatgacccgtgtcccttggggtactcttgagagtgttggtgatcaatcagagtatgttaatgccataaatttgatcctgaccactagcattcctgcacttggaagtcttctttcacctgtctactttcagttctttctggataagcttgcatcatctctgggtccacgcttttattctaacattttcaaatgcaagcaaatatcagaaactggagctcaacagatgctattagatacccaagctgtaaagacgattcttcttgaagttccttcccttggtagacagacatcaggtgctgctagttattccaagtttgtaagccgcgagatgagcaaagccgaggcccttttaaaggttatactttctccagttgattctgtagcagatacttaccgtgcattgctacctgagggtacacccatggaatttcaacgaatcctggagcttaagggtctgaaaaaagctgaccaacaaagcattcttgatgacttcaacaaacatgggcctggaattaagcaaactcagattgcaccttcaattgtgccagcagctgctccagtagctcctgtggtacctagcccctctgctattggactcatagcgtcgcgagaggatgttcttactagggctgctgcacttggacgaggagctgccaccactgggttcaagcggttcctagctctaactgaagccgccaaagacaggaaagatgggcctttcaggaagctctttaatccataatgacgagagtgctacaaccccgattttttggccagagcgcatgagcttttagttttctgtttctttttgcttttcttctctttgattctttatgtaagtttagtatcgtgttaatctgatttcactcaatcaactgaaagctgttaatgaagagatctatctacaaatttgcataattctttctgtagctcataagggattcttcttgtctgttgct

SEQ ID NO: 6611 - DNA, 1286 bp, Glycine max
  misc_feature (1231)..(1231): n is a, c, g, or t
tgcgagaagacgacagaagggggagcatccttcagctacgtaggcccccccccccagtttgcatcttgctaattcaatggagcaagctaatagtctcagtgaggctgggcaaaatccaatgcttgcttcagttgcaagtgagcatctgccttcccagttattgcttcctcctgcagttgaacctgatctgtctagtatgcgaccaaagaagcgtaaaacttccacatctaaactcataccatggcataaagagctgagtcagggttctgaaaggcttcaagacatcagtgtggcagaattagactgggcacaagctgcaaatagattggttgagaaggttgaggatgatgctgaggtagttgaagaattgccaatgatgaagtcaaaaagaagacttgtgttaacgacacagcttatgcagcaactacttaacccccctccagctgcaattctctctgcggatgtgaagttgcatcatgaaagtgtggtctactctgttgctagattagcgttaggtgatgcatgcagttctgtctctcggtctggaaatgacactttcatcatgtcccctggcagcaaaaacctcctgcctgataagcccaaagcatctgagaaaattgatcagtacattttgaaggtggaagactttgttggtagagcgaggaaactggaaaatgatatattgagattggatagcagagcctcagttttggacttaagactggaatgtcaggatttagaaagattttctgtcatcaatcgatttgccaagttccatggtcgggggcaaaatgatggggcagaaacctcatcgtctgatgcaactgcaaatgctcagaaatcatgcccccagaaatatgtaactgcagttccaatgcctagaaatctccctgacagggtacaatgtctttcactttgataattaattaattcatttttccatctttcgaggtcagttgtctcccaacctcctgtttatggtacttttctttcaacttatattattgaacttcatcaccatagaaccatacaactggcaatgtaggagaagaatggtactagattgcctcctcaaccaatggaggctgttagatcttttcaatctatgtatgtatgtattaagataagatatcttatacttttggtcttcaggttccaagccttttgtatatattaagataagatatgcagtttacttagttttacccataccattttgctagttttaagntgattagttaaagcataaaaaaaaaaaaaaaaaaaagaaaaaaaaaaaaaaaaaa

SEQ ID NO: 6612 - DNA, 622 bp, Glycine max
actgtccctccccaacacacagaactacaaaaatggctacctccaccgcggccgccatctcctgtctcctcctcctcgccacgctcaccattgccgctgctgaaataaggcacccgcaggctccggcggtagccggaggcgccgtgggcggccggacggagatcagggacgtgggcaagaacaagctggtgcagtccctgggccggttcgcggtgtccgaacacaaccgccgcctcagccacggcggcggaccagtcaacaacggcgaccccgtcaaggtccagctcgtgttcaccgccgtggcggcggcgcaaaagcaggtcgcctccggggtggtatactacctgaaggttatcgcccgggaccgcgccggcggcggcggggacaggccgttcgacgccgtggtggtcgtcaaggcgtggatcaagtccaaggagctcgtgtctctcatgccttctcccaagtaatcgacaggctggctgtcacgtgtacgtatgtgcgctccgtgctggttttgtgctgttgttgttactcgctgtatttttctccgtcacctgagtacgtactagtgcaactacaaaataaagagcgtggttcatgttggaccaaaaaaaaaaaaaaa

SEQ ID NO: 6613 - DNA, 1637 bp, Glycine max
ataagtacaagttcataagaattgggaaggtgatgaaactaatcgatgagcagcagtgaaaaaaaacttgtttgaaccccaatgattaattattaatcaaattcaattcaatgaccaaccaatcttcttcgccctctttactttgcgcttctttcaaccaggaccatagttactttgccgttggcaccagagatggtgttagaatatttgatgctaatacaggaaggctttgttatgaaagagcggttggagcttttgttattgctgagatgctgtttagctccaaccttcttgctatcgttggagctggtcatcagccatctttgtctcctcgccgtctttgtttattcaatacaaccactggagctgctcttagagaattgaattttctaacttccatacttgctgttcgcatgaatagacaaagactcattgtcattttacaagacaaagcatatatatatgaaataaatagtctcacaatcttggatactattgacacagtgccaaatattaaaggactttgcgctttttcccctagtttggatgcatgttacttggctcttcctgccagtactaccaaaggatctgcattgctatataatgtcatggaatgccatttacactgtgagattgaggctcatcgttcaccattagctgcaatggttctttcttctaatggaatgtacatagctacagcatctgagcaagggaccataatcagagtccatttggtgtcagatgcaacaaagtcatatagctttagaagggggacatatccgtctactatattttctgtttcatttggaccatcaaagcggcttccagatattcttgcagcctcaagttcttctggttctattcatcttttcactcttggatttgcttcacgtccaagccgtagcaagagatcaagtggttttcttggatcaataattcctgatgctgtgcatgatgtgctggatcctgctcatcatcatgtactacataatgctgtccctgcaggggtcaaaagctatgctgtaattcgcaaggttgaaaatgtcaccaactcctcatcatctgaactcctagcttgtagggccattatgtccgtaataacttataacggttacttccaggaatacaacttaagcattgatgctcacaatgaattatcttggtctttaggacgccagttcaatcttttgactgtgaccatggataaggcatcatgagtgacataaagtgttcttagagcgccaactataactgtgaagcttgaggaatcacatgctacacttaaacttccagacctactactgctgccaatgttgaagtgttaatcaaagaaactggtagagctgtcgaggctgccaacatgaatgtgttatttggaggaaacaatgagtccaaattagagaacatttaaatgtaaattattggaatgaattaaaaaaaatgtaaattagtggtgtatttgggatagaatattcttattttataaagtagtttcactaaaaaaaaaaaagagtagtatatacatagagtatgtagtgtcaaccaattggaaaagtcttatatattactgataaatatgttcgcagttatatcattatatatgcagggaaaagattctgataaaaaaaaaaaaaaaa

SEQ ID NO: 6614 - DNA, 599 bp, Glycine max
ataagtggaatccaatggacactgctggctaaagaaatagcagtacagagcaaatcaagggaattaaatagcacaaattattgaacaaagaaagctagaaattaagaggtcccaaaagctgcacacattgcccttcttgtccaggaatttgagatctaacattaacaacaactatctaagcactagcaagctagttagcaaggcaataatgaagttcttgttccagtgcccctgctgctcttgcttttgcttcatgaagccaaagcaagggaaggcaaaggtcaaggaagtcaaagaaaccaaggtggaagaaaaaaaggttgaagagaagattgaagaaaagaaagattgaccatgtaactccatttcaagctctctttggttattattagtatttttttttttgcttttttcttctcaccgatattatataagcatgcacaacaaatttgtgcttctttgttcctataattaccactgccatgatgcattcctactactgttagtttgaaaatgtacaatgcctttgcaagtaacttcttaaaaatggaaaataaattgtcatttcagctcttgcttattcaaaaaaaaaaaaaaaa

SEQ ID NO: 6615 - DNA, 579 bp, Glycine max
cccacgcgttcgtacggctgcgagaagacgacagaaggggaagggaattaaatagcacaaattattgaacaaagaaagaaagatagatagaaattaagaggccccaaaagctgcacacattgcccttcctgtccaggaatttgagatctagcaactaacaaggcaataatgaagttcttgttccagtgcccttgctgctcttgcttttgcttcatgaagccaaagcaagggaaggcaaaggtcaaggaagtcaaagaaaccaaggtggaagaaaaaaaggttgaagaaaagaaagactgaccatgtaactccatttcaagctttctttggttattattagtattatataagcatgcacaacaaatttgtgtctacttaatttgtgcttctttgttcctttaattaccactgctatgatgccttcctactacaattagtttgaaaatgtacaatgcgtttgcaagtaacttcttaaaaatggaaaataaaaaataaattgtcatttcgaaaaaagaataattatttccttgttgtctatatggcctgtatatattctataaaattcattgctctgaactc

SEQ ID NO: 6616 - DNA, 583 bp, Glycine max
  misc_feature (577)..(577): n is a, c, g, or t
cttaccttttctttaggacaatttaagtgcgagagtgagatagtaggtttgtgtttggtagcttcaagttctggaaagctacaaatgagtccaccaccccctgaaggacctgggcctcaggattattcaggttcatggcccggaccaccttcccttcttggcaatttcttcaatggactttgtaacaccatatcttcttgtttctacatagtctgctgttgctggttgctacaagactgttttggtgcatcacctgaaccaccaccaattccagtggccccaccacaagctccgcctccacctgtgtctggcccacccggacctctcagtttgccgccatcactagctcctgatccttttcggcctcctggcactccaattgggcctcccaattgggcttccgatgggcctcctggtagctcatcagggactccaccgtcttattaagaaagaaaatgtgattttactggcaatcacatgacatctagtgtatttctttcacttataaccaagtagccaaccccaatgtatacagccaaagattttcttaagttatgaaactatgtattgtcattgngattgc

SEQ ID NO: 6617 - DNA, 1895 bp, Glycine max
tttgaacctctgcaactgcaaagaggatgtaaggaaaagggttcatggaacgattgacaagtctgctgagcgtaggcccccgccctgtttgtatggtatgtctataacaggaagtacctgagaaaaacaaggatagtcctggtgcaccatggcaatttgttggtctgctaccactttttgatcctccaaggcatgacagtgcggaaaccatcacaagagctctaaaccttggtgtgaatgttaagatgatcaccggtgatcagcttgccattgccaaagaaactggccgaaggcttgggatgggaacaaacatgtacccatcttcttcattgcttggtcaaagcaaggatgctgctgtttcagcagttccagttgatgaattgattgagaaggctgatggatttgctggagtatttcctgaacacaaatatgaaattgtgaagaggctgcaagagaggaagcatatttgtggaatgacaggtgatggtgtcaacgatgctcctgcattaaagaaagcagacattggaattgctgttgctgacgctacagatgctgctagaagtgcttcggacattgtcctcactgaacctggtctgagtgtcattattagtgcagtgctcaccagcagggcaattttccaaaggatgaagaattatactatctatgctgtgtcaatcaccattcgtatagtgtttggtttcatgtttattgcattgatttggaaatttgattttgcacccttcatggtgttgattattgccatactaaacgatggtaccatcatgacaatatccaaggatcgagtgaaaccatctccaatgccagacagctggaagctgagggagatatttgccactggtgttgtgctaggagcttacatggcactaatgacagtagtatttttctggctcatgaaggataccgacttcttctcggacaagttcggtgtgaggtctataaggaacagccccggagaaatgatggcagccctgtacctacaagtcagtattataagtcaagcactaatttttgtgacaaggtcccgcagctggtcctatgttgaaagacctggtcttctcctactgagtgcttttatgattgcacaactggtggcaacttttctggcagtgtatgctaactggggcttcgcaagaattcagggaatgggatggggttgggctggtgtaatctggctctacagtttagtcacatatatccctcttgatatactcaaatttgcaatccgctacgtcctgagtgggaaggcttgggataatcttttggagaacaagactgccttcactacaaagaaagactatggcaaagaagagagagaagcacagtgggcaactgctcagaggactcttcatggtcttcagccacctgaaacaaccaaccttttcaatgacaagaacagttacagggagctttcagagattgctgagcaagctaagagacgtgccgaggttgcaaggctcagggagcttcatactctgaaaggacatgttgaatcagtagtgaagctgaagggacttgacattgatacaatccaacagcattatacagtttaaggaatttggacaaccttcaagcagaacacactttggtgcttatccaagaacaagaacaacaaatgtaatgaagacctaagttaatccgtctttagattaggatgaaggtccttttgtcagtcaaaatctgaatggtttactcttctattccataccaaataacgtggttgataggatttacttttcgtcttgttttgagaatgttaatgatatctaggtcactttaaggctctatatatatattttttttttctgatgaaaaaactcaatatatttccgatcttgattaatgttgctcaataatgagttcaatctacatctctc

SEQ ID NO: 6618 - DNA, 1962 bp, Glycine max
ttttattactactactactactattattattattcaactcattaaaatggaatgggggacttatttttcccattcttactggagaactcgtgaagcaagcaggaaaaaattccagtagaggaagtgtttgagtcgctgaaatgttcaagagcaggtttaacatcagacgaaggagccagccggcttcaagtttttggaccaaacaaattggaagagaaaaaggagagcaaacttttgaagtttctgggtttcatgtggaaccccttatcatgggtcatggaagctgctgctataatggccattgctttggctaatggtggaggaaggcctccggattggcaagattttgttggtatcattgctctattgttcattaactccacaatcagtttcatagaagaaaacaatgctggtaatgctgctgctgcactcatggctggtttggctcccaagaccaaggttcttagagatgggagatggactgagcaagatgctgcaattttggtcccgggagacataatcagcatcaaactgggagatatcatccctgctgatgcccgtcttctggagggtgatgctctgagtgttgatcagtctgctctgactggtgaatctcttccagtgacaaagaatccctctgaagaagtgttttctggatcaaccgttaagaagggtgagatagaagcagtggtgattgccactggagtgcacaccttttttggcaaagctgctcatctggttgatagcaccaaccaagttggtcacttccagaaagtgcttacagcaattggtaacttctgcatttgctccatcgcggttggaataatcattgagctcatagtcatgtacccaatacagcaccgcaagtacagagatgggattgacaatctgttggttctcttgattggaggaattccaattgccatgccaactgttctgtctgtcactatggctattggttcgcacaggctttcgcagcaaggcgctattacgaaacgtatgacagctattgaggaaatggcaggaatggatgtcctctgcagtgacaaaactggaactctgaccctgaataagctcagtgttgataaaaacctgattgaggtttttgccaagggtgttgagaaggactatgttatccttcttgcagcaagggcttctcccacgcggccgcccgcggctacgtacgcccccccccccgggatgcttgctgatccaaaggaggcacgagctggtatcagggaggtccactttcttccattcaatcctgtggacaagaggactgctctaacttacattgattctgatggaaattggcatcgatctagcaaaggagctcccgagcagatattgaacctctgcaactgcaaagaggatgtaaggaaaagggttcatggaacgattgacaagtttgctgagcgtggactccgttctttaggtgttgctagacaggaagtacctgagaaaaacaaggatagtcctggtgcaccatggcaatttgttggtctgctaccactttttgatcctccaaggcatgacagtgcggaaaccatcacaagagctctaaaccttggtgtgaatgttaagatgatcaccggtgatcagcttgccattgccaaagaaactggccgaaggcttgggatgggaacaaacatgtacccatcttcttcattgcttggtcaaagcaaggatgctgctgtttcagcagttccagttgatgaattgattgagaaggctgatggatttgctggagtactgcctgaacacatatatgaaatcgtgaagaggctgcaagagaggaagcatatttgtggaatgacaggtgatggttgtagaccatgctcctgcattaaagaaagcaaacattggaatttgctgttgctgacgctacagatgctgtgagaagtgcttcggacatttgtgctcactgaacctgagctggagtgctattattagtgcagtgct

SEQ ID NO: 6619 - DNA, 1714 bp, Glycine max
cataattcagtgctcttgcaacaattgcctcattgggctccttgttctattacacaagctctagagtttctttctcctgcatacaagggtcatccacgggtcatggcatacattctaagggttctggaatcctatcctcctgaacgagtaacttttttcatgccacagctggtgcagtcgttgcgacatgcatgcagggaaattggttgaagggtatttgcttagagctgctcaaagaagtgacatatttgcccatattcttatctggcatttgcacgggtgagactgtacctgagacaggaaaagacccaaacagtgggaagaatggttcatttctagaactgctgccagcggtaaggcagcgtataattgatggttttaatccaaaggcacttgacatatttaaaagagagtttgatttctttgacaaagttacatccatctctggtgtactatttccactccctaaagaagaacgccgagctggtatccggagggagttggagaaaattgaaatggatggtgaggacctttatttaccgacagctcctaacaagcttgttaggggtattcgagtagatagtggtattcccttacaatcagccgcaaaagttccaatcatgataacttttaatgtaattgatcgagatggggacgaaaatgatgtaaagccacaagcttgcattttcaaggttggagatgactgtagacaagatgttcttgcccttcaagtgatagcactacttagagatttatttgaagccattggattaaatctttatctatttccttatggtgtactgcctactggtcccgagagaggtataatagaggttgtgccaaatacgcgcagtagaagtcagatgggggaaacaactgatggaggtttgtttgagatatttcagcaagactatggacctgttgggtctgccagttttgaggctgcacgccagaactttatcattagcagtgctggttatgctgttgctagtcttttgcttcaaccaaaggataggcacaatgggaaccttctttttgataatgttgggaggcttgttcatattgacttcggtttcatcctagaaacttctcccggtgggaatatgcgttttgcaagtgctcattttaagctgagccatgagatgacacaattactagatccatctggtgttatgaagagtgatacatggaatcaatttttaagtttgtgcgtgaaggggtaccttgctgcccgtcgacgaatggatgggatcatcactactgtggcattaatgctagacagcgggttaccttgcttcagcaggggtgacccgattggcaatcttcggaagagatttcatccggagatgagtgagcgtgaagcagccaatttcatgacacatgtttgtaaagatgcttataataagtggaccactgctggctatgacttgatacagtatctgcagcaaggcatcgagaagtaagataatatagagcttacctatcatgtacattgttgcttgtaattttacattcattgttgtcttgtgctatgattttttgaggaattttcaccgttatagtattgaggagggaatagtagtaaatggcgaatgaagattcaaaagttctgtaatattttttgggggttcctcgtaatgtaaaaatacagctctgtaatcttatttattattggtaaatacaattcattgaggtgaaaaaaaaaaaaaaaaaa

SEQ ID NO: 6620 - DNA, 1126 bp, Glycine max
aaaacccacaaaaccctaaccatacactacttttcttttttcctacactttttcacttggcttcctctgccacgccaaacaatcccaggcttttgaaaacgcgcgtttcaggcgaagatggttggcgacaacacgaagaagttgatagtcgccgagaatttggaggatagcatcgacggcgaactcgtcctctccatcgagaagctgcaagaagtccaagacgagctcgacaagatcaatgaagaggcgagtgataaggtcctcgaagtagaacagaagtacaatgagataaggaagccagtttacgataagcgaaatgagatcgtcaaatctattcctgatttctggttcactgcttttatgagtcatcctgccctttgtgatcttctgaacgtagaggatcaaaagatatttaagtatttgggttctcttgatgttgaagataataaagatgtcaaatcaggctactcaatcacctttaatttcaatctcaatccctattttgagaatgcaaagcttacaaagacctttaccttccttgaagaaggaacaacaaagataactgctacccccataaaatggaaagagggcaagggattacccaacggagttgaacatgacaagaatgggaagaagcgggctcgtattgatataagtttctttagttggttcagtgactgtgagcagaaaggtgatatggatgaaattcatgacgaggttgcagaattaatcaaggatgatttatggccaaatccactcacttatttcaacaacgagcttgatgaagaggatgttgaagctgatgatgaggaaaacgatgaggatgactctgaagatgatgaccaagaggagaatgacactgggagtgaggatggcaataacagttgaaaaaatggattatggtgctgttttctgtttatttatctggttgagtatgtaagtaggcttttgggcatggtgaccgttgccattttttcaaggtttataccctcaatgaatgatttgcggtataatatacattatcgtaatttgtatacaagaagaatcaattctaaattgacaacttgagttctaaaaaaaaaaaaaaaaagtttttggaaaaaaaaaaaaaaaaaattcctgcggc

SEQ ID NO: 6621 - DNA, 1230 bp, Glycine max
cgaaaaatatacaagtgcctaatttgtcggtgatctttggaataatgcatccgatgtatttgctagactgtaaaaaaaaaaaaaaaaaaaaaaaaaaaaaaaaccccacactctctgtctctctctctcgctttctctctccccgcgatggagaaagccgagagctccgcctccacatcggagccagactccgacgagaaccaccaccgccacccgacgaaccaccacatcaaccctccctccggcctcaccccgctcgagttcgcctccctcatcccctccgtcgccgagcaccactcctacctcgtcggctccgggcaatgctcctcactcctcgcccagcgcgtccaagcgccgcccgacgccgtctggtccgtcgtccgccgcttcgacaagccccaaacctacaagcacttcatcaagagctgcgccgtcaaagagccctttcacatggccgtcggcgtcactcgggacgtcaatgtcatctccggcctccccgccgccaccagcaccgaacgcctcgacctcctcgacgacatccgctgcgtcaccggctttagcatcatcggcggcgaacaccgcctccgcaactaccgctccgtcactaccgtccattccttcgaggacgacgccgacgacggcaagatctacaccgtcgtcctcgaatcctacgtcgtcgacgtccccgacggcaacaccgaagaggacacgcgtctcttcgccgacaccgtcgtcaagctcaacctccagaagctcgcctccgtcaccgaaggaaccaaccgcgacggtgacggtaagtcacactcgcggtgaagaagcaaatacgcctcaataaaacaaaatatatattaaagaaaaaaaagaaagaattggaatttgaaactaatcgctccctcgtcaattcataaaaggagaaaagcaaaacaagtttttctctcttttctctttattttctttttttcctcaaattcattttgttttcgttttattttatttttttcgggtgagactgtcgtttttttgttctgttttttattattttctgttgctattacaatgggtgagggcatttcggtcaatgcacgtgtacaggaaatgttgactttgtgatgcttgtggatggtgtctttttaaccgttctgttctgtgaatatcatttgctttttttgctcgattttattccatgtataaatcttttttcaaaaaaaaaaaataaaaaaaaaaaaaaaa

SEQ ID NO: 6622 - DNA, 504 bp, Glycine max
atttaactaaagaaatttaaagatggctagaccagctagaagcatagttctacccctccttgttggcattctcgtcgtcattttgttgttagaatcaagatacgtgaaagcgatgggtgaggttgctgcaatggatgatagtgcggcattgatgaatacatcatcatcaggtgcaaactgggatgcgcattcaaaacacagaagaaacatgggtgtgaatgggagggtgttttgctgctatgataaccatataggaagttgcaatccgggttcagagaaagatgaccattattgtaattacatttgcaaaaaacaccactgctacaaagggggtatatgcaaaattcgtggcaaaaagtttccaaatcatttttgtcattgtttctgctaaatgtattactatcaactacaaataattgttgtgaggcctgcacaaatcaggccgcaatgttttgtttaaatgatataatgctatatttttactttgtcaaaaaaaaaaaaaaa

SEQ ID NO: 6623 - DNA, 476 bp, Glycine max
atatcaacccattagacactattgaattgaagaaaagaggacattattctagagtcaaattaagatgaaggccattactatcattttgattgttctgcttgttctttccgttgggattgaaaatgaagggccattgaaagtgattgaagcaagaacctgtcaagataggttgggcgcgctaaactgtatacaagacgaatgtcatattagttgcataaaaaaacatggaaagttaacaaaagttgggtgcagtatgcctttatatgattgcatatgtctctacccatgttaataagtgtttgaccttcttcctacattgtccctatatgaatgtcaatttatttgtaccagacaattatggaatcaaagaaaataaaattactttttggtaaaaaaaaaaaaaaaaaaaaaaaaaaaaaagccgcccgttttaaagatcccaactttacttccccggcctggcaacgtattacttt

SEQ ID NO: 6624 - DNA, 628 bp, Glycine max
atcctcccctccccaccgaagccaacgaccgaacgaaccctagactccaagcgcacgaggagagagagagggagatctcccaggtcgcgaccatggcgatgcgtgcgctgtacaacgagatccgcgcgatgaaggtgcgcgaggtgccggcgtacctcaagccgcgcctcacctggtccaacgtgaagaagagcaccgaccaggcggtggaccgctacatcgagaagtacatcgagaccagctcggttgacccgctcttccacgtctgcttcggcggcatggccttctcgtacctcgtgggcctgccccaggagcgccgccacctcgagcacctcgagaagcacggcggccactagatccggatccgccccgcgcaggagagcttatctacggttgattcaggatggtgctctccgtttttcttctactgatgggctacctggagttgatgtctatttgatggctggtttattttgtgtcggaaggcagcaatgaactgtctagtccactgttacgttcctccgcgtcttgtcataagcaacttcaaactggaagtgcatgcattgtgattaaaaacattttcagcgaatcgagtacaagttcttgcagtataaaaaaaaaaaaaaaa

SEQ ID NO: 6625 - DNA, 769 bp, Glycine max
  misc_feature (665)..(665): n is a, c, g, or t
tctcccgtttccaccccccaactcctcctcccctccgcccgagaaatcccaaccatttctcctcctccgcctcggcacgcggccgccggcacacgctgcgcaggaagtgggaaagggcgcgatggaggatgactcgccagcgacgaagacggtgaagggcgccgtgacgggtctggccgcgggcaccatctggggcaccatcgtcgccacctggtacgacgtgccccgggtggagcgccacgtcgcgctcccgggcctcgtccggacgctcaagatgtgcggcagctacggggtcactttcgccgccgtcggagggctctacatcggcgtggagcagattgtgcagagccagcgcaagaagcgcgacttcgtcaacggggccatcggcgccttcgtctccggcgccaccgtctatggctacagaggaaagagcattaagtctgccctcatcggtggttctagcctggcattcacatctgccattctggacgttggcggtaacactaccagagtggacaatggcaaagcgtaccatgcatacacaacggaaaagaagcccgagcctgcgcattgatcaaggttgtctacttgtagcacaaatcatgcaaaccagctcggtgaatttttgagctgatgtgtgctgttatgtctgttttgctgatgcncctagttcctttgcaaagctgtagtaacttgttttgctcgagggcaatacaacagacctggaataaatatcttgctttattttgcttcaaaaaaaaaaaaaaaa

SEQ ID NO: 6626 - DNA, 759 bp, Glycine max
  misc_feature (534)..(534): n is a, c, g, or t
  misc_feature (562)..(562): n is a, c, g, or t
  misc_feature (578)..(578): n is a, c, g, or t
  misc_feature (599)..(599): n is a, c, g, or t
  misc_feature (610)..(610): n is a, c, g, or t
  misc_feature (624)..(624): n is a, c, g, or t
  misc_feature (635)..(635): n is a, c, g, or t
  misc_feature (680)..(680): n is a, c, g, or t
  misc_feature (684)..(684): n is a, c, g, or t
  misc_feature (712)..(712): n is a, c, g, or t
aaaatcacgaccaacacgcaccggatcttgaccgaccgaaccattcagtgctcgcgctcactcacgcatcatagccaagttaagcgggaaggaaggaagggaggaagccatgtctgccgcggagggagccgtcgtgttcagcgaggagaaggaggcgctggtgctcaagtcatgggccatcatgaagaaggattccgccaacctcgggctccgcttcttcctcaagatctttgagatcgcgccgtcggcgaggcagatgttcccgttcctgcgcgactccgacgtgccgctggagaccaaccccaagctcaagacccacgccgtgtccgtcttcgtcatgacgtgcgaggcggctgcgcagctgcggaaagccgggaagatcaccgtgagggagaccaccctgaagaggctgggcgggacgcacttgaaatacggcgtggcagatggccactttgaggtgacgcggttcgctctgctcgagacgatcaaggaggcgcttccggcggacatgtgggggcccgagatgaggaacgngtggggcgaagcctacgaccaactggtngcggccatcaagcaanagatgaagccctttgaatagntcatccattgnactcatatgccacnccacttccgtntattatccctccaacttttgttgcctggccggttcactcatgtcnccanattgtatttgtattgtgtgtttatgtgnactgacgcctatgtaaaatgagcattcaataaatgaacaaattgtgg

SEQ ID NO: 6627 - DNA, 1602 bp, Glycine max
  misc_feature (847)..(848): n is a, c, g, or t
cggattccaccgtctcttttctttcccctttgttaggaacaacaccacgccaccacctttgtttacgaactcgtcagacttgatgactcatcacaacgtcaccaccaccgcctaacgacgtagagcaccttctctctcctccaattggccattgcttaagttgacttgctgcgaaggttgctttgatcattcgaagcgcctgagggttttgttcttggaatccgaaaatggccgcagttcggaggcgggtgtggcagttatcttcaattccaggtttcggggcttcgaaattggaagtgtcgtcgtcgttccaaagagcaattctcgatccatttcctgtttcggggaccagacacttttcccaagtggtgaaatccaacggcaaacactcgttccaaagagcaattcttgattcatttcctgtttcggggaccagacacttttcccaagtggtgaaatccaacggcaaacacctgttcctcgttgacaccttggcccttgttaggagactggaaggcgaaggagtgccctcaaagcaagccgaggcgataaccgctgccataactgaggttttgaatgacagtctcgaaaatgtgtctcagtcgttggtatcaaatggtgagatgcagaaaattgaaatgatgcaagaatccaacctgtctaaggttaaagcggaggtgcagagctcacagggacaccatttttctctcttacaacatgagactgagaagcttaggaatgatatagagaagatgcgtagtgagctgaggcatgagatagataaagtcactgctgggcagcgattagatttgaaccttgaaagggggagaataagggaggaattgtnnaatcagaatgctgaatctaacaacctgacaaacaaacttgatagagagatccattctttaagagcacaactggaagcagccaaatatgatgtcataaaatactgcataggaacacttgtttcgatctctgctgttggtcttgctgttttacgcatattgatgtaaatggactgtattccaattaacatccacaaagaggaggtggaaaagaataagggtaactccgtagctgcattgaagatttatcttctgtcagagaaacaagtgcaactttttattttggtccataccagtggagctgaaaggaactagctccaatcaggcatgaattgggcctattttttaagccccattctatattcttttgttaatttatttgccatgccctttgggatatttgtgcaatttgtgcgtggctgtatggtatgaatacaatacaagcaccttggattataatgcctcgacccttctaccaaagtggaaggatcaaaatgcttattggctccaagtctatgcgaattaggttcctttattcgcttcaaattcacgatgttgtacaatcgatttataggcatagtaatacataatattataaccaatgaagaataaagagaatatattctcatatattggttaattgctcatacctgtccatagaattgactgtaaccagggtttttaaaactactgaaccgatcaaaatattaaaggttcatgacaacctctagcctgtgtcctgtgtccctttaaatgt

SEQ ID NO: 6628 - DNA, 527 bp, Glycine max
  misc_feature (479)..(479): n is a, c, g, or t
  misc_feature (504)..(504): n is a, c, g, or t
aatccaaatcatccaatccagtcgcctctttcagaagggaaagcagagagaaagaaaggagctagaaggcctcgagtgaagtgagcaagccatgggctcggcaacagtcctggaggtgatcctcgccatcatcctgcctcccgtcggcgtcttcctgcgctacaaactcggcgtggagttctggatctgtctcttgctgaccatactggggtacataccggggatcatctacgcggtgtacgtgctggtagtttaagcaacagcctctgctgcagggtccaggcttggacgagcgagtcgctgtgcaagagcaactgatgctgtctgtgttaagatagcatgtctttgtgtatgcttgtatgtattgaatattgcggatttcatttatttggggagctcggtattgtcgatcctgtgatgtcacgagtgtacgtagctcggggactttagggcattcgtcggctgtagtgtttgtgatnttaaatttaaagtattggatgtccnaatgattaaaaaaaaaaaaaaaa

SEQ ID NO: 6629 - DNA, 577 bp, Glycine max
tcattctgtgataactttctaccagcgattaatttgattagcattctctgctatttcttcggtctttcttgagaaaatgtcttgctgtggaggaaactgtggttgtggatctggctgcaagtgcggcaacggttgcggaggttgcaaaatgtacccggacttgggcttttccggcgagtcgaccacgactgagactttcgtcttcggcgttgcacccacaatgaagaaccagcacgaggcttctggcgagggtgtcgctgagaacgatgcatgcaagtgtggatctgactgcaagtgtgatccttgcacctgtaaatgaataatgaaacctctctaaggtggcagagataatcagagtttaattatattaagtaaccctaatgatgttctaggttttgttttacggtgtaataatggctgcaggcttttgtcttttagccgataatggttttcgtttgtgttgacgtatctagtctctagatgtctctgccatgtgtgacggatgagtcagtttgtacttttttctttttttttttcaaattgaaatttcatatttatccgaaaaaaaaaaaaaaaa

SEQ ID NO: 6630 - DNA, 865 bp, Glycine max
caacatttttgtcacgacagatctccgagcttggtatctatcctgctgttgatcccctggattctacatctcgtatgctttccccccttattttgggtgcggatcactacgaaactgctcgtggtgtacagaaagtgcttcagaactacaagaatcttcaagatatcattgctattttgggaatggatgagctcagtgaagatgataaattgactgttgcccgtgcccgtaagattcagcgattcttaagccagcctttccatgttgctgaagtcttcactggtgccccaggaaaatatgttgagttgaaggagaacgttgccagcttccagggtgtgttggatggaaaatacgatgaccttccagagcagtcgttttacatggttggcggtattgaggaggtcattgcaaaggccgagaaaattgctaaggaatctgcagcgtcttaatcacacacagccctgttctcattttaatcccttttttttttgtaattgctaaatttaataatttaggaactcttggcaatgccaaacaacaaaattttccattttttgggtatgaaaatgtatcaggttattccttccttccattttaatgttgccgactgtgagatgaactacggtcaatgtctgtggccaaactgcccccctgtttttaagttgtgttatttaataaggggaaaagggcaagaggatgtacattttttactttctggttgagaacgttggatgcattaatgttaaaaactctgcaactgttccacctggtccatggccagcgtaatttgagttccttactgaatattggagattgtattgtcttttttatgctaattatttaatcttaaggattctttttaaaa

SEQ ID NO: 6631 - DNA, 612 bp, Glycine max
atcataacacaagcttagaatcataaaaccaactaagtctccttattttcttatcacaagacaaaagagaaaagcaaaagacaatggcttcggctctgagttttttcacatgccttgttttgactgtgtgcatagttgcatcagtagatgcagcaatctcatgtggcacagtgactagtaacttggctccatgtgccgtctatctaatgaaaggcgggccggtgccagctccatgctgcgccggagtttcaaaattgaacagtatggctaaaaccacaccggaccgccaacaagcatgtaaatgcctaaagaccgctgcaaagaacgtcaatccaagtctagcctctagccttcctggaaagtgcggtgttagcattccctatcccatctccatgagcactaactgcgacaccgtcaagtgaaatgggaactcatatatcatcgtgaggatgaacagtatggtctagcataaataaaagagtgtctatctacactgacctcagcatgtcctagtttgtcttggttttattttgcagtcgaaagtttgtcatattactttgtaatcttttgctttatattgtgtcttaatgatgtttaaaaaaaaaaaaaaaa

SEQ ID NO: 6632 - DNA, 1537 bp, Glycine max
tcagctacgtaggcccccccccccccgagaaagaaagtgagatgagataggaaacgaaagcggaaaggaaggaagaaagaaagaaacaacactgactgaacagaactcaagctcaacactgtctgtagaaccaggttaatagaggtccaaggccaaacttgcctttaaggtttgaaccgactgactacaatacactcctcacttacaaatttcttatacaatccatgattgtgttacacctttttgctgctccccttccttcttgcactaccattacatgctccaaacatttttcccatgacaaccactttgtgcgatcttcaacggttccgcggctatccctgagccatgtcagaacaaggatattcttatgtagtgctagaaatcgacagaaggatttgaatggtagggacttcagtatagacattgttaaagaagatcaagagcttgaggatgatggtgacgatgggtttttggctcaaggaatgtatgcaagaagggatgcaaaagacattgatgaagaagaagcacaagaaaatgaagatgatgatagtggatattcaggtcgaggaccatatacaggtaggccagggaaggattatgatagagatccagaacttggtaacattctcgggagttttctagaggacccccaagcagcacaatccaaattggaagacagactaagaaagaaaaggagcaaaatattgcacacaaagactggatcaggaaaaccaatgaaagtgtcatttaacaaatttgatttttcaaactcatacatatggtttgaattttacaatgttccattgacaaaagacgtatccttaatttgtgatacaattcgagcgtggcacattatcggacgtcttggtggatgcaatgccatgaatatgcaactgtcacagtctccaatggatgcacgaccgagttatgattatattcaaggagcaaatgtggaaccaactacattttacaacattggggatctcgagttgcaagacaacttggctcgaatatgggtggatattggaactgttgaaccattgcttctggatgttttgataaatgcattgacacagataagctccgattttgtggggatcaagcaagtaatgtttggtggatcagaatttgagaattggaatgacagtttgaaatcagaggatgcaggttatggtgttcacaagatctagcagccaattttatagacttatgaggattttgaattgagcgcaatgaagaggaagccatcaaatgtatcactttttcgtaacagttagtattagactgaagaataagcagggttgtaagcatttatcctagttgtatatttttttaacggcaggtactaaagcttatgtcaacttggtggagtgtatttttatttataaaaatgctggttctaagagttgtgcaaattgcaataaatgtaattagaaaatcaaaaaaaaaaaatgtaactttataatccttggtggagtatatttttatttataactagtcggtaacccgtgcgcatgcacgggtcttttatcta

SEQ ID NO: 6633 - DNA, 559 bp, Glycine max
tacggctgcgagaagacgacagaagatcacaatttagaacttcataatactgaaaacaaagtagcatagatattcaaggtaagatgggagagaagaaagttttggctcttgtcatgcttgttgtggcttatggtttggcagtaacaacattcactgcttgtcaacttcctccaacgtgcaatgggtatgagccattaatttaccaatgtgtgccttatttggttaatccaggcccttctactccaactcctcattgttgtgatggagcaagagtggcgattcatagagccaacaatgctcaagctattaagaatttctgtagttgtttggaggatgctggaccaaatttatattttcaaaagcagagtttggtactacttccagcagcctgcaatattaaaccttcctttgattttagtaaatgtgtatatggtgattaactgtgcaagcataaatttgcggataaattgataagtagatgtaatagaaataaatattttcaataaaatagagagagtattgttcgaaacggtttatgatgtcaaaaaaaaaaaaaaaa

SEQ ID NO: 6634 - DNA, 1574 bp, Glycine max
tcagctacgtaggcccccccccagagatttgaagcctgagaatttacttttggactccaaatgtaatgtcaagattgctgattttggcttgagcaacatcatgcgtgatggccactttcttaaaacaagttgtggaagccctaactatgcagctcctgaggttatctctgggaaactgtatgctggacctgaagtggatgtctggagctgtggtgtaattttatatgcgcttctttgtggcactcttccttttgatgatgaaaacattccaaatctcttcaagaaaataaagggcggtatttacactcttcccagtcatctatctcccaatgctagagatttgataccagggatgcttgtggttgaccctatgaggagaatgaccatacctgagatccgtcaacacccatggttccaagctcgacttccgcgttatttagctgtgccaccaccagatacaatgcaacaggccaaaaagattgacgaggagatccttcaggaagtggtgaaaatgggatttgacaggaatcaattggttgaatctcttgggaacaggatacaaaatgagggtactgtggcatactatttgttattggacaaccgattccgtgtttccagtggctatcttggagctgagtttcaagagaccatggattccggttttaatcaaatgcaaaactcttcagttgttggaaaccgttttccaggctacttggagtatccgggagtaggatcgaggcaacagttccctgttgaaaggaaatgggcccttgggcttcagtctcgagcccatcctcgtgaaataatgactgaggtccttaaagctttgcaagaattaaatgtttgttggaagaagattggtcactacaacatgaagtgtaggtgggttgctggcattcctggtcatcacgaaggaatggttaacaataatgtagataataataatttctttggagatgattccaacatcattgagaatgatgctgtttctacttcaaatgtggtcaaatttgaagtgcagctttacaaagcccgggaagaaaagtatctgcttgatcttcaaagggtgcagggtccacagtttcttttcttggatctatgtgctgctttccttgcacagcttcgggtcctctagagcaaagagcttaggctcacaagagacataaatatgccttgtgtttcatgtgaataagcttacattgtacatataagtatcttttcggtcgaagcttatcctgtgttttctacccgtttttctgtgggtaaacattataatgagccaattctaaggcttcgttaacaatggtgttcgactaggttttcctttcacttgatgattttaattttatcagtgcagtgaagtatatggggaatgtttttaacagaattaccccccaactcacagtgatatatttatggttatcaaccaagtgctgtaaatgactgttgccattgggaagggatgtctaggctgcttctaacttttccagattagcctttgttgttctataaatgtaatgtcatattactcatgtctgaatgctatgtactgtgttcatccaacgggccattcc

SEQ ID NO: 6635 - DNA, 1254 bp, Glycine max
ccacgcgtccggccaacacttcacgagataattacatccaagattaaagctcatgcagagcttttgaattcatcaaggtctagcattggtcaggattcccaggctggaacaggtaatctgcccttcagccaaggtcgcccccccccccatcagttgccaaaacagaagcgtaagaatggaatatctattgctggaactctgttggctgtgagccctgtatcacctcttatggctcctggtgggaaagcacaggttgctgctaaggagcttcttgattcaattttggatgctgttgttcgaatatttgagaatcatgtcattgttggggagcttttggaagcaaaagcaagtcagcatgctgacataaacacgccaaaatcattgccagtagatgtaaattggaaccctgattctgaagcatctcaagtcaccggaggttacagcataggtttctccctgacagtgttacagagtgaatgccaacaacttatatgtgaaattctgcgggccactcctgaagcagcatctgctgatgctgctgtgcaaacagctaggcttgcgagcaaagtcccttctaaagataaaagggatggatctgaagatggtcttacctttgcatttcgctttacagatgcttcaatatctattcctaaccagggagttgatcttgttcgccaaggttggagtaggaagggtcccaatgtgcttcaagagggttatggttctgcagcagttttgcctgaggagggcatatatttagcagcatccatataccgacctgtgcttcagttcacggataaagttgcttcaatgctgccaacaaagtattcccaactcggcaatgatgggttgctagcttttgtggagaactttgtgaaggaccactttttaccaactatgtttgtagactaccgaaaaggcgtacagcaagccatatcgagtccagctgcatttcgtccaagggcacatgttgctactacttacacttcatcaattgagaagggtcgacctgttttacaaggattattagctatagatcacttaacaaaggaggtgcttggctgggcacaagcaatgcccaagttctctaatgatctggtgaagtatgtgcaaacttttctggagaggacttatgaaagatgccgaactgcatacatggaggctgttcttgagaagcagagttatatgcttattgggaggcatgatattgagaagttgatgaggatggacccctcaagtgcatatttaccgaat

SEQ ID NO: 6636 - DNA, 1555 bp, Glycine max
tcagctacgtaggcccccccccgaaagaactgagtagagagacctgggtgggcgagaccaaggcctcttgaatgccttggaacaactatatttcttttccaaatttctgttcaatatttcctctgtaaatccatgttactgatactgatattccacctatatcatgtttgaatgatataatgtaatcagcatacataacattttctttccttgatgagcagtatgtagttgggtttgttttactggtttcataaatgagataaattgagcatcatatgctcaagtaagatccctctcttcaaaatattaaagcattatttgtggtactttaaattctttgttaaattgcaggcttggacagacaactcaaagagcatcaaatcatgttgggggaaaataccatcacagtcgttcagacagtgcacctacaaggagtctagcttcatttgctcaagattataggaaactggcaattgattgcctcaaggttttacgcatagagatgcaattggagacagtattccatatgcaggaaatggcaaatacagaatacttggatgaccaagatgctgaagagccggatgacttcatcatttcgctcactgcacagataacacgaagagatgaggaaatggctccttttatttcaaatgcaaagcggaattatatatttggtggaatttgtggggttgcagcaaatgcatctgttaaggctttggcagatatgaaatccataaatctttttggcgttcaacaaatttgtcgaaatgctattgcattggaacaggcattggcagctattccatccataaatagtgaagcagtgcaacagagattggatcgagtccgcacctactatgaactattgaacatgccatttgaggctttggttgccttcattacagaacatatacacttgttcacccctgctgagtatgccaagcttcttaacgttcaggttccaggaagggaagttcctcctgatgcgcaagatagattatctgaaatattatccatgtagaatgttctctttcgttcctattccagaatttttggactgttggggtgattgcatcaattatatttctgattcatatttctgaaaaaatgatgatgcaacaaaccgatgccgatgtccgatcttacagcaaattacaagagtagactaccagtgaaaagatggttttgattctgcccttggtgatagcaattccatttgctcactcaattgttggtaatgtaatggtgatgtcaattttggttgccgttgttgctttccttttgggttaagtcgcttgctcgctctatttttttgggttgagtttgggtgtgatgagcaatttcattgaagtcaatatgaagaacaacctgaaattcacatgtatatttttcacgctaaacttattgtatatttgctttcttcaattgtgttgcctgtgtaaatgaaattttgtcgaggagggattccctcttgattattttcaaaaaaaaaaaaaaaaaacttgaactaatattgaacttttaatagcaattaaaacacaactaatattctatt

SEQ ID NO: 6637 - DNA, 1792 bp, Glycine max
cttttgtggagaactttgtgagcgacctcggccccccccccccgtttgtagactaccgaaaaggcgtacagcaagccatatcgagtccagctgcatttcgtccaagggcacatgttgctactacttacacttcatcaattgagaagggtcgacctgttttacaaggattattagctatagatcacttaacaaaggaggtgcttggctgggcacaagcaatgcccaagttctctaatgatctggtgaagtatgtgcaaacttttctggagaggacttatgaaagatgccgaactgcatacatggaggctgttcttgagaagcagagttatatgcttattgggaggcatgatattgagaagttgatgaggattgacccctcaagtgcatatttaccgaatctgcttggtcagttaaatgtggaaagtaattcatctgatgctgaaacaattgaggctgaattagaacttagtgaattactgctaagtttgcgtcctattaagcaggaaaacctaatccatgatgacaacaaacttattctgttggcatcccttagtgactcattagagtatgttgcagactctattgaaaggcttggacagacaactcaaagagcatcaaatcatgttgggggaaaataccatcacagtcattcagacagtgcacctacaaggagtttagtttcatttgctcaagattataggaaactggcaattgattgccttaaggttttacgcatagagatgcaattggagacagtattccatatgcaggaaatggcaaatacagaatacttggatgaccaagatgctgaagagccggatgacttcatcatttcgctcactgcacagataacacgaagagatgaggaaatggctccttttatttcaaatgcaaagcggaattatatatttggtggaatttgtggggttgcagcaaatgcatctgtcaaggctttggcggatatgaaatccataaatctttttggtgttcagcaaatttgtcgaaatgctattgcattagaacaggcattggcagctattccatccataaatagtgaagcagtgcaacagagattggatcgagtccgcacctactatgaactattgaacatgccatttgaggctttggttgccttcattacagaacatatacacttgttcacccctgtggagtatgccaagcttcttaatgttcaggttcctggaagggaaattcctcctgatgcacaagatagattatctgaaatattatccgtgtagaatgttctctttggttcccagaatttttggactgttggggtgcttgcatcaattagatttctgattcatatttctgaaaaaatgatgatgcagcaaaccgatgccagtgtccgatcttacagcaaattacaaccgagtagactaccagtgaaaagatggttttgattctgcccttggtgatagcaattccatttgctcactcaattgtttgtaatgtaatggtgatgtcaattttcgttgccgccgttgccttccttttgggttaagtcgctcgctcgctctattttttttgggtattgagtttgcgtgtgatgagcaatttcattcaagtcaatatgaagaacaacctgaaattcacatgtatatttttcatgctaaacttattgtatatttactttcttcaactgtgtggcctattctagtgtaaatgaaattttgtcgagggattccctcttgattttcacaaaaaactcgaatcttcttgcactaatattaatagcaattaaaacaaaaaaaaaaaaaaagggcggccg

SEQ ID NO: 6638 - DNA, 1065 bp, Glycine max
cctcgtgccgaatcctcgtgccgaattcggcacgagggaaggttcaaatgaaaattccgatggagtaggtggtgggaactggagaggtggttaccagggtagaggtagctcggacagaggtggctttagaggtagaggttttcggggtagaggagagcgtggtgggtttggtggccgagcggagcgtggaggcggctttggtggccgatgggaacgaggaggtggctttggtggtagaggtagatcagacagagaaggttgtggtggtaggtggggatcagaaggaggacgtggaggccgaggcaggggaaggaatgatcaatctggtggttggaacaacagaagggattctggtgaggatgggccctctgactggaagaagggggcagaaaatggtggatggaagaatggtaatggatctcaggcttggaaccaggatactggtgacaaggataggcaaagctggagccagggaaatgcagataaggagcgtcctagctggaaccaaggaagtggaagtaatcagagctggagttcagctagtgctggagctaacgataattggaacaacaatgggtctacacagaccgcagaagctagctggaaaaaatctactacaactgaagagaccaacatccaggacagtgggtggaacaagggatctagttcaaacactacttctcggggatggggtcaatcaagtgctgcagacaagggtcaagcatctagttggaaagaatcagcaatagatgatgcagcaggttcttggggcaagaaaaatgacaggggtgacaaaggtggatggtaattgctttcttgaacgtgctagatgggccaaagaagggaattgagttcgggcattttgtaactaatggcaaacctttttttctctttgtaaatccgtataaatctgtgctgagacttaatttttaaaatattctaaacagatctgatggatgactaatcctttctgccgtatgcagtgagcgttacaatgttcttttctgtgattgtatggcttgcagtgctttcctattttgttaaaaaataaaaaaaaaaaaaaaa

SEQ ID NO: 6639 - DNA, 2613 bp, Glycine max
aaccctaatttctcgaaaggtagggttttgcagagcctcgtcctcctctcacggtttcttctttttatcttctcacctttcttcttccactgctcgactcctacgtgggccccccccccaagaaatcagctctcaaggtcgacgctgttccagctgtggttccgccatccaagtctgccaagaagggaggcaagagacaagctcaagatgaaattgagaagcaattgagtgccaaaaaacagaagataaatgaggttgctcagaaacaaaaggaggcaaaggtgcaaaagaaggaaagtagttcagatgattcttcttcagaatctgaagatgagaaacctgcacccaaatctgctgttctttcaaaaaagatacctgctaagaatggtgctgcccctccaaagaaaggcaagctcgcctccagttcttctgaagatgactcctctgatgaggatggtgtgcgtgcaaagaagccacagaaaatggttgctgagaaacaaaagaatggagcaactgtgcaaaagaaaaaggtggaaagtagttcagatgattcttcttcagaatctgaagctgagaaacctgcagtaaaagctactgtaccttcaaaaaagacacctactaaaaatggcaatttaagtaccccagcaaagaaaggcaaggcagctagcagctccagttcttctgattcatctgaagatgactcttctgatgaggatgaagtggctacaaaaaagcaaacaaaagaagtgaaagtgcaaaagggtaaggaggaaagtagttcagatgattcttcatccgaatctgaagatgagaaacccgcagcaaaagttgctgttcctccaaaaaatcaatctgccaaaaatggtactctaagtactccagctgagaaaggcaagccagctgccagttcaagctcatctgaatcatctgatgatgactctgatgaggatgaagctccaaaatccaaggtggcccctgcagcaggcaagaatgtacctgcttctacaaagataactcagccaagtgaaagctctgagtctgattctgatagcagctctgatgaggacaaaaataagaaaaaacctgcaactgctaagctgcctgcattgtcagttgctccagctttgaaagtggaaagctcagatgatgaatcaagtgaaagctctgatgaagacaatgatgcaaaacccgccgtaactgatgtgtcaaagccttctgctcttgcaaagaagaaggttgacagctctgattctgatgatagcagctctgatgaagataaggggaagatggatattgatgatgatagttctgatgaaagtgaagagccacaaaagaaaaagactgtgaaaaatccaaaagaaagcagtgatagttccgaagaagacagtgaggatgaaagtgaggaggaaccctccaaaactcctcagaaaagagacagggatgtggagatggttgatgctgcctcgtctggaaagaaagcgcctaagaccccagttacacccaaagaagaaactggcgcttcaaagacactatttgttgggaacttgccatttagtgttgaacgagctgacgtggaagatttcttcaaggatgctggagaagttgttgatgttcgatttgctacagatgatactgggaagtttaaaggatttggacatgttgagtttgcaacagcagcggctgctcaaaaggcccttggattgaatggacaacaattgtttaatcgtgaactccgacttgatttagctcgggaaaggggtgcatatacccccaacagcagcaactggaacaactcatcccagaaaagtggaagaggccagtctcaaacagtatttgtaaggggtttcgatacatcccttggagaagatgagatacgagggagtttgcaagaacattttggatcttgtggggacattaccagggtgtcgattcctaaagattatgagtctggtgctgtcaaggggtttgcttacgtagacttcagtgacgttgatagcatgggcaaagctctagaactccatgaaactgaacttggaggttataccttaacagtggatgaagccaaacctagagataatcagggttctggtggtagaggtgccggtggaaggagtggtggcggtcgatttggtggtaggagtggtggtggtggtggtggtcgatttggtggaagaggtggtggcggtcgatttggtggaagtggtggtggtggtcgatttggtggaagtggtggtggccgatttggtggaagaggtggcggtggaaggggtcgtggaaatagacccaaccttgctgcggaaggcacagggaaaaagaccaaatttgctgatgacgagtagggtggcaagtcttgcagatacttaaaaatttaatatttattttctaaactttcctgtagtgttggctccccagttttgttttggtaatccgtaattgttagtatgaattcgtagaaattctgttatatggttgatgatacattgttttatcgcatgaattattataatataatatttgtggctctcttcagaaaaaaaaaaaaaaaaaaaaaaaaaaaaaaaaaaaaaaaaaaaaaaaaaaaaaaaaaaaaaaaaaaaaaaaaaaaaaagggga

SEQ ID NO: 6640 - DNA, 1891 bp, Glycine max
acgaggagagagagagagagagagagagagagagagagagagagagagagagagactggtgccgaattcggcacgagaaaatgtctagcatccacaggaagtgcaccaagtactcctcaaaggatcaatttgaattctggaccctcagctgcgcccgccccccccccaacagtgcttaatacaacagctcagaaaaggagttctttgaaatctcatactacgtccagtgctccacttatcaataaatcagatattatacccgtaattgtccccagaactagcatgaggtcagagcctgtggctgattctagaaaagaagttggtgtttctggaagaacgatgccattcccctcacagtcaaaggcagcagatgtacgtaaatttccgaacaacagagatgatgtggataagcccctctctcctgtaatcgaatctgcagcttctaagggtagtgaattaagtggttttgcagataaaaataatttccctgcttctgtaagctcaacgcaagatgaagctcgaggactgaaagtaaacagagatgtatgctctgtcgaagtacaaaaaggagggagaatgcgctcacttctcaatttagaaaagagggaacgatctcttaattatgagggacctagacaagggatttctcatggaaggatatcatcagttcatgtgctccctttcagtgggagcccatgcgctcttccctgagcctcggggaaggctacagtttctgctaccgatgaagattccattgctgatgtgatggaacagcatgacgaatttcttagttcaatgctggctcgttcagctaagttacagatggtcttcagatgttgggaaagaaatgatgttaaggaggtcattggcataatggcaaggatggatgatcatgctgtgattgctgatgttgttagcattataatggaaaaaattgatatcattacacttgagatatgtgctggtcttctgccacttctaactgatcttctacaaagtgaaatggaaagacatctaggaatatccttggaaatgctattgaaactggtcagaatatttggttcagtaatctattcaaccgtatcagctacacaacctgttggtgtcgatatcgaggcagagaacaggctagagcgttgcaacctctgcttcacagagcttgaaaaagtcaaacgttttttgccttctctttcaagaagaggaggatcaattgcaaaatctgcacaagagttgaatctggctttgcaggatgtttcgtgatcttttcctgattcaattatttccgccgctcaagttttaccggtgctttttaggggttttgtgcattttaaagatttaaacctccatacaagccaccgaatagtttgatgcattgtcatttggcattgaatgaagccttttcctgtatgtacatttattgctgttaaaaattcatggtaattgattagtggaggcactgatagctgctaattctgcgacatatactcgaagccaaagcttgaggcatgtcaccctctgctgatggttgcacagctgactataacctgtcgatatctgcttaatgtgtagatctcagtcggttccataactaacctaatatgtggcgcaagatactactgcctatctaatcttatttcaaaatttcatgatttttgttatggttctttaagtgcggttatacacagtgagtggtgccgttcatatttctatttgttgcatatttttgtatgatttttttaaaatgctttggtgaattatgccgacggataagtgtcatgtatgtgctaagaaatgagatcacagctttgccaaatgatctgatatttatggactatatgaattgtttagaattcccatattttgggttattttgactaaaaaaaaaaaaaaa

SEQ ID NO: 6641 - DNA, 2684 bp, Glycine max
gcccgggcaggtacgcggggacactctgttgttttccaaaaccctaatttatcgaaaggtagggttttgaagagcctcctcctccgttaccagtttcttcttctttatcctctctcctttcttcttccattcctctaacctaagatgggcaagtcaagcaagaaatcagctatcaaggttgacgctgctccagctgtggttccgccatccaagtctgccaagaagggaggcaagcgacaagctcaagatgaaattgagaagcaagtgagtgccaaaaaacagaagatagaggaggttgctcagaagcaaaagaaggaggccaaggtgcaaaagaagaaggaaagtagttcagatgattcttcggaatctgaagaggagaaacctgcacccaaacctgtactttcaaaaaaggtacctgctaagaatggtgctgccctgccaaagaaagacaagccagtctccagttcttctgaagatgactcctctgacgaggatgaagtgaatgcaaagaagccacacaaagtggttgctgagaaacaaaagaatggagcaaccgtgcaaaagaataagaaggaaagtagttcagatgattcttcttcagactctgaagatgagaaacctgtagcaaaagctgccgtaccttcaaaaaagacacctgctaaaagcagcaatataagtaccccagccaagaaaggcaagccagctagcagctccagttcttctgattcatctgaagatgactcttctgatgaggatgaactggctacaaaaaagcaaatgaacgaagtgaaagtgcaaaagggtaaggaggaaagtagttcagatgattcttcatccgattctgaagatgagaaacctgcagcaaaagttgccgttccttcaaaaaatcaatctgccaaaaatggtactctaagtactctagctaagaaaggcaagccagctgccagttcaagctcttctgaatcttctgatgataactctgatgaggatgaggcaccaaaaaccaaggtggcccctgctgcaggcaaaaatggacatgcttctacaaagaaaactcagccaagtgaaagctctgacagtgatagctctgattctgatagcagctctgatgaaggcaaaagtaagaaaaaacctacaactgctaagctgcctacattgccagttgctccagcgaagaaagtggaaagctcagatgatgaatcaagtgaaagctctgatgaagacaatgatgcaaaacctgctgtaactgctgtatcaaagccttctgctcgtgcacaaaagaaggttgaaagctctgattctgatgatagcagctctgatgaagacaaggggaagatggatatcgatgatgatgatgatagttctgatgaaagtgaagagccacaaaagaaaaaggctgtgaaaaattcaaaagaaagcagtgacagttctgaagaagacagcgaggatgaaagtgaagagaaaccctccaaaactcctcagaaaagaggcagggacgtggagatggttgatgctgccttgtctgaaaagaaagctcctaagaccccagttacaccaagagaagaatctggcacttcaaagacactatttgttgggaacttgccatttagtgttgagcgggctgacgtggaagggttcttcaaggatgccggagaagttgttgatgttcgttttgctacagatgatactgggaagtttaaaggatttggacatgttgagtttgcaacagcagaggctgcccaaaatgctcttgggttgaatggacaacaattgtttaatcgtgaactccggcttgatttagctcgggaaaggggtgcatatacccccaacagcagcaactggaacaactcatcccagaaaagtgaaagaggccagtctcaaacaatatttgtaaggggtttcgatacatcccttggggaagatgagataagagggagtttgcaagaacattttggatcttgtggggacattaccagggtgtcaattcctaaagattacgagtctggtgctgttaaggggtttgcttatgtggattttggtgatgctgatagcatgggcaaagctctagaactccatgaaactgaacttggaggttataccttgacagtggatgaagccaaacctagagataatcagggttctgggggtagaggtgctggtggtaggagtggtggtggtggtcgatttggtgctaggggtggtggcggtggtcgatttggtgctaggggtggtggcggtcgatttggtggaagtggtggtggcggtcgatttggtggaagtggtggtggtcgatttggtggaaggggtggtggtggaaggggtcggggaaatagacccaaccttgctgcggaaggcacagggaaaaagaccaaatttgctgatgatgagtagggtggcaactctagcagatacttaaagtttaatatttattttctaaactttcctgtagtgttggctccccagttttgttttggtattccgtagttagtatgaattcgtagaattcagttgttatatgatttgatacttatcgcatggattattatttaaatatagtatttgtggctcttcagaattatgctttcattatttgaatcaaatccgatattaatataaaaaaaaaaaaaaaaaaaaaaaaaaaaaaaaaaaaaaaaaaaaaaaaaaaaaaaaagaaaaaaaaaaaa

SEQ ID NO: 6642 - DNA, 1540 bp, Glycine max
agtgttgttccaaggtggttgaaactgacgttgatgtgctcattgatatcatcgaagccacagtgttaaaaccagagtgttgctcctttgtactctccatcatccctcttgcatagcattgcactgtttcccttttctcttctcacatcgtcattcacacaccctcttctcttcgatctcatcgccctcacaaacccttatatttacaccggcccactttcctatttgcaccatttcgttcagatcatagcgccgttcgagatcagaaaccggaaaaaataggtttttgattcgtggggttggttccaaatggcgtcattcacgatcccttgccccaagtgcgttgttgttccttttgctcatttgggactgaactctcagacccagcaacggaacgcgctggggttgaagaaatcgctctcatttggatctttgagtagtgattcggcgccaaatgggattcagtgccttaacaagaagcaatcttctgtctggaagcttcaagcacaaccaaaagaggctgttactgttgaaaattctgcacctgtacaggtcaatggacctaaaattgctccaccagaagagaaggatgaccataatggaaaaccctctggtccaagcacttctgctgatgcatcttcaatttctgcatttatgaaccaagtttcagatcttgttaaacttgtggactctaaagatattatggagctgcaactcaagcaagcaaactgtgaactcgtgataagaaagaaggaagctttgctgcctccaccagctacatttgtagctccagtgtcacaaccatttccatatcccacaaattctcttccagcagcaccacctccagttgctacttccactcctgcaagttctacatcttcaaaagtagctcctgccttacctcctgcaaaagcaagcaaatcatctcatccggcactgaaatgtccaatggcaggaaccttttatcgaagtccagcacctggcgaacctccatttgtcaaggtgggagataaagtgcagaaggggcaggtcatttgcattattgaggctatgaaactaatgaatgaaattgaagctgatcaatctggaacagtagctgaggttgtagcagaggatgggaaaccagtcagtgtagacacgcctctttttgtaattgtaccatgaagtatgagaaagaccttactttggctttgatggaaatctcccttgttggataacatgctacaagattagtacaaaggcacaagtttttcattatttgaatttcttatgagacaatgtttgtcccattttaggaagtctttttttctttttaaagacttataagacataaaagcatagcatatcagaaggaatattggtatttgtagttctaaacagttttgggattagtagtgtaaaagttttatgcatttggtttctcaaggatgaacccgctggttggttttacaagaatttgttatgacaggtttatatgcggtgaaggatggattataattaaaataaaatttaattactcatttgattcttatatctggct

SEQ ID NO: 6643 - DNA, 1895 bp, Glycine max
tcagctacgtaggccccccccccccgggaaaaattacaattactgccaccagaaaaccgatctcgttcgcctgaagaactacctaatttatttacactcccgccgacaccggcaccggcaccggcaccggcaccaaattcatttaggcccgtgcttggtttgacctacatgatcgccgaatcagttgtcttgagattgcgggattgatttgtgtggttgcagtgatggaactcttgtttggtaccggaagaaaagaaggacaactttgatcatagagagaataaaagcatgggattaggtgtgattaagaaagtagcggtaatgatactactgataatgtttctcagctaccctgtagcatactcctcatcttcgtctgagactacgatgcacactaataattgggctgttttggtctgcacatctcgcttctggtttaattaccggcatatggccaataccctgtcattgtataggacagttaagcggctaggaataccggatgagaggattatactcatgcttgcagatgacatggcatgtaatgctagaaacaagtaccctgcccaagtttttaataatgaaaaccatagacttaatctgtatggggataatgtggaggtagactatcgtggctatgaagtgacagtggaaaattttttacgggtacttaccggacgtcatgagacatctgttccaaggtccaagcgacttcttagtgatgaaggaagtcatattcttctgtatatgacagggcatggaggtgatgagtttttgaagtttcaggattcggaagagcttcaaagtcatgatttagctgatgctgtgaagcaaatgaaagaaaagcgcaggtttaaggagcttctgataatggtggacacctgccaagcctctactctgttctcccagcttcattcaccaggtgttttggcaattggaagtagtaagaaaggagaaaattcatattcacatcatttggactcagatgttggcgtttcagttgttgatcgttttacattttacactcttgctttctttgagaggctgaatatgtatgacaatgcttcattgagcagccttttcaattcatataatccaaatttgttgatgtcaaccgcatattacagaatggatctataccaatgccatttagaggaggtacctgtgacaaacttctttggttctgtaatgaagacgatacatactgattcagcctacagatcccggtcaaataaaaaaatcggggcagcaaaaaccaaaatgtctccggatgaatcaatatctgacagtgactcagatgaggaggatcagtttaataatttaactgctgagaaatatctccagtatagtgttggacaactatggagtgttattctcagcaatgcgaatacttttgaaagcatcgatagtttggtgtgctatggactgcttttaatgcttcctttgttgatattttccacatggctatcaaagtatgattggggaaacattccataattttttagcagtgccgagacatttcttgatttctttgatgctgctatgtgccacttttgcttgaaatgcaatttcacccaaaaaagaagattattggctgcataatatggggggcaaactactgagagagcagcttcatagttgttgcctatcagctgtattattctgttagccattgttttttgccatggtgcagttcattctggtagccattggtatttgcctgctgctgctgtcatgtttcgctttgtattttgatgattatgattatggtggttgtaaactgtatgatttttgtaaaaccgttctctcttttgtttagatattacgttgatgtccaacattggaacattgctcttttaagaactcggaaatgaatatgtttgatcattttatct

SEQ ID NO: 6644 - DNA, 1341 bp, Glycine max
ctcgagccgctcgagccgaaattaatctaatattatagccatataagccaatggtgcatgtgtccatactataaatactcctcgagcgactacggggccccccccccctcctcctttcatctttcaatacaatattgctctctaagctttgattcttcttaattcatacccttcccacactcattcattgttgtgcgtctggttttctgcctgaaatggagtacatgaaccagagaccaaaatatgattgccttctttttgatttagatgatactttgtatccactaagcactggtcttgcaaaagcatgtggccaaaacattaaagactatatggccgaaaagcttggcatagagaaaagcaaaattgatgacttgtccaacctcctctacaagaactatggaacaactatggctggtttaagggcaattggatatgactttgactacgatgaatatcacagttttgttcatgggagattaccttatgagaatttgaaaccagacccagttctgaggaacctcttgctgagcctaccctataggagactgatcttcacaaactcagacaaagtccatgcagttaaggcactaagcaggctaggattagaagactgctttgaaggaatcatatgctttgagacccttaatcccatccacaaaagcactgtctctgatgatgaagatgacattgaatttgtggggggttcaggcacaaccaatccaaccacaaaaaaagatgctagcagctttcaaatctttgacatcattggccattttgctcaacccaatccccacacagttttgccaaagacaccaattatttgcaaaccatcagaaaatgccattgagttggccctcaagatagccaaccttaatccacaaagaactttgttctttgaggatagtgtccgcaacacacaagctggaaaacgtgtgggtcttcacactgtgctggttggaaaatctcagagaattaaaggagcagattatgcattagaaagcatccacaaccttagggaggcagtgccagaactatgggaagatgacataaaatcagaagttgcttatcctggcaagcttgctgtggagacatctgtgactgcttagatcattgatgaacaaaaaaataaaataaaaaaataagaaaaagagagagaaagagagaagtcctttgtgaatttcccgagttgggatgtagtaattgtatgtagttgatgtagatgctttgatcatattacaattataataaaataatatgtgtagttgacgtagatgctttgataagataataataaaaaattaatataaaatattaaattctccaaaaaaaaaagaaaaa

SEQ ID NO: 6645 - DNA, 1067 bp, Glycine max
ttcgagtcagctacgtaggcccccccccctcctccttccatctttcaataccattgtactacaatattgccctctaagtttttgcttcttaatccacaccctttcccacaccctttcattgttctggttttctgcctgaaatggagtacatgaaccagagaccaaaatatgattgccttctttttgatttagatgatactttgtatccactaagcactggtcttgcaaaagcatgtggccaaaatattaaagactatatggtggaaaagcttggcatagacaaaagcaaaattgatgacttgtccaacctcctctacaagaactatggaacaactatggctggtttaagggcaattggatatgactttgaatatgatgaatatcacagttatgttcatgggagattaccttatgagaatttgaaaccagacccagttctgaggaaccttttgctgagcctgccctataggaaactgattttcacaaactcagacaaagtccatgctgttaaggcactaagcaagcttggattagaagactgctttgaaggaatcatatgctttgagacccttaatcccatccacaaaagttctgtctctgatgatgaagacgacattgagtttgtggggggttcaggcacaacaattccagcaccaaaaaaagatgttaatagctttcaaatctttgacctcattagccattttgctaagcccaatcccaacacagttttgccaaagacaccaattatttgcaaaccatcagaaaatgccattgagttggctctcaagatagccaaccttaatccacagagaactttgttctttgaggatagtgtccgcaacatacaagctggaaaacgtgtgggtcttcacactgtgctggttggaaaatctcagagaattaaaggagcagattatgcattagaaagcatccacaaccttagggaggcagtaccagaactatgggagggtgacataaaatcagaagttgcttatcctggcaagcattctgtggagacatctgtgactgcttagatcattgatgaaaaaaaaaaaaaaccaaaataa

SEQ ID NO: 6646 - DNA, 1633 bp, Glycine max
gctcgagctgatttaagaacaaaaaaaaaatacttcagactgtgggggagcggtggagacagtggaagtctgatttgacgtcgaaatgagaacttgcagctgacaaggatagtgtccatgacactgtatgcaaaatgtacaacattagcaaggagaaatgagccccattttgtcagagccgcagagacccttcatgggaggatgtgcaaaaaaaagcataagccgtccaaaaacaaaacactgcccctcacgtgatgtctcctgcgggggccccccccccagaaaaaaagttgatggatgagaagagaaagaaaaaactagaggaagctactcaatccggaagcactgacaccgtcattaatcctccatctcccatcaaacgacacgtgaagtggaagctagcccgcaccaagaaaattggtgacatgacatctgaggcaacaaaggaaatcgctgacaagattgtaaatcactttcaattcataattgtaattattttttattattgtgtgattgagtatagaataaatgtgttcttcacaggatgcgcttgaggagcaggcctcacagggttcctttgttacccatggacgtcatgatatattgactgctgccattgggcgaccagaacaccctggtcgtgtgcgtgctgtaggagccggtataaccatcaagcaatactttggatcagcttcaaggacctcctccattgctcccgaatacctgcaacagttgacgcaacaaatcaaggaccagctagaaggattcaatcacagaaaaagtcactcgacgactaatgttatccctcagccaaatgcaatcacagggactcgcactgcctcctgaacctgatgttggtccttcagctgctcgtgtcagtacaaaggagagttgtgctgatccctcagggaacgatccagacacgggtgactcatacaaatgcgggttgtatattgaagaatatcctcctcgcctggttgccctaggaagagtttatgaggggtccacaagcattcacaacattcctttgctgcatgatcaagtcaaggttggtgttgaggagattagagatgcaaatgctcccattcctgtacccactaaagaggttaaggtcatgggacaggctcttaacacattccttgcttggccgacacatcttgtcaagcgtttatcagaacagggagttgtgggacccgcgaaacctgtagatagaccggatgatgaggttgatgatcccctatatctaatgacattgaccatcccacagctttttctgaagccattgcaggttatgtgggatgctaccttgtttggcctattttatgaaaacttccctttgtacataaagcatgaagatctgtctgaaattgcacacggtggtcaatatctcagcatatctgttatacagttgtggattctgtaagtcaatttagattattgttaattacctaatttattgttttaccttcatgcataatttactttgtgttaacaacaatagacatatgactgagacaagtatgcgagccgggaatatcgatgtgtatggattcctcgaaccacagtctatccagagatctggccaatcacaaaaaaaaaaaaaaaaaaacattaagaattgaatgcaaaattc

SEQ ID NO: 6647 - DNA, 1313 bp, Glycine max
aatattttttctccgccttatctttctatcctctctctctctctctctctctctctctctctcttttccttcggagtgtgtttgcagattgatgacaagcaaccccattacgtggaagcctaagaggagaagacgacgaagaggacaaggttaactgaatcgccgcttctgtgtggcttcgttctttcgttttagttttttcatctttttagctttagagggtaatacattctttaaaaaaatggaggttttggtgggtcccgctttcaccatcgacgttccttcgtctccgccgcgggatggcggttccgaaaatcggatcttccttaacgggtcacccgaaaaagatgatgggtcgaactttcggatctcgggcccacccaagttcttcgccggcggcgagtcggagagttcgtcgtcgatcggaacccccgatgacagcgacaacgaggaggaagaagtgcagagccagttgaagatacgaactgggttgggttctttggatgctatggaagattctcttcccatcaagaggggattgtctggtcattttgatggaaaatcaaaatcgttctcagatctatcacaagtgagtaatttgagtaatctgaaggagttgcaaaagcaagagagtcctttcaacaagagaagaagggttttgatagcatcaaaatggtccagaagatcatctttctattcctggtccaacccacaatccatgcctcttttgcctgtggatgaggatcaggattatgattatgaagaggaagaagaagatgaagaagaaaatgctagaaaagttccctctgcttcatcttcttcctcttcctccttggccgaggaaaagaaacaagaagatcaagttcagctaagattcaacagaatgccagaatcttatgctgctcatatgaggcttagacttggaagcttcaaggctagaagcttttctcttgcagatctgcaagaacatgatgatgaggaagaaggtgatgatcattaaattaacatttaacatagggttttatttttgttttattcttttgttattgtggttgttactaaataaaattaaatagtattaagtaactgttaaaaaacttatccttttctttttttacttttgttttaaaaaaatggattttgctaaggggtgtactgtgcatatcctgtgggtattctagtaaagttatgaaagcttcttggtttcatagaatgacaggagttctgagctttacttttcttttgatggtgtttgtttgtttgccaatataaaagtggatatggaaattgggacgcaacgcattcatattttc

SEQ ID NO: 6648 - DNA, 1465 bp, Glycine max
ggctcgagaattagaggaaaaagaggctgagatttcatcaatgcacaatgctttgttggcaaaagaagaaaactccctctttccagcgtctcagctgcgtggtcccccccccaagatagataggatcaaaatccctattgtagagtccaaagaagatgatttggagccacatacttcagcccctatgagaaaactcttttatattattgatagtgttcctaggttgcatgatcaaataaactctctgtctcatgataaagaaaagctgcaatcaatccttgaaactagggatcttgacattaaggatctgaaggatgaagtcaaacaactcaatagaatctgtgaagactctaaaatgatcaagaatgaattgtctgagctcacctatgtattagaaaaaattatggatattttgggagctggtgaatgggttgtagataggaaatctaaaggttcgaaggaattaataccagcattggagaagcatatcattgccattctttcagaatctgaaaattcaaaatccaaggctcaggaacttgatattaagttagttggaagtcagaaggttattgatgaattaacgaccaaggttaaattacttgaagattcactccaagataggacttctcagccagacattgtacaggagaggagcatatatgaagcaccctcattacctgctgaatctgagataattgaagttgaagagggatcatcacttagcaagaaagcaatatctcctgtcccatcggctgctcatgtgcggaatatgcgaaaaggatctactgaccatcttgcactcgatattagtggggagtctgataatttgattaacagggtagataaggatgatgataaaggtcatgtattcaagtctctgagcactactggattcgtaccaaaacagggaaagctcattgcagatcgtattgatggactctgggtatctggtggccgggttctcatgagtcatcctagagcaagattaggacttattggctatttgtttgtcttgcatatatggctactggggacgatcttgtagaaaagttgtgaccaaacctacctggactgctcaacattgaatgtcctgcgtctgcaaattgtattatcgatataaaattgtccctttttattcatgtctttctttttgcttctttagcctgtttttctttagtctcgtcaattcactatttgttctctgcaatcacattttagggattcagagattctggtcttcaatgtttgggctcattttttgacagccttctttttctttaaaatcgaagcccctccattgtattagcctacaattgtttgattgcttcaatattaaaggatttggtgggtagaaaataggtagatgaattttttcgaacgttaatgtaataaaaatgtagaaagattttaaggatgacttatttatatctcaagcagtgaatgagaatgaagttgaaggatg

SEQ ID NO: 6649 - DNA, 2657 bp, Glycine max
actagttctagatcgcgatctaggacgcccccactcttccaaaccttctcttccctcttttctttctttcatccccaaatcaaaacctaaaattcccaccttcaactttctcccccaaatcgaccacccccaccactgccaagtcccattattttatatatttattcgtatatatacatacaaagagaggggggagaatggattcggatcagggaaagcttttcatcggtgggatttcatgggatacgacggaggacaagctcaaggagcatttcggaaactatggcgacgttttgagcacctccgtcatgcgggagaagaacactgggaagcctaggggcttcggtttcgtcgtttttgcggatcctaacattctagatagggttttggaagacaaacatgtcatagatggcagaacggttgatgccaaaaaggccttctcaagagaggatcaacaaatttctgtcacttcaagaggtggaaattccaattctggcatgaattctggaaatggaggaaacatcaggactaaaaagatatttgttggagggttgcctcccaccctgactgaagaaaaatttcgccagtactttgagtcttatgggaatgtaactgatgtagtagtcatgtatgaccagaatactggacggccacggggatttgggtttatttcatttgatactgaggatgcggttgatagggttttgcacaaatcatttcatgatttaaatggtaaacaagttgaggtaaagcgtgcacttcccaaggatgccaatcctggggcaagtggtcgtatgatgggtggtgctggaggtggtgggtatcaagggtatggggcatctggtggcaaccaaaatgcatatgatggtcgtatggattctagtaggtatatgcagcctcaaagcgctgcaggtggattccctccttatggttcttctgcctacagtgctcctgggtatgggtatggtccagctagtaatggcattggttatggtgcatatggaagttatggtggtgccactgctgggtatggtggacctgctgctgcaacatatgggaatcctaatgtccctaatgctgcttatgctggtggtccaccaggtggcccaaggagtacatggcctgctcaggctccttctggttatggatctatgggctatgggaacactgctgcttggggtgctccaagtggtggtgctggctctggtggcggtggtcctggttcagcaactgcaggtcaatctcctggtggagctgctggatatgggaatcaaggttatggatatggtgggtatggtggatatggtggaagtgatagttcttatgggaattctggtgcatatggtactgttggcggacgtactggaagtgctccaaacaataatgctagtgcttctggtggtagtgaactaacaagtagtggtggcagtggcaactatatgggtgggggctatggggatgcaaatggaaattcaggttatggaaatgcagcttggagatctgaacaaactcatgcatctggaaattatgggactcctcaaggtaatggtgggcaagttggttatggtgttggctatgggggtgctcagtctcgacaagcccaacagcagtaattttggtagatgaatctcttgctggatcttaaacttcaacttgaggatccctggcttttaaaagtcttaaatcatgaggtcacaatgaattcttccagcagcaatggagtggctcaaagatcaatgtcaatacacaatgggactggttgggttgcttgaatcccagtagtttgcagtacccgctttcctagtttataataagtagtatggttgaagagatactagatgctactttctatttagtatttgtttctgcgtgtagctttaatttgcttgcttatgattttagttgatctggatttgtttgttcttgcagcatttaagctatagtatcatatttcaccttatatgatggtttgatgcagtttattatctgtgttgtctttttattggtgtgtgaattttatttcttgtctgtgttcacttttgattacacagtttggcagtaagaaatcttattgtgtaggctcattaaattgccatgacaaatagaaatatgaagatgtagtcaaggtatttactgataacagtggacacttggttgaacacttcgtattgggtagcataatggtagtcatagtaaaaactttgaggatggcataatcattttccccctgtatttgcacttgtgttgtacaggaggagaggtgcacgagtgttgaagtggagccaagtgtccactcattgctaaggaatgaactttggtcagtcagtattgtgtttttctggaccaatgcgtcgccaaatttggagattcctggcttttcatgtgataaaatcccataactttcaatctggtgtgtggtggctgacagaaattgtgagggttagcagcgcattgtctatgacatgttagaagtttatcctaattttaggtctccagttgattgatacttctgattctggcacgtgtgtttgaatattcatgctccaagtaattccttgtctggaacatcttttaatgtgataagcaagatttttaagaagttcctcgttaaaaaaaaaaaaaaaaaaaaaaaaaaaaaaaaaaaaaaaaaaaaaaaa

SEQ ID NO: 6650 - DNA, 987 bp, Glycine max
gagtcacagacagtgtttgggaattttttataatgtcacagacagtgagtcactgacagtgtttgtgtgtgtctaagagagagagagatggcatcgttttgtgctgcaaggactttcaacattccggcgatgaacgccggcgttcttcgccgccgggcatcgtgggccgccggaatagtcggagcctcggtggccggcgctgcacttttgcgctcttgttcgtctaagcgctctgcgccattcgcttgcatgagcctctctactgataccagtttaaaggaagctgttcaaactgaaaaggccccagcggcattggggccatactctcaagcaatcaaagccaacaaccttctgtttgtgtcaggtgttcttggccttattcctgagacagggaagttcatctctgataatgttgaagatcagacagagcaggttctcaaaaatatgggagagatcctaaaatctgggggtgccagctattcatcagttgttaagacaactattttgttggctgacttgaaggacttcaagaaagttaatgagatctatgctaaatacttcccttcacctcccccggctcggtcaacctatcaagtagctggcttgccaatggatgccaagattgaaattgagtgcatagccgcactttgagcaccattctaatagtatatatgagtcttcaacaaactcaggtaaataatacgggagggacatatccaaccaaattggattgtttgtatcttgttggatgatgatgctcatgtccttacaaagcgaacccactggaaaggactccaattcccatattctctcataagattttgtttccattaaatctgaaagaaattatgagaaaggtttgcagctttttgtaatgccgtttcactttatcatggaccatgtttggatgtcaactctccaataaaaccatttctactacatgtttcaatgtaaattctcttgctcactgcaaaaaaaaaaaaaaaa

SEQ ID NO: 6651 - DNA, 976 bp, Glycine max
ctgagaaaaaagaagtgactgttgcagcaaagaacccaaaaacaaaaggttgaagaatttgacagagtgagagtgtaaggtagagtcagtcagagatatagaaatggcttcgtggtgcagtgttcgaagcttccaggttccggcgatggaaggcagcgcactgcgcaaccgtgcttcattggccgccagagtggggtgtttgtccgtggccggcacctccttctggcgttcctcttcgtcaccgaagcactctttgtcattcacatgcttgagcatttcttccgaaactcgtattaaggaaaatgttcaaacagaaggggcacctgcggctctgggaccatattctcaagcaatcaaatccaacaaccttctttttgtgtctggtgttcttggccttgttcccgagaccgggaagttcgtatctgatgatgttgaagaccaaactgaacagcttcttaaaaacatgggggaaattcttaaagccggtggtgctagctactcgtccgtcgttaagacaacaattatgttggctgacttgaaggacttcaagaaagtcaatgagatctatgctaaatacttcccttcacctttccctgctcgttcaacttatcaagtagctgcattgccattggatgccaagattgaaatagagtgcatagcaactttataagcatcaattgtactagtacatctggctccatcagcaaactcaggttaataatgcaggaagggacatatcttagtattgaagttttacttgttttgttctttggataatggtgctcttgtgattacatttaccatcctagcgacagtcattggatgtttcttgtttgcagcttttgtgacatcgtatattcgtatcacataagacatattatgaataagatcatttttaataaatatcttttactcgaactcacatcaattttctttaaaaaaaaaaaaaaaaaactcgagactagttctctctctc

SEQ ID NO: 6652 - DNA, 965 bp, Glycine max
  misc_feature (928)..(928): n is a, c, g, or t
cggtccggattccccattcattcattcgcgtccgggaagccctcactcttccctcttttctttctttcatccccaaatcaaaacctaaattcccaccttcaactttctcccccaaatcgaccaccaccactgtcaagcccattcatttatattttattcgtatatatacatacagagagtgagtgagagagagagtgggaagaatggattcggatcaaggcaagcttttcatcggtgggatttcatgggatacgacggaggacaagctcaaggagcatttcggtaactacggcgacgttttgagcacttccgtcatgcgggagaagaacactgggaagccaaggggctttggtttcgtcgtttttgcggatcctaacattctagatagggttttggaagacaaacatgtcatagacggcagaacggttgatgccaaaaaggccttctcaagagaggatcaacaaatttctgtcacttccagaggtggaaattccaattctggcatgaattctgaaaatggaggaaacatcaggactaaaaagatatttgttggagggttgcctcccaccctgactgaagaaaaatttcgtctgtactttgagtcttatggacatgtaactgatgtagtagtcatgtatgaccagaatactgggcgtccacggggatttgggtttatttcatttgatactgaggaggcagttgttagggttttgcacaaatcatttcatgatttaaatggtaaacaagttgaggtaaagcgtgcacttcccaaggatgccaatcctggtgcaagtggccgtatgatgggtggtgctggaggtggtggtgctggagttggtaggtacaggcaaaataatagggtggctatatttcgggaccgagaggttgaccgcaaagatcctgattatgacaggaactatgataggcntatgcaaagatttgatcctggttttgggttcaatgga

SEQ ID NO: 6653 - DNA, 1102 bp, Glycine max
atattccacccacataatgtcacagacagtgtgtctgagagagggagagagagagatggcatggttttgtgctgctaggactttccacattccggcgatgaacagcggcgttcttcgccggcgggcatcatgggccgccggaataggcggagcctcggtggccggcgctgcattcttgcgctcgacttcgtctaagcgctctatgccatccgcttgcatgagcctctctactgatacccggttaaaggaagctgttcagactgaaaaagccccagcggcattggggccgtattctcaagcaatcaaagccaacaaccttctgtttgtgtcaggtgttcttggccttattcctgagacagggaagttcatctctgataatgttgaagatcagacagagcaggttctaaaaaatatgggagagatcctaaaatctgggggtgccagctattcatcagttgttaagacaactattttgttggctgacttgaaggacttcaagaaagttaatgagatctatgctaaatacttcccttcaccagccccggcacggtcaacgtatcaagtagcttccttgccaatggatgccaagattgaaattgagtgcatagcagcactttgagaaccattctaatagtatatatgactcttccaacaaactcaggcgaataatacaggagggacatatcctaccaaattggatttttggtttgtatcctgttggatgatgatgctcaaatccttacaatcagtctagcaaacccactgaaaaggactctaattccccatattctctgtttaagattttgattcaattaaatctgagaaattatgagaaaggtttgcagctttttgtaatgccgtttcactttatcatggaccatgtttggatgtcaactctccaataaaaccatttctactacatgttcaatgtaatttaatgaagagactaacttaaagtgagttttgtgtataaagtattttaataaagttgtatccaatggcccaatgatgtaattgccccaagaaataaagttagctagtattgtattcccccttgttaaaagaaaaaaaaagaaaaataaaataaaataaataataaaaa

SEQ ID NO: 6654 - DNA, 930 bp, Glycine max
tgggtcatgggttctccaacatatttggaatctattgcatcctctgcggtacgagcagctattaaggtgaaggcttctgttattatttgcttcacttcttctggaagggctgcaagattaatagcaaaatataggccaaccatgccagttctctctgttgtgatcccccgactcaagacaaatcagctgaaatggagcttcagtggagcttttgaggctaggcaatcacttattgttagaggcctctttcccatgcttgccgatccccgacatcctgccgagtcgacaagtggcacaaacgagtctattctaaaggttgcccttgatcatggaaaagcatcaggagttataaagtcacacgaccgagtagttgtttgccagaaagttggtgatgcgtctgtggttaagattatcgagcttgaagattaagtgcattgatctaactacagtttaggcttttctgttttttggcctgcaagtttttggcagtcgcagatcattctgcttccacattttgaggttatctccaccgggtttggtgactagctatattttgtgattgaaaatgaatgttaggctaactattattacaggatgtcaaacttaaaaaataatagggaatatgttcgatgccaattttttggttaaagttttccacatggagaatgtaaaaggaagtgtatacgttctatattgtagcaatagccagttgtacgacgttatacggtttggtggtatacatctaggtctagttatgagcaatattgtggtgtgctatggtttccaatgcatacgggccaagcaattcgtaattgaacatccttttatattgatctgatttacttaccggagttgacttgtttacttaccacgtgacttttgctggatatgattatgattaacatttatcctcttattatttgttttctt

SEQ ID NO: 6655 - DNA, 1393 bp, Glycine max
tcagctacgtaggccctcaaccccaaccccaaccaacctcactctctctttctctctgttttctggtaattcatcaattgattcaaaatgcagaggctcaaactgcaactagtgctattcctctcaatctcaacttgtcacactgttttctccttcactgatgggttgttgccaaatgggaacttcgagcagggcccaaagccatcacaattgaaggggtccgtagtgacaggccacgatgccataccgaattggacaatttcggggttcgttgaatacataaaatcaggacaaaaacagggtgacatgttactggttgtgcccgagggtgactatgcagttagacttggcaacgaagcttccattaagcagaagctgaagctgattaaggggtccttctactccatcacgttcagtgcagctcgaacctgtgcacaagaggagaagctcaacgtgtcagtggttccaaccactgagaagagggactggggcatcatccccattcagactatgtatggtagcaatggctgggagtctttcacttgtggcttccgagcagatttcccagaagctcaaattgtcatccataaccctggcaaagaagaggatccagcttgtggtcccctcattgattccgttgccctcaaggttttgtacccacccaaaagaacaagagccaatttgttgaaaaatggcaatttcgaagaaggtccatatatatttcccaactcgtcttggggggctttgatcccaccgcatatagaggattctcacggtcctttgccaggatggattgttgagtctcttaaggcggtgaaatacattgattctgatcactttgctgtgcctgagggaaaaagagctattgaacttgttgcagggaaagaaagtgcccttgcacaggtagtgattactacaattggcaagacttatgacctcaccttcgccgtgggtgatgccaacaatgcatgtgaaagttccatgatggtagaagcatttgctggcacgaacaccgtccaagttccatatcaatctaagggtaaaggagggtttgtcagaggcaagcttcggttcaaggccgtctcaacacgtactcgccttaggttcctaagcacattttacaccatgaagagtgataactctggttcgctttgtggacccgtcatagatgatgtaaaattgcttggtgttcgttatcctacacttgcttgatgatgagattccacacctaatacaatcaaaacacatatgcttgattcgtgtagttgagcatgtatactacagtatttgagtattgttgagcgacttttccaagtttcatatttatgtatctatttttccatcaaatcaaatggcagtgatgattgggagttcgaaaaaaaaaaaaaaaaaa

SEQ ID NO: 6656 - DNA, 1459 bp, Glycine max
  misc_feature (1431)..(1452): n is a, c, g, or t
  misc_feature (1455)..(1455): n is a, c, g, or t
ccaaaaccttctgctgataaatttatgcccattatcgtccaccgccgtcgcccccccccccagggcaaaaacagaacagaaacagagatgggttgcaatagctccaaggctgagccaccaccgttggaaaacaccatgcatcatcatcatcatgcagacgttgcagagttccaaaaacccaaaaccctaaaagaagaagtagtgctacagattccaggatgcaaagttcatctgatggaccaaggcgaggccctcgaactcgcacaaggtcacttcacgatcatgaagatcatggagcagaacgtggcactagcaaccattataaaagttggaaacagtgttcaatggcctctaacgaaagacgagccggtggtgaaggtggatgctcttcactacctgttctctctgcctgtgaaagatggtggggagcctcttagctatggtgtcacctttccagaacagtgctatgggaacatggagatgttggattcttttctcaaggatcactcttgcttttctggtttggaaaggaataagaagagtgatcttaaatgggaggagtttgctccaagggttgaagattacaatcattttctggcaagggcaattgcaggagggactggccagattgttaagggtatcttcttgtgcagcaatgcttacaccaaccaggtccaaaaaggaggggaaacgatcctaaatactgctgcagaaaagaacaatggtggcatggtcacagaaagtatgaaccacaggagtgatgccacaaagaataatgcaacgaacgataacctcaaacgtgtgagaaagctgacaaatatgacagaaaggttaaccaaatctttgcttgatggtgttggaataatgagtggatcagtgatgactcctgtgctgaaatcccaaccaggacaggcattcctaaatatgctccctggagaggtgctgttggcttcccttgatgccgtcaatagagtttttgaagcagctgaagctgctgaaaaacaaaccttttctgccacctctcaagctgcaaccagaatggtttctaacaggtttggggaagaagcaggagaggctactgagcatgtgtttgcaactgcaggacatgctgttaacactgcttggaatgtctctaagatacggaaggccatcaatccagcctcttcagcaaatgctgcaggagcactgagaaattctgccaaaaatagaaatgttatatattaaattcctatcatgtactgctttatgtttgacaatggtgaaggcataaaattttgcctatacatattgcaatatcattttggttgttatatgtaagtattaatgtgtgtattggtcatcccaaagcagaccttagaagaaacaaactataaaaagtgtccacataaaaaaaaaaaaaaaaaaagtaagatagcattattatgctttctnnnnnnnnnnnnnnnnnnnnnnccnaaaa

SEQ ID NO: 6657 - DNA, 3012 bp, Glycine max
ggccacgccatcactttctggcaacttcagccttctccgccacagcgagactcacatcccgctcgctgctgttgctcggtggcagctctgtcaagctcttcaggtcgaagcacgaggccagcacgtgccatggcgcacgcgtcgctgccgccgtgccacgtgcttcggcgcctgaggtggcggtggttgagaaggggagggagaaagtgagggtgctgaagctgggcctcatatgtggcggtccttctgctgagcgtgggatttccctcaattctgcttgatcagttcttgatcacttgcagggggatgatttacacgtgagttgctattatattgattgcaatctcaatgcatttgcaatttcttcagctcaggtatattccaacacccctgctgattttgattttaaacttgaaagccttgcccaaagtttccagactttgtctgatttagcaaagcatctagcaacagctgtggacatagtatttccagttatacatggtcaatttggcgaggccggtgccgtgcgcccccccccccaaaagtataatgttccatttgttggcacaggatcaaaggagtgctgccaagcatttgacaagcataaagcatcattggagctcaggaagcatggattcataacagtacccagtttcttagttcaggggtatgaaacagacaaatcagaactatcagaatggtttaaaaagcaccagctggacccagacttagggaaagttgtggtaaaaccaacaagaggtgggtcaagcattggtgttggagttgcatatggtgtgaatgattctcttgtaaaagccaatgaaattatgtctgagggaatcgacaagaaagtgctaatagaaatatttcttgaaggaggaaatgagttcacagccattgtccttgatgtaggatctgatttagatagttttcctgttgtactacttccaactgaggtggagcttcaattccgtggtgcaaatgatgtgaaagagaatgatgcaatatttaattaccgtaggaagtaccttccaacccaacaggttgcttatcacactccaccacggtttcctttggatgtaattgaaaatattcgcaaaggagcatctctgttatttcaacggctttgcctgcaagattttgcacgaattgatggatggtttttgccaaattcaagttccaaattatcaccattttcccaaagtgagtttggaagaacagaatctggtgccataatattcactgacattaacatgataagtggtatggaacagaccagttttctatttcagcaagcttctaaggttggtttttctcatacaaacatccttagaagcattattcaccatgcttgcttgcgatttccaaatcttgcatcagttagtggtatatcaggtcagcttccaagcaggtcaaaatccttacaacgtaacaagtctttttctcgccgtgaaggaactcgaaaagtgtttgtcatttttggaggtaacacatcagaacggcaagtatctcttatgagtggtacgaatgtctggctcaatttgctagccttccatgatcttgaggtaactccatgtttgctttcccctacaagtgagtgtgcatctagcattgatatgggaaaaaaggctgaccacgtaaggcccccccccgtttggtcattgccttattctcttgtgctaagacatactactgaggaggtactagatgcatgcatggaagcaattgagccggaacatgctgcaataacatctgaactccggaagaaagtaatgaatgatcttatggagggtttgaaggaccacaattggtttaccgggtttgatattgctgatgatctgcctgtgaaattttcattaaggcagtggatcaagctagccaaggaagtccaagcaacagtttttattgcagtgcatggaggcattggagaagatggtacacttcaatctttgctggatgctgaaggagtgccctacacaggtcctggtgcaatggcatcaaagatttgtatggacaaagttgcaacctctgtggctttaaaacatcttgcaaattcgggagttcttaccataaataaggatgtcaggcaaaaagatgatctctctaataagcccataaatgatacatggcatgacctcaccagaaagctacagtgccaaacattatgtgtcaaaccagcaaaagatggatgctcaactggggtagcaagactatgctgtcccgaggaccttgcaatatatgtcaaagctctggaggactgtctactaagaattcctccaaattgcttatcaaaggcacatggtatgattgagatgccaaaccctcctccagaacacttaatcttcgaacctttcatagagacggatgaaataattgtgacatccaaatttgaggatgcaactggtcatggcctcacttggaaaggacacagcagatgggtggaaataactgttggcgtcataggaaaacgtggatcaatgcactcgctaagtcctagtgtaactgtcaaggaatctggtgatattttgtcacttgaggagaagttccaaggtgggactggcatcaatctgactccgcctcccttgtcaattatgagtgagaatgctttgaagagatgtaaacagcatattgaactgattgcaaacactcttcaattggaaggattttcacgcattgatgcatttgtaaatgttgacagtggagaggttttgattatagaggtaaatactgtgcctggaatgacaccttccactgttctgattcatcaggcactagtagagcaaccaccgttgtatcctcatcaattcttccgtaagcttcttgatttggcatctgaaaggtccatgtaaatctatttaatagaatgtttacattgtctatcaaatgttgttaccacttgaagttattgtgaaactttaatttcctatctggaacttgcgtccctttataatgtgaaactttaatttcaataaaaaaaaaaaaaaaaaactcgagactagttctctctctctc

SEQ ID NO: 6658 - DNA, 2565 bp, Glycine max
tggacgcctgcggtaccggtccggattccccgtcgacccacgcgtccgtgccccttctgccctcccaacccatatacttaaaaaaacccaaaaaaccaaaaataccataaaatttttcagcttctccgccgccgtacagccaccacctccgttcggatctccggcggacctactatccctactactctatttacacggaagaacaaaaaaactatcccacaaaaaaaattccaaaagcggttcggttagggtttagttttttttttatattatttcgtgtatctaatttttcatcagtaatattatttttgaggcggcgagatggcgcagattcaggtgcagcatcagagtccggtgtcggctcctcctccgaacggcgtggctaacgcgccgaacaacccgaaccagttcgttacgacgtcgttgtacgtcggcgatcttgagcagaatgtcaacgacgcacagctatacgatctgttcaaccaggtcgtccaagtcgtttcggtgcgcgtttgcagggaccttacgacgcgtcgttcactcggttatggctatgttaatttcagtaaccctcaggatgcggcgagggcattggatgtgctgaatttcactccactcaacaacagacctattaggatcatgtattctcatcgggatcctagtcttaggaagagtggtactgcgaatatttttatcaagaatttggataaggctattgaccacaaggccttacatgatactttttcttcttttggactcattctttcttgcaaaatagcaactgatgcttctggcctgtctaagggctatggttttgttcaattcgacagtgaagagtctgcacagaatgctattgacaagttaaatggcatgttgatcaatgataagcaggtctatgtaggccattttctgcgaaagcaagatagagagaatgctctcagtaagacaaaatttaataatgtctatgtgaaaaacttatcagagtcaaccacggatgaagagttgatgaaattttttggagaatatggtaccattactagtgctgtaataatgagggacgcagacggtaaatcaaggtgttttggctttgtcaattttgaaaacccagatgatgctgccaaagctgttgaaggacttaatgggaagaaagttgatgataaggagtggtatgttggaaaagcccagaaaaaatctgagcgtgaacaagaactgaaaggacggtttgagcagagtataaaggaatctgctgacaaatatcaaggtgtgaacctgtatctcaagaacttggatgatactatcagtgatgaaaaacttaaggaaatgtttgctgaatatggtacaataacttcatgcaaggttatgcgagaccccactggaatcggtagaggatcaggatttgttgcattttcaactcctgaggaagcatctcgtgctctcggtgagatgaatggtaaaatgattgctggaaaacctctgtacgttgcccttgcacagagaaaagaagacagaagagcaaggttacaggctcagttttcacagatgaggcctgttgcaataacgccttctgttgcgccccgtatgcctctctaccctcctggtgctcctggtcttggacaacaatttttgtatgggcaaggacccccagccatgatgcctccacaagctggatttggataccagcagcaactagttcctggaatgagacctggtggtggtcccatgccaagcttctttgttcctatggttcagcaaggccaacaagggcagcgcccagggggccgccgaggaacaggtcctgtgcaacaaccccaacagccaatgccaatgatgcagcagcagatgcttccaagggggcgtgtctatcgttaccctcctggccgcaacatgcaagatgtcccacttcaaggtgtagctggtggaatgatgtcagtcccttatgacatgggtggtctgccaatccgcgatgctgtgggacagccaatgcccattcaagctttggccacggctcttgcaaatgctccccctgaacagcagaggactatgctcggtgaagctttatacccgcttgtggatcagctggaacacgatgctgcagcaaaggttactggcatgcttctggagatggaccagcctgaagttttacatctgattgagtcaccagatgctctgaaggcaaaagttgctgaagccatggatgtgttaagaaatgttgctcaacagcaaactaacccagctgatcaactagcttcactctctctcaatgacaatcttgtgtcttagattcctttagtcttttgactggaatctgctttccagttattcctattccgtatgcttccccccagtttatttgcaggtgtcttagatgttttgttttagtcagagtactaaggaagtttatgttcttggtacttttggtttcactttttttcgtatctgaattgctgtaggatggattagcataacttgttggatttattagatatgcatttgcggtttggattattttcctccattgttctactggattgtttgtgtggatttcaaaaaaaaaaaaaaaaaaaa

SEQ ID NO: 6659 - DNA, 2868 bp, Glycine max
  misc_feature (2575)..(2575): n is a, c, g, or t
  misc_feature (2583)..(2583): n is a, c, g, or t
  misc_feature (2590)..(2590): n is a, c, g, or t
  misc_feature (2601)..(2601): n is a, c, g, or t
  misc_feature (2604)..(2604): n is a, c, g, or t
  misc_feature (2610)..(2611): n is a, c, g, or t
  misc_feature (2615)..(2615): n is a, c, g, or t
  misc_feature (2620)..(2621): n is a, c, g, or t
  misc_feature (2626)..(2626): n is a, c, g, or t
  misc_feature (2629)..(2630): n is a, c, g, or t
  misc_feature (2633)..(2633): n is a, c, g, or t
  misc_feature (2637)..(2637): n is a, c, g, or t
  misc_feature (2640)..(2641): n is a, c, g, or t
  misc_feature (2648)..(2649): n is a, c, g, or t
  misc_feature (2651)..(2652): n is a, c, g, or t
  misc_feature (2654)..(2654): n is a, c, g, or t
  misc_feature (2658)..(2658): n is a, c, g, or t
  misc_feature (2661)..(2661): n is a, c, g, or t
  misc_feature (2663)..(2663): n is a, c, g, or t
  misc_feature (2669)..(2669): n is a, c, g, or t
  misc_feature (2673)..(2673): n is a, c, g, or t
  misc_feature (2681)..(2682): n is a, c, g, or t
  misc_feature (2684)..(2684): n is a, c, g, or t
  misc_feature (2687)..(2687): n is a, c, g, or t
  misc_feature (2690)..(2690): n is a, c, g, or t
  misc_feature (2699)..(2699): n is a, c, g, or t
  misc_feature (2701)..(2701): n is a, c, g, or t
  misc_feature (2703)..(2705): n is a, c, g, or t
  misc_feature (2712)..(2713): n is a, c, g, or t
  misc_feature (2716)..(2716): n is a, c, g, or t
  misc_feature (2720)..(2724): n is a, c, g, or t
  misc_feature (2727)..(2727): n is a, c, g, or t
  misc_feature (2729)..(2730): n is a, c, g, or t
  misc_feature (2733)..(2734): n is a, c, g, or t
  misc_feature (2738)..(2741): n is a, c, g, or t
  misc_feature (2751)..(2751): n is a, c, g, or t
  misc_feature (2753)..(2753): n is a, c, g, or t
  misc_feature (2756)..(2759): n is a, c, g, or t
  misc_feature (2763)..(2764): n is a, c, g, or t
  misc_feature (2768)..(2769): n is a, c, g, or t
  misc_feature (2772)..(2773): n is a, c, g, or t
  misc_feature (2777)..(2777): n is a, c, g, or t
  misc_feature (2780)..(2780): n is a, c, g, or t
  misc_feature (2784)..(2784): n is a, c, g, or t
  misc_feature (2786)..(2792): n is a, c, g, or t
  misc_feature (2794)..(2794): n is a, c, g, or t
  misc_feature (2797)..(2800): n is a, c, g, or t
  misc_feature (2802)..(2851): n is a, c, g, or t
  misc_feature (2855)..(2866): n is a, c, g, or t
  misc_feature (2868)..(2868): n is a, c, g, or t
ccacgcgtccggccccttctgccctccccagccattaactgaaaaaaaaaaccaaaaaaccaaaaatactacaaatttttttcagtttctccgccgccgcacaaccaccacctcctccgttcggatctccggcggacctactatccctactactactctactctatttacacggaagaacaaaaaactatccccctcccccaaaaaaaaccccaaagcggctcggttagggtttagttttgtaccatttcgtgtaatctaatttttcatccgtaaaaatctaattttgaggcggcgagatggcggagattcaggtgcagcatcagagtccggtgtcggcggctcctcctccaaacggcggcgtggcgaacgccccgaacaacgcgaaccagttcgtgacgacgtcgttgtacgttggcgatctagaccagaatgtcaacgactcgcagctctacgatctgttcaaccaggtcggccaagtcgtttcggtgcgcgtctgcagggaccttactacgcgtcgttcactcggttacggctacgttaatttcagtaaccctcaggatgcggcgagggcattggatgtgctgaatttcactccacttaacaacagatctattaggatcatgtattctcatcgagatcctagtcttaggaagagtggtactgcgaatatttttatcaagaatttggataaggctattgaccacaaggccttacatgatactttttcttcttttggactcattctttcttgcaaaatagcaactgatgcttctggtctgtctaagggctatggttttgttcaatttgacaatgaagaggctgcacagaatgctattgacaagttaaatggcatgctgatcaatgataagcaggtctatgtaggccatttcctgcgaaagcaagatagagagaatgctctcagcaagacaaaatttaataatgtctatgtgaaaaacttatcagagtcaaccacggatgaagagttgatgataaattttggagaatatggtaccattactagtgctttaataatgagagatgctgatggtaaatcaaggtgttttggctttgtcaattttgaaaacccagacgatgctgccaaagctgttgagggacttaatgggaagaaatttgatgataaggaatggtatgttggaaaagcccagaaaaaatctgagcgtgaacaagaactgaaaggacgatttgagcagagcataaaggaagctgctgacaaatatccaggtttgaacttgtatctcaagaacttggatgatacaatcagtgatgaaaaacttaaggaaatgtttgccgactatggtacaataacttcttgcaaggttatgcgagacccgactggaatcagcagaggatcaggatttgttgcattttcaactcctgaggaagcaactcgagctcttggtgagatgaatggtaaaatgtttgctggaaaacctctgtatgttgcccttgcacagagaaaagaagagagaagagcaaggttacaggcacaattttcacagatgaggcctgttgcaataacgccttctgttgcgccccgtatgcctctctaccctcctggtgctcctggtcttggacaacaatttttgtatgggcaaggacccccagccatgatgcctccacaagctggatttggttaccagcagcaactagttccgggaatgagacctggtggtggtcccatgccaagcttctttgttcccatggttcagcagggccaacaagggcagcgcccagtgggccgccgaggaacaggtcctgtgcaacaaccccagcagccaatgccaatgatgcagcagcagatgcttccaaggggacgtgtctatcgttaccctcctggccgcaacatgcaagatgtcccacttcaagttgcagctggtggaatgctgtcggtcccttatgacatgggaggtctgccaatgcgcgatgctgtgggacagccaatgcccattcaagctttggctacagccctcgcaaatgctccaccagaacagcagaggactatgctcggtgaagctttatacccacttgtggatcagctggaacatgattctgctgcaaaggttacaggcatgcttctggagatggaccagcctgaagttttacatctgattgagtcaccagatgctctgaaggcaaaagttgctgaagccatggatgtgttgagaaatgttgctcaacagcaaaccaacccagctgatcaactagcctcactctctctcaatgacaatcttgtgtcttagattccgttagtcatttgacaagaatctgtacaccagttatttctatcccgtacgctacccaccagtttatttgcaggtgtcttagatgttttgttttagtcagagtactaaggaagtttatgttcttggttgttttggtttcacctttttcgtatctggattgctgtaggattagcataacctgttggatttattagatatgcatttgtggtttggattattttcctccattgttctattatattgttcgtgtgaacttctttaaaaaaaaaaaaaataaataaaaacgggcgccaccgggggggacctccncttttgtnccttaangagggtaattncancctggnngaanatggnnatacnggnnccngggnaanngtttccnntnnantccnccnanatacanccgnaacctaanngnaanccngggggccangngnnncaacccnntantggnnnnnccntnnccnnttcnnnnggaaacctgntnccnnnnttannaatnnccnncccnggnaagngnnnnnnntnggnnnntnnnnnnnnnnnnnnnnnnnnnnnnnnnnnnnnnnnnnnnnnnnnnnnnnnaggnnnnnnnnnnnncn

SEQ ID NO: 6660 - DNA, 1215 bp, Glycine max
cccacgcgtccgcccacgcgtccgcacattggcgtagacaacagctaatgtcggctgcgttggccgccccccccccccccaactggaaaaattccatgcctaatagtccatcttttcgtgttcctttgaatgatcacactggggagttaaataggctttcaggggtgaagcctgctaaccttgaagatatgtttggatcgctcgatccatcaattttgtctaaataccatggaatctcacttgatgttgcaggacctcagttacagtctccaaccggaatccagatgcgccagaatgtgaaccagcagctaggaggctattcatccagcctttccactttgaatgtgattggatcgcggtccttcaggcttgatcagtctggcgaagcagcctcggtggccttgaatccaagagttgctgcctttgcaaagcggagccagagcttcattgagcgcggcgtggtgaaccatcattctgaacttccttctccaaagccctctaccttctctaactggggctcacctgttggaaaattagattgggccgtaaatggagaagagctgaataagctgaggaaatctgcttcctttggatttcgaggcagcgacactcctctaacaaagacttcaaccaaaatgtcagcaaatgttgatgatgagccagatgtgtcttgggttaactcacttgtgaaggatgctccaccggaatccggtgaatctggtgaatacagtgtggaagatcagcgaaagctactgcaatgccacaatggaacagatgcgattccagcatggttggagcaattgtacttggaccaggagcaaatggtggcatgattgcaatttcgtggcttgcggtagcaactccttttgcaactcaacagtttatttatttgatgaattttttgaattttatagaatttagttagatgacaattcgcaaaagggatcttaaaatagcctaccaaggctataggatgtagaagttgggcaggaagcaagttttctgcttcagtaactcattgattccatttttttttcctgatctattttctttcttatatgttatattgagttgtaagttggaactttccattgactgaattacagcattgtagtggggatatagtattcaatataatgagactggagatgtaataattttattaattccaattccaattctcaatttgcatatcacaaaataaaaaaaaaaaaa

SEQ ID NO: 6661 - DNA, 1523 bp, Glycine max
gcacaagagggtttgcttctttgctcacaagcctgaggagcttcgccccttgtatgcttctactggttccgctattccttctccatcgtccagctacgtaggcccccccccccccgagatgggttcagttaacccaattgcacttggttctccatctgtcttgatgccacctacctcaacaccacctttgactccatctggagcatcttctcccattgctggatccatgtggtctcaatctaatgtttcggtccctaccttgcagctgcccaaaagcagattgaagactgcatctactgtaagagatactgatttagatatggaactgcttggacttgaaacacattggcgtagacaacagctaatgatggatgagatatctgctctttcctctcccaactggaaaaattccatgcctaatagtccatcttttcgtgttcctttgaatgatcacactggggagttaaataggctttcaggggtgaagcctgctaaccttgaagatatgtttggatcgctcgatccatcaattttgtctaaataccatggaatctcacttgatgttgcaggacctcagttgcagtctccaaccggaatccagatgcgccagaatgtgaaccagcagctaggaggctattcatccagcctttccacttcgaatgtgattgggtcgcgctccttcaggcttgatcagtctggcgaagcagccacggttgccttgaatccaagagctgctgcctttgcaaagcggagccagagcttcattgagcgtagcgtggtgaaccatcattctgagattccttctccaaatccctctaccttctctaactggggctcacctggtggaaaattagattgggccataaatggagaagagctgaataagctgaggaaatctgcttcctttggatttcgaagcagcagtagtcctctaacaaaggcttcaaacaaaatttcagcaaatgttgatgatgagccagatgtgtcttgggttaactcacttgtgaaggatgctccaccagaatccggtgaatatagtgtggaagatcatcgaaagctactgcaatgccacaacggaacagatgcgattccagcatggctggagcaattgtacttggaccaggagcaaatggtggcgtgattgcaatttggcggtggctctttcttgctttcttgcaactcaacggtttatttatttagtgattttttttaattttatagaatttagttagatgacaatttgcaaaaaggatggtaaaatagcctaccaaggctataggatatagaagttgggcaggacgcaagttttctgcttcagtaactactacccgttactgggttcattgattctattttttttcccaatctattttctttcttatatgttccattgagttgtaagttgtaactttccattgaccgaattacagcattgtagtggggatatagtattcaatataatgagactggagatgtaataattttattaattccaattctcaatttgcatcccccccccaacc

SEQ ID NO: 6662 - DNA, 2424 bp, Glycine max
gttttaaagagcaggcacaaaaccaagcttaacttccttgttttgtgtctctttctcccaagattctgccgaggtcttaagggaatatattattatctccatgtgcggtgtttccaaggggaaaccttctcaatttggtttggtcatggaggagtatgcaaaagaagggatgcatcatataatttcagctttgcttgagttttctgcagcagatgatctggttagtttcaaagatgcggttgaaaaggagggtcatgatattgatggggtagggttttggtatggaaggtgtgttgcctcgaagaaaatagggtatgaagagaggacacctctcatggttgcttccatgtttgggagccttggtgtatcaacctatatcctttcaacgggtagtgtcgatgttaattgggctagtaggtcagatggggctactgctcttcattgtgctgttgctgggggttctgccgcttccattgaggttgtcaagcttttgcttgatgcatctgctgatgttaatgctattgatgccaacggtaaccggccaattgacttgattggctcggtgaccaattctatcttcagtcaaaggtcaagggtgctacaggccctcctggagggtacaagtgatgctgatcaggcatgtcttgcacttccagaagtgattgaccaaattgaggaacaaaggcaagatatgactacgccccgtgtttcgaaagattatcccattgatctctcccttccagacataaacgtaggctcggaattcggctcgaggtttaggatgtatacattcaaagtgaagccttgttcgagggcgtattctcatgattggacagagtgcccctttgttcatccaggggaaaatgcaaggcggcgtgatccaaggaagtatcattacagctgcgtcccttgtcccgagtttaggaagggatcttgcagcaagggcgatgcctgtgagtatgcacatggcatttttgagtgctggcttcaccctgcccagtaccggactcggctttgcaaggatgagggtggatgcacaaggagggtatgcttctttgctcacaagcttgaggagcttcgccccttgtatgcttctactggttctgctattccttccccgaggtcctattcagctagtgcttctgcattggagatgggttcagttagcccaattgcacttggttctccatctgtcttgatgccacctacctcaacaccacctttgactccatctggagcatcttctcccattgctggatccatgtggtctcaatctaatgcttctgtccctaccctgcagctgccccaaagcagattgaaatctgcactaaatgctagagatgttgaattggatatggaattgcttggaattgaaaatcatagacttttgatgcagcagcacctaatgatggaggggatggctggtctttcatcaccttctaactggaataactccatgcctaatagtccatcagttggtgattataccggggagttcaataggcttgcaggagtgcaacctactaacctcgacgacatttttgggtctcagatacagtatccagccagaattcaagtgcatcaaaatgtgaatcagcaactgagaggctatccttccaacccttacaattcaagtgtgattggatcaccctcattcagggttgatccatctgggactgcagccacaatgcctttgaatccaagaaatgctgcctttgctaatcggagccagagctttgttgagcctaatatggttaacattgattctgactttccttctgctacctctactgctgctgagccttctaccttctctggttggggtccctctgatggcaagttagattggtccatccgtggcgatgaactaaaaaagccgagcaaatcttcttcttctggatttttgaagcagtagtccttttacaatggctacagccactgtgctaccaagtgttgatgatccagaggtgtctttgcttcattaacttgtgaactatatagtgttgaagagcagctgcaatgctataggctatagcaattgtacatggttgcatgaatgcaatgtcaaaaatgggattgaatcctctatgcaacacaagtctagtttatttatttaattattattattttttaatttcataaatattcattgtcgtcccacgcgtccgcgtagaaattgtggttaaatgtttcccgtggcaacagtgtagaagttgggcaggatgcaagttttctgctccggtaactaccttctagggtatttgattccatttttttcccttattttttttattttcctgttatttgtcgtcatgctctattgagttgtaacttcccagcaaccaagagtggaacaaatgcactgagacttctaattttgaattcatagctcgactttatgaattattcatttttttttggtaa

SEQ ID NO: 6663 - DNA, 640 bp, Glycine max
acgaccccggcccaagagggaaaccacaaccacaaccaccccacctcctcctcctcccctccccaaatcacaaacgccgaagaagagaggagacgaaaggggatcgccgccgccgccgccgccgccgcccaggatgacgtcgatgctgtccgcgttctcgtcgtggttcgtgaacccgcgccgcaacccgctggcccgcatccacatgctcaccatctccaaccgcctcaagaacttcggcctgaggtacgacgacctgtacgacccctacttcgatctggacatcaaggaggcgctcggcaggctgccccgggaggtggtcgacgcccgccaccagcgcctcaagcgcgccatggacctctccatgaagcaccagtacctccccgacgacgtccgggcactgcagacaccattcaaaagctatttgagcgacatgctggctctggtgaaaaaggaggcagcagagcgtaaagcactgggagcccttcccctctacgagagaacccttccttgaagacatcttttcttgatatgcgccacagcttttgctcctcgtagcatcacaatgcatgaaataaaaatgcagattattgacacctggttcctccttccggtttcctggcccttgccctggaaacat

SEQ ID NO: 6664 - DNA, 1407 bp, Glycine max
cctcgcgtcagccgcctgcgaggcccccccccccccataagcagtgagaagtcgcaaggaggtgcagaatggctgatgcaggtgcagaaggagcatcttcttccacggtaggccaaattgacgttttctggcacgaagggatgctgaagcatgacacgggcaatggcgtgtttgacacggggatggatccaggcttcttagaggtgttggagaagcaccctgaaaactcagacagagtgaaaaacctagtgtctattctcaaaaggggtcctatctccccttacatttcttggcaccttggtacacctgcaaaaatccctgagcttttttcttttcacactcctgaatacataaatgaactggtagaagttgataaagaaggggggaagcagctttgtggtgggacatttttgaaccctggatcatgggatgctgcacttcttgctgctgggactacactatctgcgatgaagcatttactgaatggggatggaaaagtttcctatgcattggttaggccccctggtcaccatgctcagccttctcaggccgatggctactgtttccttaacaatgcaggtctagctgtgcaattggctttagattccggctgcaagaaggttgcggtcatagatattgatgtgcattatggaaatggaacggcagaggggttttatcgatctaataaggttcttaccatctctcttcatatgaaccatggatcatggggtccatctcatccgcaaagtggctctgttgatgagctaggtgaaggagaaggttatggctttaacttgaacatacctctaccaaatggaactggggacaagggatatgtacatgccttcaatgagttggttgttccatccatccaaaagtttgggcctgatatgatagttttggttcttggacaagactctaatgcatttgatcccaatggaaggcaatgcttaacaatggagggttatagagaaatagggcgaattgtccatcttcttgcgaaaaggcacagtgcaggacgccttctaattgtccaggaaggtggatatcatgtcacatattctgcatattgtttacatgcaacacttgagggggttctcaacctaccaatgcctctactagcggatcctattgctttttacctagacgacgagacattttctgtccaagttatagaagccattaagaattatcaaaaagataaagtgcgctagtggagaaactcactagacacttcctctctgtgcgtgtgaaataaatgttgatacttttcaagaagggttaatatttatcgtgtaactattgagggattttcaaggttattttaaataaatttaatcttgtccagttgatcttttgattaaaaaaaaaaaaaagcggccgctctggaggaaagaaaaagggcgt

SEQ ID NO: 6665 - DNA, 2460 bp, Glycine max
tcttgatttttgttccgctgaattaacattaacatgattgaaatttgaatattttgttttgattcattggagatttgatttttgaatttctgtggctcgttaatttattaacggcaataaatattattactactaccttatagtaaaatgaattgtgtgtatattttgtctttaataccatatttaccctccaatttttccaactattatccttctcttccacgccgcacgccaattgtcactcattcagcgcgattccgccggagaacgcgtcggaatccgccggaaatggaaatctccggcactgttccgagctcggggtcctctttccgactcagcagcgatgatggcgaccctttgttaggttctcgtatcggagctggaacagatgatggtgatgctttaacaacggaaacagatccagaggtttcgtcctctagtagaattgctgccagaaagaacaaatatcgtacgagcagcatcaaattgtttggggtagaattatcccctgataatgttgctgttgcgatggtgtattttgttcaaggtgttttagggcttgcaagactggctgtgaacttttacttaaaagatgatttgcatttggaccctgctgaggcagctgtgctttctggtttttctgcattgccgtggcttgtcaaacctctttacgggtttattagtgattctgtcccgctctttggttatcgaagaagatcgtacctagttttgtcagggctgcttggtgcgctctcatggagtttgatggctacttttggtgacaacatgtatagggctggtgtgtgcatacttcttggatctctctctgttgcctttgcggatgttattcaatggttgtggagagggcacgtggtgagtcacaaagcacctcaggatctcttcagtctttatgttggggttcttcggcctttggtggaattgtgagctcctacttcagtggatctttgttggatgcatatggagtaaggttgcttcgtggggccccccccatgcttccgtgataacatctgtagtgccgttcttgtaaaagaacaacctatgatggtacagcaagagggctaaatcttcttttttccgggccagagtttttggaaagttcaaaacagcgcattattcagctgtggggttctgtacgacagcgtagtgtttttcttcctactttgtttattttcttgtggcaagcaaccccgcagtctgactctgctatgttctactttaccacaaattctcttggttttactcctgagtttttgggacgtgtcaagcttgttacctcaattgcgtctctgcttggtgttggtctttataatggatttctgaagaatgtgcctttacgaaaagtattttttgcaactacacttttaggttcaacgcttgggatgactcaggttttcctcgttactggactaaaccggaagtttggcattagtgatgagtggtttgcaattggtgattcattaattctcactgttttgagtcaggcttctttcatgcctgttcttgtgctagcagcaagattatgtcctgaaggaatggaggcaactctttttgcaactctcatgtctgtatctaatggagggagtgttgttgggggattgttaggggcgggcttgactcaactatttggaattaccaaggacagatttgataacttagcagctttgataatcctttgcaatcttagctcattattgcctctgcctcttcttggccttctccctggggacaatcctgatatgaatgaggaggacaattccgatattgagatgaaatgtaattgattttggttgtttgcccctggcttttcgtggacttgtctgtctttgtccagctatacccaagttttgctctcattgcttgcaaatctaacagacatcacttacacatgcagaaaattttgtatatatgtagtatgatgctaaagttgctaccaaggccttattttatcatgacatccagttcacttcaaaactaaaacggactgattttatggagaaagaaccttgtgcacaatatgctctggagtaactcaagacagtgctaacttatcgatgacagaatatcagtctcggcagaactcagaactatcacaggttcttttgtaacgtactttctcctttttgtttaatcatgtacctctttacttctttgcaagaactcgggctttgtacttattagccaataattgtcatttggcaatgggaaccgagttttaggcctcggacgtgtttgtataagctattgtcattggcaatttcctatatcagacaacaggcaatttgtttttcttgtttctttcttatcttctagtggagggaagattcactgggtccatgtacttcataaggtcaagtaattatccctagtgcttatgctcaacatctcatctatggtaaaatggaggatttatgccattttatatattgtaaatattaagtc

SEQ ID NO: 6666 - DNA, 845 bp, Glycine max
attaacattcctccaagcaccatcaagattcaagcacatagttatcatcaattccccagctagttttggccacgcctgcatcttcttctgctttaagctatggcctctaacttcagcttgagaactttgatgatatttgcccttgcattttctctcgccctgcaaggcactcttggagggatagaatgcgagagtctgagccatgacacatgctcattcgccgtgacatctgctggcaaacgatgtgtgcttgagaagcaggtgaagaggactggtgaggaagcatacacatgcaggacatcagagattgaagctgataaactgaaggaccacattgaaactgaacaatgcatcaaggcttgtggtttggacagaaagtcccttggaatctcatcagactctcttcttcaatctagcttcacgcaaaagctctgctcccccatctgctaccagtgttgcccaaacgttgttgacttatacttcaatctggcagctggtgaaggtgtgtttcttcccaagttgtgtgaagcacaaggtctaaatgctcgtcgaggaatggctgaactgaaaagctctggtatcgtggcaccgggacctgtgcacggtgtgcagttcgcagcggctcctccgattaaccctgtggagctcacaattgaacctgccgttgccccatcaccaaactaaagtcaagtctagtttttttagaacacgcaaaagaaattgagaaaagcgtgtattaaacaacttagcatatactagtatacagatgagagtggcatatatactatattttgtttgtaataatgaagttgcacctaaatatggtttgtggtacaatatgtggc

SEQ ID NO: 6667 - DNA, 1980 bp, Glycine max
cattaatacacgtgcgcaccaacctcttcccttcccttcaaattcaatcaatcgatttatcgctcttttatgtggttggcttcctttcgctctcttctctgcaaatgcttcattccaagatggttaggactctgtaggctgataaagacaacactcataccgttggaaagaaggatgctgctggccatgttgcttaatttagttcttgcttcctttgtcttcttgagttttatcagagacgggagtgcagggatcactagctctttcattcggtcagagtggccggcagttgacatcccccttgatcatgaagcatttgcagttccaaagggttataatgcacctcaacaagtgcacatcacgcaaggtgactatgatggaaaagcagtaatcatctcatgggtgaccacagaagagccagggcacagccatatacagtatggcacatcagagaataaatttcaaactagtgaagaaggcacagttacaaactatactttccacaaatacaagtctggctacattcatcactgtcttattgaaggccttgagtatgagactaaatactactatagaattggaagtggtgattcttctcgagaattttggttcaaaacacctcccaaagttgatccagattctccctacaaatttgggatcattggtgatttggggcaaacgtttaattctctttccacccttgagcattatatacaaagtggagcgcagactgtcttatttgttggagatctttcttatgctgataggtaccagtacaatgatgttggtttacggtgggatacatggggacgatttgttgaaaggagtacagcatatcatccatggttatggtctgctggaaatcacgaaatagactatatgccttacatgggagaagttgttcctttcaaaaactatctttaccgatatactactccctacttggcctccaatagctccagtcccctctggtatgcagtcaggcgtgcgtctgctcatataattgtgctatccagctattcaccattcgtgaaatacactcctcaatacatgtggcttaaagaagagctgaagcgagttgagagggagaagactccttggctcattgtgctcatgcacgtgccgctctacaatagtaatggagctcactatatggagggtgaaagcatgcgatctgtttttgagagctggttcatcgagtacaaagttgatgtgatctttgctggccatgtccatgcttatgaaagatcatatcgatactctaatgttgactacaacataacaggcggtaacaggtatccattacctaacaaatcagcacctgtttacataacagtcggagatggtggaaatcaagaaggtcttgcttcaaggtttttggatccacagccagaatattctgcttttcgagaagcaagctacggacattccacactggagataaaaaataggacccatgctatctaccactggaatcgcaatgatgatggcaagaaagtaccgactgactcttttgtactgcataatcagtactggggacacaatcgcagaagaagaaaactgaagcattttctattgaaagttattgatgaagttgccagcatgtaatttgaagttgaagcactagcatatttggcgttttgaaaaggataaaaatgtgccccttgattaatatatgcagttcaatagtgtctgagtgagcgaaatgcaggacgttggaaatggttctatgtactatttggcttgtatgcttgtattacaacgctaataagaatattaaatgagcttgctggagaaaaataaaataagaacatattatctattgattggaaaaaaaaaaaaaaaaaaaaaaaaaaaaaaaaaaacacgagactagttctctctctcaaaaaaaaaaaaaaaaaaaaaaaaaaaaaaaaaaaaaaaaaaaaaaaaaaaaaaaaaaaaaaaaaaaaaaaaaaaaaaaaaaaaaaaaaaaaa

SEQ ID NO: 6668 - DNA, 1409 bp, Glycine max
agcctttattagtaattgactattgaaggttgggcacccgtgagtgacatggccaccgtggtgaggatcccaacaatctcatgcatccacatccacacgttccgttcccaatcccctcgcactttcgccagaatccgggtcggacccaggtcgtgggctcctattcgggcatcggcagcgagctcggagagaggggagatagtattggagcagaagccgaagaaggatgacaagaagaagctgcagaagggaatcgcagagttttacgacgagtcttctggcttatgggagaacatttggggcgaccacatgcaccatggcttttatgactcggattccactgtttcgctttcggatcatcgtgctgctcagatccgaatgatccaagagtctcttcgctttgcctctgtttctgaggagcgtagtaaatggcccaagagtatagttgatgttgggtgtggcataggtggcagctctagatacctggccaagaaatttggagcaaccagtgtaggcatcactctgagtcctgttcaagctcaaagagcaaatgctcttgctgctgctcaaggattggctgataaggtttcctttcaggttgctgacgctctacagcaaccattctctgacggccagtttgatctggtgtggtccatggagagtggagagcatatgcctgacaaagctaagtttgttggagagttagctcgggtagcagcaccaggtgccactataataatagtaacatggtgccacagggatcttggccctgacgaacaatccttacatccatgggagcaagatctcttaaagaagatttgcgatgcatattacctccctgcctggtgctcaacttctgattatgttaagttgctccaatccctgtcacttcaggacatcaagtcagaagattggtctcgctttgttgctccattttggccagcagtgatacgctcagccttcacatggaagggtctaacttcactcttgagcagtggacaaaaaacgataaaaggagctttggctatgccattgatgatagagggatacaagaaagatctaattaagtttgccatcattacatgtcgaaaacctgaataaatggagaggcaggattacttttatagaatgaagcaagtttccaacaggtcgtttatttcgatagttgagaaacaagagaaaaaataaatgaaaggggttgttcgatttttattttagttttctacatatgcaatatctcctatgattggcgaaaatatattatctacttaaataagtggcacgagtatttataattaagtaattaaaaaagaagtattgtatatatagagatagaaaactaatatttgtgacttgtgaaaacatcgtaaaggtgataaagagaaatgttagttaacgccttttttaat

SEQ ID NO: 6669 - DNA, 728 bp, Glycine max
aggtaattcctgagtcaaatagttctgtccatatagaatttgtgaagtgagagtccaacctttcattttcaattttcaaagatgcctcgtggaacacttgaagttgttctgatcagcgccaaaggaatcgatgacaatgattttctctccagcatagatccttatgtgattctcacatacagggcacaggagaaaaagagcactgtgcaagaagatgctggatccaagccacaatggaatgagagctttcttttcactgtctctgacagtgcttctgaacttaatctgaagataatggataaagacaactttagtcaagatgattgtcttggcgtggcaaccattcatctggatccagtgtttgaagccggtagcattccagaaactgcttacaaggttgtgaaggacgaagaatattgtggtgagattaaggtggctctcactttcactgctgagagaaatgaggagcaggattatgctgaacctgaagagagctatggtggatggaaagaatccagtggggaattttaaagtgaaagaagtatttacatacttccctggccagaattacccttataatgaaaaattaaccagttttgggggacttttttgaagatttccctttatggtgttttctgggtgggaaccaatggggggtgggctgtaaggggtgctttcctcccttttgaatattaataaaaagaacaataaggttgggtatattggct

SEQ ID NO: 6670 - DNA, 944 bp, Glycine max
caaaaggtttaaaaggaaaaagttggatccagccaatttccagctccaatttgtaactcactgcttcaggcatttctggcacaattttttccacctttatttcaactttaagactccacagaaagaagcatattcctgagtcaaatagttctgtccatatagaatttgtgaagtgagagtccaacctttcattttcaattttcaaagatgcctcgtggaacacttgaagttgttctgatcagcgccaaaggaatcgatgacaatgattttctctccagcatagatccttatgtgattctcacatacagggcacaggagaaaaagagcactgtgcaagaagatgctggatccaagccacaatggaatgagagctttcttttcactgtctctgacagtgcttctgaacttaatctgaagataatggataaagacaactttagtcaagatgattgtcttggcgaggcaaccattcatttagatccagtgtttgaagccggtagcattccagaaactgcttacaaggttgtgaaggacgaagaatattgtggtgagattaaggtggctctcactttcactgctgagagaaatgaggagcagggttatgatgcacctgaagagagctatggtggatggaaagaatccagtggggaatattaaagtgaaagaagaatttacatacttcaatggccagacttacctttataatgaaaaataagcagttttggtgtcacttttaggcaatttccattattgtgttttctggtgtgaagatccaatagtgttgtgcttttaggttgcattcctccctttggatattaaagtacattatgcttgatatattatcttttatgcgtcagttaaacattagaagagcagtgctattttattttgtttgaagttattattattggattcactaattagttatggaaaatgttattctg

SEQ ID NO: 6671 - DNA, 911 bp, Glycine max
gtttaaaaggaaaggaaagttggatccagccaaaatccagctccaattggtaactcactgcttgaggcatttctggcactgttttttccacttttattttaactttaagactgcacagagagaagcatataattcctgagtcaatatagaatttgtgaagtcagtccaaacttcagtttcaaagatgcctcgtggaacgcttgaagttgttctgatcagcgccaaaggaatcgatgacaatgattttctctccagcattgatccttatgtgattctcacatacagggcacaggagaaaaagagcactgtgcaagaagatgctggatccaagccacaatggaatgagagctttcttttcactgtctctgacagtgcatctgaacttaatctaaagataatggataaagacaactttagtcaagatgattgtcttggcgtggcaaccattcatctggatccagtgtttgaagcgggtagtattccagaaactgcttacaaggttgtgaaggacgaagaatattgtggagagattaaggtggctctcacttttactgttgagaaaaatgaggagcaggattatgctgaacctgaagagagctatggtggatggaaagaatccagtggggaattttaaagtgaaagaagtatttacatacttccatggccagaattacccttataatgaaaaataagcagttttggggtactttttgagaatttccattattgtgttttctggtgtgaagcaatggtgttgtgctgttaggttgctttcctccctttggatatatattaaagtacattatgtttgatatattgtctttaatgcattagttaacattttaagagcagggctgtttttttttattttgtttgaagttaataataataatcataataatggattccac

SEQ ID NO: 6672 - DNA, 597 bp, Glycine max
accgctttttcctcctcctctcttccaccccagagtccagagctatggcgctcgccaaggccaaggagatcgtcgcctccgctcccgtcgtcgtcttcagcaagtcttactgccctttctgtgtacaagtgaagaagttgttcacgcagctgggagcaagtttcaaggccattgagttggacactgaaagcgatggaactgagattcagtcagctcttgctgaatggactgggcagaggactgttcccaatgtcttcatcaatggaaaacacatcggtggctgtgacgatactattgcactgaacaagggagggaagctggttgctctgctgacagaggctggagcgatctccggttcttcttcgaagaccaccgtcactgcttagctctgtttgcgagttgtcgtgatcgacatgttagtgtgttacatgagttgcatcgttcccgtgtcatgaaataacgaagttggatgtgtttggcaagttcagggcttgttgctgtctagcatgtccgcagcgactgttaaatctcagtgtaaaactcgttagaaataaagcaaattattttggtgaaaaaaaaagaaaaaaaaaaaaaaaa

SEQ ID NO: 6673 - DNA, 2054 bp, Glycine max
tcgccccgccgcccccaactctctctgtaaatagataataatgggagcggtttgttcggctggtatggtggagaaaaatggtgaacttggagggaagagtttggggctttctgggaagcttaagaaggaaaatagctttgtgaatcggagagaagctttttcagattcaaggtctaatagtggtcactctagaaagcaaaagaagcacgatactgggttttcccatgaacttggtttatcgtctccttcacctggggggaaacaggtgagtcagaggggttctattctgggaaaagcaggcgagagagcagtggaagttctggacacaattggaagtggcatgcctaagttaaacactaatagcgggtttgtctctggcacaacttctagagggaataagatatcaatactggcatttgaagtagctaatacaataaccaaaggaacaattttgtttcaatcactttctgaagaaaacattcagttccttaaaaatgaggtgttacaatcggagggggttcagctattagtatcaactgatgtgaagaagttaatagctcttgctgaggctgacaaaagggaagaactcaatgtcttctcaagggaagtgactagatttggaaatatgtgtaaagatccacagtggcacaacctagacagatatttctcaagattagactttgatgtcctggatgacaaacgatatcaggaagatgcagaaaagacgatgcaggagtttaccagcctagttcggaatactgctgaattataccatgagttaaatgcttatgaacgttttgaacaagattatctgcaaaagattaaggaaatggagtccttaaatcttcctctaaaaggggagagtatcacaatgtttcaaagtgagctaaagcaccaaagaaagcttgtgaggagcttgaaaaagaagtctctttggtccagaactttggaagagatagttgaaaagcttgtagatattgttacctatatacatcaagcaatttatgagttcgctggaaatcatggtacagctgcaaccaagcacagtgagggttctgaaagactaggagaagctggtcttgcactgcactatgctaacatcatcaatcagataaatatggttgcatctcgcccaactgctcttcctccaaacaccagagacacattgtatcatggtttgcccaacaatattaaggctgctcttccatcccagttgcaaaccattggtgacatgaaagagctctccatcactcggatcaaagctgaaatggataagattcttcagtggcttgcaccacttgctacaaatacagtcaaagcacatcaaggtttcggatgggttggtgaatgggcaaacgcaagtaatgactttggtgataacacctccaaagaaagtaacctgattcgcctggagacactttattacgctgataagaggaagatagatgtttacatcattgaattgttggcatggcttcaccatttgattagctctgtaaaatctagacagaataccttgagaccaatgcctacaacacggtctcctccaaagggactcgaacttcagtctaagatgcgacagttattaattctatctgtggatagtagcaacaagccgttgggaactcaaatttctcatgaggataggagattattggaggatgttattgcaaggaaaaagaaccctggacttagcaaaagcgaggatcttggtttggctaagaaaagacaagtcaaacatttgcaagtgaccaaaagtgctgggagttcacctgccaaggaattcttcggtacaagactcgtctttaaccaccaaaactataacgttttggatattatggatgggttgggttactgaaaacttcatctacactcaatcgttgttctcacttctcacctctcacttgtttttctgctggaattcttgcttagggataatattcaacattcatttctatacaactctagttatgtacatatctatatctatatgaacgactaacgctggattcatttaactttataaattacttttgtacaggggatggggaaaa

SEQ ID NO: 6674 - DNA, 2632 bp, Glycine max
ccgcgcgtccgcacgcatcgtatagaaaagatagaggaaagtcgccttgtcatcattaacagtgtttgtgtatatcggagaaattagggtattgaagaggtcgctcatggacggagatggagcgacgacgatcgcggaggcgcagtacgcgacggcgaagacatcggtgtggtgggacatcgagaactgccacgtccccaagggttcggatccgcacgccatcgcgcagaacatcagttctgctctcgttcgcatgaactactgcggccccgtctccatctcctcctacggcgacaccacgcgcatcccagcatctgtacagcacgcgctctccagtaccggaatctccctcaatcacgtcccggccggtgtgaaagacgcaagagacgagaagattcttgttgatatgctgttctgggcactggacaatcccgcacctgctaattatttattaatttcgggtgaccgagacttctcgaatgctctccatcaacttcggatgaggagatataatattcttcttgcgcaacctcagaaggcatctgcacccctagttgcagccgccaagagtgtatggctttggactagcctcttagctggaggacctcctctttctaatggtgaatcacaacaacttggtaatggtagcctcagccatgtatcatcttctgactccttacaaattccggttacaagtgctactcagatacaacaacaggtggattcctactcagaagtacatgtaggaaattcaaaatttacaaatggaggaaggggatttgattctagatatcaggggaaaacaaattggagaaacctgagccaatcgaatggacctagagccatgaatcctctgcctgttgtacttcaagataatcgtaatcgtaataatgcaaactcttctcaacctggcaactttaatctaaatgttccatcaagtgctacaaatcatggtcatggcaatactgatcagttatggagcaataacagtaatctacagggcaatcatcaaatcccttattcacagccattaagaccaaacaacttcccattgcaacctccttttgcacctagtaattcatatacaccaaattcccatacttttccaacttcagtggttccacctaggactggtggtcccaatttcacttcaggaccacataccaatgtgccagatattggtagtctgagcatttctggatatcctaatagtgttcataacccacctattgttccgcaacggagtggggagttgaaacagaatcctaatagtaatgctccacttcttttaagatcaattgatgacaaaaatggacatatggtacagaacagtggcacacaacaattacaccaaggttatcaacatggtccagaatatcaacctccgccgttggcagcaatgggtaataataacccttctggtaatggtatgtggggttctccaggatgtcctaaaccttctgaatatgtacaaggcctaataggtgttgttttacttgccttgaactcactaaaaaatgcaaagatgatgccaactgaggcaaatataactgattgcatccggtatggagatcccaagcaccgcaacactgatgttaagaaggctcttgaaagtgctattgagcagaatatggtggtgaaacagaatttaggtgctttgccgttgtatgttggtaagaatgataaactttggaaatgtgtaaatcctttaggtggtactcctaagcagcattcaaaagaaacatgggatgaaattgaaaagtttttaacaactcctgctggaagatcagcactaatgggtacacagtgcaagtatgaagcaggtattgtgattaagagtatgtgctttaaagatcttgctttgggtgatgtccttcagatattgaacatgttaattacccataaaaaatgggttacacatcatccatctggttggcagccacttaacattactcttcccgagataaaccccacttcaggggttgtagctggtgggcaaatttccccatctggggtagttttagaaactatttccccagatggggtcgtttctaaaataattgcagcatggggcagttttttacgtgcatggaagacccaaaccggtgtcagtgagcaacccgccagatgcaatggcgatatgaccgtgcagagcctaagtcgccagtcctaatggcgatacgcagaagcagctgggaaccgccagtcaaactggcgagttccatggtacaggcgtgcaggcgcttttgcaggggtgcaggagcttgcttttcagaaaagggagttgcaactgccattggcgagttgcttgcaagttgcaactcccattggcgggttgcacaagaagaaatagccatcaccaatggcggtttgttaccagtgctcacgttttgaacttgaactcacgttttcagctccaaattagaaataaatctttcattgctcacggcttcaaattagaaatttctttcttctttcattgtatgctgagagctctagttgtgtgtggtcagtgacttagagttttctgaatacagaaagagccttgagttttgtaagtgtgtagggatttctgttttaaatttgtttggttgaagttaaatatttgaattaggtttataattttgaaatt

SEQ ID NO: 6675 - DNA, 1447 bp, Glycine max
tggaagaactgagagatgcagagcgccaaccattgcagataagcacatcccccaccaaaccacaggacacgtgtcattcacacgattttccaattttcatatcacaaaactaagttaattcacaccacacccccgcgccccgtacacacacagtcacacttttgtgaaggcctaggattgctgagtcaaacttgaattgaaggtgaagaaggagatggcagcaacttcttccttgtgttcatcgaccctccaatcccaaatcaatggattctgccttcacaaaacctctctttcccatcctcgttccctcactttctccaggaagaaaatttcaaccacagtgaaggctacatctcgtgttgacaagttttcaaaaagcgatatcattgtttctccatccattctttctgcaaactttgcaaaattgggagagcaggtgaaagcagtggagttggctggttgtgattggattcacgttgatgtaatggatggccgttttgttccaaatattacaattggacctcttgtggttgatgcattgcgccctgtgacagatcttcctttggatgtacacctgatgattgtagagcctgaacaaagggtaccagattttattaaggcaggagctgatatagtcagtgttcattgtgaacaatcttccaccatccatttgcatcgtactgttaatcaagtgaaaagtctgggagctaaagctggagttgtcttaaaccctgctacccccttaagtgcaatagaatatgtccttgatgtggtggatttggtcttaattatgtccgtaaaccctggctttggtggccagagttttattgagagtcaagtaaagaaaatttctgacttgagaagagtgtgcgcggaaaagggagtgaatccatggattgaagtagatggtggagttggtccagcaaatgcttacaaggtgattgaggctggagccaatgctctggttgcaggctctgctgtgtttggagctaaagattatgccgaagctataagaggaatcaaaaccagcaaaagacctgaagcagttgctgtgtgaaatgcccatgtggttcaatattcaccgtatgctccaacacagtactcatgaattagtggcctatcgagcaccattatgttgcctggcctgctgtcaccactggcaatttgcttttctctggaaataactataagaaatcagtccaagtaaggctgctgctgtgatgcgtagtttgtgtataatcttttggagtatcaggacaagtttaattcaagataaagccctttactctgtatcaccttgtagcctgtcaattctattcccccatattgtaaagcagttgtgatttctatcaatacaagttttgaacaaaaccagctaaatacattatatatatatatatatatatatttttttttttttttaaaaaaaaaagcataaaataaactg

SEQ ID NO: 6676 - DNA, 1733 bp, Glycine max
cacaaaactaaattaattcagaccacaccacatcgtacacacacacacacacacttttgtcaaggcataggattggtgaggtaaacttgaattgaagtgaagaaggagatggctgcaacctcttccttgtgctcatcgaccctccaatcccagatcaatggattcttccttcacaaaacctctctttcccatactccttccctcactttctccaggaggaaaatttcaaccacagtgaaggctacatctcgagtcgacaagttttcaaaaagcgatatcattgtctctccgtccattctttctgcaaacttttcaaaattgggagagcaggtgaaagcagtggaattggctggttgtgattggattcacgttgatgtaatggatggtcgctttgttccaaatattacaattggacctcttgtggttgatgcattgcgccctgtgacagatcttcctttggatgtacacctgatgattgtagagcctgaacaaagggtaccagattttattaaggcaggagctgatatagtcagtgttcattgtgaacaatcttccaccatccatttgcatcgtacagttaatcaagtgaaaagtctgggagctaaagctggagttgtcttaaaccccggtacccccttaagtgcaatagaatatatccttgatgtggttgatttggtcttaattatgtccgtaaaccctggctttggtggccagagttttattgagagtcaagtaaagaaaatttctgatttgagaagattgtgtgcggagaagggagtgaatccatggattgaagtagatggtggagttggtccagcaaatgcatacaaggtgattgaggctggagccaatgcactggttgctggctctgctgtttttggagctaaagattatgccgaagctataagaggaatcaaaaccagcaaaagacctgaagtagttgctgtgtgaaatgcctgtgtggttccatattcaccgtacgctccaatgtaagctgtattttttgccccatagaggtttctccattaaattttggcatatcgttttactgattgggtggttgaatataagcaaaattgactgccagtatgagaaacaatcaagtaaaataatggcagacattgcttatgcgccagtttcaaagtcaactatattatataattaagttatgcttgtggctcaatcatcacatgtatctgactgataattactcaatactagtagaaattttacatttggttgtgttaaaaatgctccattggaattacaaaatgtagaaggtattgtcctggctctgagcatgatctcaatctaattctcactgcgggttttactctgtttgaacctggcagacagtattcatgaattagtggcctattgggcaccgttatgttgcctggcttctgtcaccactggcaatttgcttctctctggaattaactataagaaatcaatccaagtaaggctgctgctgtgatgcatagtttgtatataatattttggagtatcaggacaagtttaattcaagataaagccctttactctgtatcaccttgtaacctgtcaattatattcccccatattgtaaagcagttgagctttctatcaatacaaggtttgaagaaaaccagctaaatacattatatgcttttgttttttttcaaagttgataccattttgtttcgttctaacaaaaaaaaaaaaaaaaaactcgagactagttctcctcgtgc

SEQ ID NO: 6677 - DNA, 1641 bp, Glycine max
gcctctactccaaactgacatggacatggctgctgcaatgagcctgttgcctggttcaccgtcatcaattgcttccatgtctccatctccctttgcgcagccaatgtctccatctacaagtggcattgctcactcatctaatgcttggccgcggcctacggcccccgcgcttccggtaccgggaatcgacattcaaactagccgattgagatcttctcttagtgctcgtgacatgccaccagaagactttgatgtgttgcaagattttgatggccagcaacaccttttgagtgacttgggctgtttctcgcagccccgtcctggcgccatttcagtgagtcgatctggtcggtctaagacactaaccccatcaaatctggatgaactattctctgccgagatttcttcatctccccggtattctgacccagcagtggcttctgtattttccccaagacacaaatcaactattatgaatcagtttcaacagcttcaaagttcgttatcacccataaacacaagtgtctcctctcctaggaatgttgagcatcctctattacaggcttcatttggtgtctcttctcctggaaggatgtcaccaagaagtatggagccaatctctccaatgagctctcgattatcagcatttgcacagcgtgagaaacagcaccaacagctgcgaagccttagttcaagggaccttggtgccaatgttcctgcctcaatggttgggtccccagttaactcctggtctaattggggttctcctcatgggaatggaaaagtagattggtcagtaaatggaaatgagttaggtcgattgcagagatcatcatcatttgagcttggaaacaatggggaggagcctgatctatcctgggttcaatcccttgtcaaggaatctccgtccgagataaaagagaagttgacaggttctggccctgttgcatctgttgatggaccgagttcaaatccaaagtcaaatccgcaagttgagtctgttgatcattctgttctaggagcctggcttgagcaaatgcagctggatcagcttgtagtctaatcaaatttgacccattccatcttgtgataggtatttaatttcacaacgtattctttttgtcaatttttttgggtggagcaaggagagggaatgtaatgatactgaagcgagggatggctgcaaagtacccgaatgataatctatttttccccccccattattttgtcattcattgttttactaaagagcttcagggggagtggtaagaaaccctctctctggggttgatgatatcccagtaaaaaagaaaatattcttccaaaactctagtttcaggactcttttcttcattttattcctagccatggaaaaaccaagagcctcatatttgtattcaagttcgttttcttggtaggaatctgctagtatattgctatgctattgcatgtatagaagactagagtgtgtttattgttaaggaattagaggtgatctgcgccattaatatttattgccggcagatcgtttagacatactgaaggctactgtgtatgtatcggttattttcaaattcaatgtagctgttatatttatgggtattatctaaattcaatggaaattattaacctttttttttt

SEQ ID NO: 6678 - DNA, 880 bp, Glycine max
  misc_feature (795)..(795): n is a, c, g, or t
  misc_feature (800)..(800): n is a, c, g, or t
  misc_feature (824)..(824): n is a, c, g, or t
tctcgttctagtgtatgtgattgttgtgactcgttcttcttcgtcgttatcttcttcttttgttgtttgtgtgtttgttttttctctcacctgaaaatgtcttgctgcggtggtaactgtggttgcggaagcgcctgcaagtgcggcaacggctgcggagggtaagatttttgttgtgtcactgttgcttcacacttcgaaaaattgagtttttccgggaaaattttcttcttgggttttttatgggcttttttgggtacccttttggttgaattgcatgaaaaaattatgctttgtttattcttgcatgaggacattctgatcacctgaacctttgttctgctttacagaagtcagaacatgtcgattttataggtttttggggtgttttgcttggctttttgggtacctttttggtaaattttataaaaaaaaataatgttttttgttttattcttgcatgggtttctacgagttcaattctgttcactttgaggttcactttgaggatctgttttacttgtgtaaagatggccatgcttcgttccttatttggttttagggtaccctttttgttaacctgtgcttctttagaagcaccccgaggtttttattctcgggggaaaatgtttcttctgagagcactgccgtgtgttgaatatgaattcacttgatcatggttggatataaatcatataaaattccgtacccttttaagaagagagagacacaattttcacatgagatgttcatgtgaaaatttatcataagaatcttcttttgcttttgtgtaantgggntatgtaaatttcactaatccgggntttctttattctacttggtatgcagctgcaagatgtacccacacttgagctacacc

SEQ ID NO: 6679 - DNA, 1572 bp, Glycine max
  misc_feature (424)..(428): n is a, c, g, or t
ctaaaaccctttgttgtttcttgtggttttggagtctgcagcaatgtggggttggatggtcggggaagcgcgtagggcagcgtgcaactggaactgggtttcgctccgaagcatgggtggcggtcccagaacctttcccggcggcgtgaacaagtggaagtggaagcgcatgcacgagaagctcgccagagacaaacagaacagactcatccaacaagagaagcagctctacccagctcgcattcgctcccacatccgctcctccctctcccccgaccaccaagctgacgccactcaccgacctctcttccccaacgaccacttcaaagccctcgccgaccgcttcgtcaaagacggcgccgaagacctttggaacaaccacgacggtcctctaactccagacccgacaacaccgaaccttgannnnngccccaagcacaccaggggttaccgtgctgttcccgaggttgggaacagtcgtgttggggcccacaaatataggttttggagaaagggtagtgatgattcttcttctggtgagagcgagggtgagattgaagttgaattgagtatgaagaagaggggtagtagtgcttctttaggggagtatgatgtcaagagagagcggagggttgtgcccaagacttctccagagtttgagtttattagttatgagcttaataagaggaagttgagccaaattgaggaccaacagagtgagcaacaacaaagcaatgaaagcattctaagcaacacaaggtattcctttgcttgctatggatggatgctgtagtcaaagctaaaactggcactggaaaaaatgtagcttttttgttctgaaagctatgagtagcaatacgtctcaacgggtgcccccaatatatgttcggattcccgcccctgccagagaacttgctaatcaagttgctgctgtagcaaaggttttgctgaaatatcatgatgccatcagggtgcagactcttgttggaggcatacgatttaaagttgaccaaaaacgccttgaatcagatccatgccagatacttgttgctacacctggtaggttactggatcacattgagaataagtctggaatatctctgcggttaatgggcttgcggacgcttgtacttgatgaagctgatcatttactggacctaggattcagaaaggatgtagaaaaaattgttgattgtttgccccgtcagcagcaatctttgctgttttctgcaaccataccaaaggaggtccgttgtgtatctcagcttgttttgaaaagggaacacaaatatgttgatacagttggaatgggttgtgtagaaactcctgttaaggtgaagcaatcttatcttattgctcctcatgagtcacattttcagttagtgcaccatattctgaaggagcatatcttgcaaacacctgattataaggttaaacacagatgctgtttcagatttcaaattgctttgttatatattttatggttttgaccagtagattgcatgcaggttattgtattctgtataactgggatggtgaaatgaaattgcatgtctgctggtacagatgatt

SEQ ID NO: 6680 - DNA, 1146 bp, Glycine max
tcgagtcagctacgtagccccctctctctctttctctctctgcgatctgtttcgtgttgtagctagctcctcgaaaatgctggcacgcctcgccgcgagtcgcttcaacgagatccgtcagattttccgtcagccttctagggctttctcaaccgctctgaactaccaccttgacacaccggacaacaaccctaaacttccatgggaattcaccgaggccaatcaagcaaaggttaaggagattttgtctcactatccatccaactataagcaatctgctacaattcctcttttagatcttgcccagcagcagcatggaggttggctacctgtttctgcaatggatgcggtagctaagattgtagaggttcctcccatacgggtgtatgaggttgccacattttactccatgttcaatcgagctaaggttgggaagtaccatctgttggtttgtggaacaacaccttgtatgataagaggttcacgaggaattgaagaagccttattgaaacacttgggagtgaagcgcaatgaagtaacaccagatggtttgttttctgttggagaaatggaatgcatgggatgctgtgtgaatgctcctatgattacagtggctgattattcaaatggatcagagggatatacttataattactttgaagatgtaaccccagagaaagtagttgagatagtagaaaagctgagaaagggtgagaagccaccgcacggcacccaaaatccccgccgaattaagagtggacctgaaggagggaacactactttgttaagtgagcccaagcctcctccctgccgtgacctggattcctgctgaagtgtgatatactttttgccttcaataatgtgaggcttgcatgtgttggagcttgccttaattgaaacattgtcagattgttagatgctcaaccaatttttgtatcaaccgtcctggatggtttccatttcaaaaatttgttccataatcgccataaatttcttggcatgttcattacttaccagcgttatctatgtttttctgtactctgtacattaatcaccatgaacgaaatttgaggttaccatgaaatacaatttagttaagaagtgaaaaaaaaaaaaaaaaaaacccaaaaaaaaaaaaaaaaaaaa

SEQ ID NO: 6681 - DNA, 1143 bp, Glycine max
  misc_feature (1140)..(1140): n is a, c, g, or t
acctttccatgttctcttacactacacccttcactttacccgctccgctctctctctctctctctctctgcgatctgcttcgtgttgtagctagctcctcgaaaatgctggcacgcctcgccgcgagtcgcttcaacgagatccgtcagattttccgtcagccttctagggctttctcgaccgctctgaactaccaccttgacacaccggacaacaaccctaaacttccatgggaattcaccgaggccaatcaagcaaaggttaaggagattttgtctcactatccatccaactataagcaatctgctacaattcctcttttggatcttgcccagcagcagcatggtggctggctccctgtttctgcaatggatgcggtagctaagattgtagaggttcctcccatacgggtctatgaggttgccacattttactccatgttcaaccgagctaaggttgggaagtaccatctgttggtttgtggaacaacaccttgtatgataagaggttcacgaggaattgaagaagccttattgaaacacttgggagtgaagcgcaatgaagtaacaccagatggtttgttttctgttggagaaatggaatgcatgggatgctgtgtgaatgctcctatgattacagtggccgattattcaaatggatcggagggatatacttataattactttgaagatataaccccagagaaagtagttgagatagtagaaaagctgagaaagggtgagaagccaccgcacggcacccaaaatccccgccgaattaagagtggacctgaaggagggaacactactttgttaagtgagcccaagcctcctccctgccgtgacctggattcctgctgaagtgttgtatactttttgccttcaataatgtgaggcttgcatgtcttggagcttgccttaattgaaacattgtcagactgttagatgctcaaccaatttttgtatgaatcatcctggatggcttccgtttcaaaaatttgttccataaacgccatccataaatttcttggcttgtttattacttaccagcgttatctatgcgtttctgtactctgtacattaatcatcatgaatgaaatttgagattacgatgaaagaaaaaaaaaaaaaaaaaaaaaanaaa

SEQ ID NO: 6682 - DNA, 1361 bp, Glycine max
aattcggctcgagcttgtcgtcaacaacaaaatcaacatagttattgattaatggtcctgtgtttgttgttttgtgtgtccaagtctatcaaaatcattctttggttttgttttctattgtagattgtaggtactgcttcaatacatctttcaatcaccgagatcttgaattcttcagtttcaagacaataattgaagttcaaggccattagttccaacaagaaggaaaatggggttcactagtacaagtgaaaaagaagagatgttcatggcggattcagaaagagcaaaggagctcaaagcttttgatgacacaaaacttggtgtcaaaggacttgttgatgcaggaattaccaagatccctcgcatattctatcatccctctgataatttcaagagggtctcagaatttggccatgaagattacactattccagttatagacctggcaagaattcatgaagatcctagtgaacgcaaaagggttgttgagagagtcaaagaagcatcagagacatggggtttctttcagattgtgaatcatggcatccctgtgagtactctggaggagatgtcagatggggtgctaaggttttttgagcaagatagtgaggtcaagaaggagttttatactcgtgatcaaagaccctttatgtataatagcaattttaatttatataccaaagctccaactagttggaaggactctttcttctgtgatcttgcccctattgcccctaaaccagaggactttccatctgtttgcagagacatactggtgggttactcaaatcaagtaatgaaactagggactttgctgtttgagttactatcagaagctcttggtctgaactcaacctacttaagagatatcggttgccatgtgggacaatttgcttttggccattactatccttcctgtcctgaatcagaattaactttgggaacgataaagcatgctgacgttgatttcattacagtgcttctacaagaccatataggtggcctccaagttcttcatcaggacacgtggatcgatgtaacccctgtgcctggggctctagttgttaacattggtgattttctacaggcatgtctttgtctttcttttcctgccaccgaataccatccccttagtgcatatctatatttattaggttcatattaacaagaacttatgaactatactctcatctcttgattgaggcttaaattatactgatggaaagtctcacattggcggcctcaatttccgagatacagttaatatatctgttggataattttacttatgatcaattggtttaaaaagaaaatctaatataatatcgaagcttataactaaaaaaaaaaaaaaaaaa

SEQ ID NO: 6683 - DNA, 1968 bp, Glycine max
cttttctcagagggctcgagtattattattattcagatatcatttcctctttcttcttcttcttttttttcttcttttcccccccatgcagcctcttcgaagaaaaactcctctattcaccacctcagaaatgggggcaatgaagggtcgcaagaacaacaacctctccatcttcgtggtggtgttctccatcttcctctttgggctcttcatgtacaacgaggatgttaagtccattgccgagttcccattctcgagtcccaaagcgcatgaaacacaagaaggaggagaacctaataaacatgttgattctgttcaagaagacaatgttgttgttgttcaaagggagagtgagaagaaggacgtggaagacagtgtcacagtgaaaatttctaagagtacttcaagggctcagctagagaagagtggtgctgaggatgaggattctgatgagcgtgttgatttgaaaactgttgtggagaaagagaagaagattgaaatgccacgtgcggaggaagaggaagaggtggaagaagaagaagaagatgagaaagttgagttgccaccagaagattgtgacttgttcactggggagtgggttttggataacgtgacacaccctttgtacaaaggagacaagtgtgagtttctcacttcgcaagtgacatgcatgaagaatggacgacctgattctttgtgtccgtaagctcggttgttggcgcgagcaagagattgttctctgccaaagttcaaaccgaagcttttgtttcagaagattagagggaagaggcttatgtttgttggagattcactgaataggaaccagtgggaatcaatggtttgtatggtcaattctgcggttccttcacataacaagacctggtacaagactggttcacttgctatcttcaaaatccaggagccggagcacgttaccacggtggaattctattgggcaccattccttgtagagtcaaattcagatgatccaaacatgcacagcatattaaaccgtataatcatgcctgaatcaatagaaaaacatggagtgaattggaaggatgtggactacttgatctttaacacctacatatggtggatgaacactttctctatgaaagtcctacgagggtcatttgatgaaggatccacggaatatgatgaagttcctcggccaatagcatatgggagagtcattaacacatggtcaaaatggatagatgacaacattgacccaaatcgaaccaaagttttcttcagcagcacgtcccctcttcatatcaagagtgagaattggaacaacccaaatggtataaaatgtgccaaggagatcactccggttctcaacatgtcaaccccattggatgtagggacagatcgtcgcctttttacaattgccaacaatgtgactcagtcaatgaaggtgccagtgtacttcattaacatcacttctttgtcagaattgagaaaagatgcacacacttctgtttacaccatacgccaaggcaaaatgctaactccagaacaacaagctgatcctactacttatgccgattgcatccattggtgtttaccaggattacctgacacttggaacgagttcctctatacaaggatcatctctcaatcttgacctacaacaaacaacctatagatatcttcacacatacttttattctcttttccctctttccttaattgttattatttctccttttacttatgaagaatgctcttttttccttgattgccttagcctttgtttcaatttttgtaatttttaacaattttttattgactttatttttctttttaggaattgggcattttaccccttttttcctttgttaagccaatttagccaagcacggaagcacagcaagatccttaaatgtacaatgaatcttttctccttgaatgaagagaaaataaagaacaaaggttttgtttaaaaaaaaaaaaaaaaaa

SEQ ID NO: 6684 - DNA, 1245 bp, Glycine max
tggtcgcctgccggccccgtccgtccccccgccaacacacctctcctcccctctctctctctctctctctctctctctctgcttcacttgcttgaagcaatggccaaagccttggcatcagtgctgctgtttctcctcgtagctgtgagtaatgtgtttgctgtagagcttgaacttgaaactcttccaccctcttaccctcaccctcaccctgttcactcccccacaccagcacctcttcacccaccagcaaatgctcctcacccacaccaccaccaccaccaccaccaccctccagcaccagcaccagcaccagcacctgttccttcaccttctcaccacaattaccctcctacccctgcccctgctaagcctcctactcaccaccatcaccatcaccctcctgctcctgttaatccacctcctgttccggttcatcctccagttaaacctcctgttccggttcaccctccagttaaacctcctgttccggttcaccctccagttaaacctcctgttccggctcaccctcctgttaaacctccggttgttccggttcaccctcctgttaaacctccggttgttccggttcacccctttcctagaagctttgtcgcagttcaaggagttgtttatgttaagtcctgcaagtatgctggggttgacaccctcttgggagccacaccactacttggtgccgttgtgaagctccaatgcaacaacaccaagtacaagctggttcaaacaagtaaatctgacaagaacggctacttctacattgaagcaccaaagagcataaccacgtacggggcccacaagtgtaacgtggttttggttagtgcaccctatgggcttaaggcctcaaatctccatggtggtgtcactggtgctcttctcaggcccgagaagcctttcttgtctaagaggcttccttttgtgctctacactgttgggcctcttgcatttgagcccaattgccattaaatgcaagaaattatggatatatcatatttcaagttattttaagttatatgatagagctgtgttgtctctaatttgccttctttctggccttgttttgtttgtcttcatttttatttgtggttttgcgtttgtaggctctgggcttgaattgatcatacacaataatgagtgacagtacgtatgaaatggatagttctagtatgaaattaattcttgtgtaaaaaaaaagttgtaaaaaaaaaatagtttaaaattaaaaaa

SEQ ID NO: 6685 - DNA, 1151 bp, Glycine max
caccaacacaactctcctctcttctctctctctctctctgctttacttgcttgaagcaatggccaaagccttggcatcagtgctgctgtttctcctcgtagctgtgagtaatgtgtttgctgtagagcttgaacttgaaactcttccaccctcttaccctcaccctcaccctgttcactcccccacaccagcacctcttcacccaccagcaaatgctcctcacccacaccaccaccaccaccaccaccaccctccagcaccagcacctgttccttcaccttctcaccacaattaccctcctacccctgcccctgctaagcctcctactcaccaccatcaccatcaccctcctgctcctgttaatccacctcctgttccggttcatcctccagttaaacctcctgttccggttcaccctccagttaaaccttcctgttccggctcaccctcctgttaaacctccggttgttccggttcaccctcctgttaaacctccggttgttccggttcacccctttcctagaagctttgtcgcagttcaaggagttgtttatgttaagtcctgcaagtatgctggggttgacaccctcttgggagccacaccactacttggtgccgttgtgaagctccaatgcaacaaccccaagtacaagctggttcaaacaagtaaatttgacaagaacggctacttttacattgaagccccaaagagcataaccccgtccggggcccccaagtgtaacgtggttttggttagtgccccctatgggcttaaggcctcaaatctccatggtggtgtccctggtgctcttctcaggcccgagaagcctttcttgtttaaaaggcttccttttgtgctctaccctgttgggcctcttgcatttgagcccaattgccattaaatgcaagaaattatggatatatcatatttcaagttattttaagttatatgatagagctgtgttgtctctaatttgccttctttctggccttgttttgtttgtcttcatttttatttgtggttttgcgtttgtaggctctgggcttgaattgatcatacccaataatgagtgccagtacgtatgaaatggatagttctagtatgaaattaattcttgtgtaaagaaataaataaaaaaaaaatttagttt

SEQ ID NO: 6686 - DNA, 697 bp, Glycine max
taagcctcctactcatcaccatcaccatcacccttctgctcctgttcaccctccagttaaacctcctgttccggttcaccctcctctcaatcctccggctccggtgcaccctttccctagaagctatgtcgcagttcaaggagttgtctatgttaaatcctgcaagtatgctggggttgacaccctcttgggagccacaccactacttggtgccgttgtgaagctcgaatgcaacaacaccaagtacaagctggtccaaacgagcaaaaccgacaagaacggctacttctacatcggagcaccaaagagcataaccacatacggggcccacaagtgcaacgtggttttggtcagtgcaccctatgggcttaaggcctcaaatctccatggtggtgttaccggtgctcttctcaggcccgagaagcctttcttgtccaagaagcttccctttgtgctctacactgttgggcctcttgcatttgagcccaattgccattaaaatgaagaaattattatggatatataatatgataatgatatttaagttatatagagctatgttgcctttatttgctttatggccttgttttgttttgttgtcttcatttttagtttaatgtgttttccttttgtagctctgagcttgaattgatcatatacaataaacagtggatagttcaagtatggcttttagttt

SEQ ID NO: 6687 - DNA, 3005 bp, Glycine max
tccacgcgtccgtcttgacaccctcgctgaaacgctaacgataacaataacgctcgccgattagttaatttcttacacacactcttactcttttatctataccaatataccatttgcgttgtcgcagtcacaggcttaaggcaaaaccctaaattctctcacactttcgtcggaatactattttggctttttccgtgacaagatgccggcgaaggacgacggctccgacaaggagaagtgcctcgatctctttctcaagatcggcttagacgagcgcacggctaaaaacacggtcgccaacaacaaagtcactgccaatctcacttccgtcatcgacgaggccggtgctactgatggatgcagccgaacggtcggaaattttctttacacggttgcgacgaagtaccctgcaaatgccttgccgcatcgcccaacattactacagtacattgtctcgttaaaggtgaaaacaactgcccagttagatgcagcattatcatttcttgctaccacaggctccgagaatcttgatttggaccggtttgaagaagcttgtggtgttggtgttgaggtttcagaagaagatatcaaacaagctgttagtgaagttgttgaggagaacaaggctacaattttggagctacgttatcgaacaaatgtgggtgagttgctggggcatgtgcgcaagaggctgccatggggtgatgcaaaagttgccaagcaacttgttgatgcaaactatatgaactacttggtgatcggacagcagcagatgatgaaaagccttctagaaagaagaaggagaaacctgcaaaagtagaggataaggcagcacctgttgctactcctgaaaagtcacctgaagaagaccttaatccatttttaatattccctaatccagaggaaaatttcaaggtgcatactgaagtgccttttagtgatggtagtattttgagatgttgcaatacaagggatctgcttgacaaacacttaaaagcaacaggtggaaaagtcttgacccgctttccacccgaacctaatggatatttgcatattggccatgcaaaagctatgtttattgattttgggctggcgaaagacagggatggaggtggcacttccaggtatgatgatacaaatcctgaagcagaaaagaaagagtatattgatcatattgaagaaattgtccagtggatgggttggaaaccatttaagattacttacacaagtgattacttccaagaattgtacgaattagcagtggagctcataaaaaagggtcatgcttatgttgatcatcagacacctgatgagataaaggagcatagggagaagaaactgaacagtccttggagagacaggccaatttcagagtcattgaagctctttgaggatatgaaaaatggcagtatcgaagaaggaaaagccactcttagaatgaagcaagacatgcagagtgataactacaatatgtatgaccttattgcatatagaattaagtttaccccacaccctcatgctggagacaaatggtgtatctatccaagttatgattatgcacactgcattgtggattctctagagaatatcacacattcactgtgtacacttgaatttgagacacgtcgtgcatcatactattggttgttgcatgcgttaggcatttaccaaccttatgtgtgggagtattcaaggttgaatgtctctaacacagttatgtcaaagcgtaagctaaatcgtctagttacagagaagtgggttgatgggtgggatgatcctcgtttgatgacactagctggtttgcggcgtagaggcatgaccccaactgcaatcaatgcttttgtccgaggaattggaataactagaagtgatggcactttgatttctgtggaacgccttgaatatcatgttagggaagaattgaacaaaacagcacctcgtgcaatggttgtcctacatccactcaaggttgtcattactaatcttgaagccaactcagcaattgaggttgatgcaaagaaatggcctgatgctcaagctgatgatgcttctgctttctacaagattccattttccaatgttgtatatattgaacattcggacttccggatgcaagattcaaaagattattatggccttgctcctgggaaatctgtgatactcagatatgcatttcctataaagtgcactgaagttattctagctgatgataatgagactattcttgaaattcgagccgagtatgatccttcaaagaagaccaagcctaagggggttctccattgggttgctcaaccttctcctggagttgatccattgaaggtggaagtcagattgtttgagaggctattcctatcagagaatcccgctgaacttgacaactggcttggcgatttgaacccaaattccaaagtgataattcccgatgcatatggtgtgtcttccatacagaatgcaaaagttggggacaatttccaatttgaaagattaggctattttgtggttgaccgggactcgacatcagaaaaacttgtttttaataggactgtcaccttaaagggcagctatagcaaaggtggaaagtagggtccctgaatattgattagaagtaacaaggtgggacaggcaggtctgcgggtaatacttgtttaaatagctacttataatgcatagttttttctttgagggggtggggggttatgtacaaacatatttactggccacttagccatgtacattttcttaagggattactcaatagttccccaattatttaattattttgtttggttggttttgtagtttgaagattttttctgtttactcccaatgtagtaccaaattgctgttattttcctaccattttgtgtaaaattagttctgaagaatctttccctttacatttaagtgaaaatcaagtctaatttttgttcctggcccaaaaaaaaaaaaaaaaaaaaaaaaaaaaaaaaaaaaaaaaaaaaaaaaaaaaaaaaaaaaaaaaa

SEQ ID NO: 6688 - DNA, 770 bp, Glycine max
aaatttaagatatcactgtcatttattcacatccatatccactcactattccctcctccttcctttgcctctttcgcttttgctttctaggttttttttttttttttcttgctctttctctgtgtcgatggcgggaaaaggagggaaggggcttgtggccggaaaaaccacggcagcgaacaaggacaaagacaaggataagaaaaggcctgtctctcgttcatcccgtgctgggatccagtttcctgtgggtcgtatccataggcagttgaagcaaagggtgcaagcaaatggacgtgtgggggcgactgctgctgtgtacttggcctccattctggaatatctgactgctgaggtgctggagctggcggggaatgctagcaaagatctgaaggtgaagaggatcacaccaaggcacttgcaactcgctatcaggggagacgaagagcttgacaccctcatcaaagggaccattgctggtggtggtgttatccctcacattcacaagtccttgatcaacaaagctgccaaagaatgaaaatcaaatgcctctttgtttctcctattatgtgttcctttatgtttatgtagtagttagtgtagtaggccttctttactgtttatgaacagatgttaatgttattgtgtaaatggtcattctattggcttttaacttgcctgttgtgatacacctgggattgtaatgctgctggattttaagagttctttgttttaaaaaaaaaaaaaaaaaaaacaaaaaaaaaaattaa

SEQ ID NO: 6689 - DNA, 820 bp, Glycine max
attcaaacaggtccttaatagctactattttcttggttgtgttgttttttttttttaggggtacacaccagataaatctttctaaattagcctcatagtaaaacagttaaaccttgggtcataaaagcatattattgaggaacaaaaataagctaagatagcaaaagctcgactatccatttgttttgatttgtctacagttcgttgtttccttttccttcgcctaaacttttgtcgttcactcccacaagctcagcgtcaaatatgagtgtagcaccacctggaatagtgggtggggaaccctgctctccatagccaagttttgatggtattttcagcttacgcttctcaccaagacacattcccaataatccctggtcccaacctttgatcacttgaccagtaccaagctcaaattcaattggattatttctttcaaagctagaatcgaaaacagttccatcagtgagttttcccctatagtgtactttgactctgtcacctttgtgtgcctgaacttcacatgatactggtttatgcttcacgccaatttgcagctccgtcacatcaccagttttcttcgcagaaactaatgcagaaacgaagaggaagaagaggagaatgggaagagcgttcatgatggaatgacggaaactcatttttgtttttctttctcgaaaagtcagtcactggtttctctcacactcggactcacacagtcggtgggcggtgttatttaataggacaaggacgatccaattccagaccctccgagagtgtgaactgtgaagaattgtcaaaaggtggggtcactgaaatt

SEQ ID NO: 6690 - DNA, 1646 bp, Glycine max
acgagggacgagcgaaacccaagacaagaatcacagcgcacagtgacacatacataaaaaaaaacgaaacacaaacagaaacagagttattggaaaacacgaaacactaattgatttgaattcgattcgattgaggattgctgtttgggtgtcttgatggtgtcggtgaacccaaaccccgctcaaggcttctacttcttcgatccctccaacatgacccttcccggcgtcaacaatcttccaccgccgccgccgccggctccggctgctcctgccgccgtcgaggatccgaataagaagatccggaaaccctacacgattaccaagtccagggagagctggaccgagcaggagcacgacaagtttctagaagctctccaattatttgatcgggactggaaaaagattgaagcatttgttggttcaaaaacagttatccagatacgaagtcatgcacaaaagtattttcttaaagttcagaagaatggaacaagtgaacatgtacctcctcctcggccaaagagaaaagctgctcgcccataccctcaaaaagctcctaaaactcctactgtatcccaagttatgggcccattgcaatcttcatctgctttcattgaacctgcatacatttatagcccagattcttcatctgtgcttggaactccagttactaacatgcctttatcatcttggaattataatactacaccacaaccaggcaatgtgccacaagtgaccagagatgacatgggattgactggagctggacaagctgctcctcttaattgttgctacagcagtagtaatgagagcacccctccgacttggcctcgtagcaaaaggattaatcaaggtgaccagggcaagccaattaaagtaatgccagattttgcacaagtctacagcttcattggcagtgtattcgatccaaattcaactaatcacctacagaaactacaacagatggacccaataaatgtggaaacggtattgttgttgatgacaaatctctccgtcaatttaatgagtcctgaatttgaggatcataagaggctgctttcatcatatgataccgactctgacaagtcgaagtttgttaatatttgcagcaaatccttcaccaataaatccgagagtgctgttttgtctgcttaggatgtagccagtggtttgccctgaagagtgttttcaatatattttctgaatgcacataaagtggtggagcaagaaagggaaaagacaaaggttttgctgaaaggaagtgtagtatctagatgcttgcatgtgtatataactcgtatatataagtatatgtataccttttggattgagtttttatttgttttaggcactgttagatcgtagttatgctgctgttttgtgtatatcttttgaagatgattgtccttggcatgcaggacaatgagagtcctgttaggtcacttttggaggctatactctgtacagtctgttgagtgcttttgtgtgttatgctgtgaagcttagaattagtataaaagagcggtgttaggacttagggggtgccgtctgccttgtatatataaagcaataaaacagtgtagataaagtttcttcttttcatgcgtgtatattatattaataatacctgctacctggtctcaact

SEQ ID NO: 6691 - DNA, 1539 bp, Glycine max
tcagctacgtaggccccccccccccagggtccacttccgagtgagccaaaaccaaaactcacacctttcgcatccgtcagctctcaatcccattcggaaccaaatttcaattccaccaaaaaccctaatttcctttctctctaactcttagatcttcacgttttagggctttctccaccttccgcaatgcacaaattgggaagaggtcatcgtgacaaactccagcagttcataacaataactggagccagcgagaaactagccctgcaggctctgaaggctagtgattggcatcttgaaggagcatttgatttcttttacagccaaccccagcttaaaacatttactgattctaggcacttggaggagctatacaatagatataaagatgcatatgttgatatgattttggcagatggtatcactctcctttgcaatgatatccaggtggatcctcaagatatagtaatgttagttctttcatggcacatgaaggctggcaccatgtgtgaattttccaagaaggagtttattgaaggtctacaatctttggggattgattctctggaaaagttccgtgaaaagataccttatatgcgctctgagctgaaagatgaacagaaattccgtgagatatataattttgcttttggctgggcaaaagagaagggtcaaaaatctcttgcattggatactgctattggtatgtggcaattattatttgctgagaagcagtggccgctggttgatcattggtgccagttcttgcaggctcggcataacaaagcaatatctagggacacatggtctcagcttttggagtttgcaaagactgttggctcaaatttatctgattatgatgccgaaggtgcttggccatatcttattgatgaatttgtggagtatctcaacgagaatggcataatccaaaatgatctgatcaatgattctagtctaaaacgatgatgcattcaaatctcaataaattgttatttaagagaatttgatggagtctcttgtgatgagttgtgctattctgtgattgaactcctctttgttattaagtgggattcggtctaaattcaaaggggacatggctgctagagcaaactcattcttactgacaagtagtagcatcatttgtgagattgttgatatggcatatgaatttccttgggaagtattgtggaattagtaatgggagcctactaattccacggtgttatagtttctggtctctttttaatttaataattaattcttgaacgatgtcttgatagaagataagagacttacgtgattgtgattggctgtccttgtttctggtctagtttcatcttgtataatatgtggcaccaagttattaaaacattcatgaaatagagaaggggaaaaaataactatgttgtgggtctgttttcctttggaactatttagaagcaataccttgcatatcggttctatatgctcctacaatatggtatgttgtttatttggatatttaaaaatttgtcatcttaaaaaaaaaaaaaaaaaaaa

SEQ ID NO: 6692 - DNA, 1503 bp, Glycine max
cccacgcgtccgcttcgttacccactcccgcctccacccccccgccaagtagtgtccaattctgagtgagccaaaaccaaaactcacctttcgcatccctcagctctccatcccattcggaaccaaatttcagttccacccaaaaccctaattttctttctctcccgcacctagatcttcaggttttaggcaccttccgccatgcacaaattgggaagaggtcatcgggacaaactccagcagttcataacaataactggagccagtgagaaaatagcactgcaggctctgaaggctagtgattggcatcttgaaggagcatttgatttcttttacaaccaaccccagcttaaaacatttactgattctaggcacttggaggagctatacaatagatataaagatgcatatgttgatatgattttggcagatggcatcactgtcctttgcaatgatatccaggtggatcctcaagatatagtaatgttagttctttcatggcacatgaaggctggaaccatgtgtgaattttccaagaaggagtttattgaaggtttacagtctttggggattgattctctggataagttccgtgaaaagataccatatatgcgctctgagctgaaagatgaacagaaattccgcgagatatataactttgcttttggctgggcaaaagagaagggtcaaaaatctcttgcattggatacagctattggtatgtggcaattattatttgctgagaagcagtggccacttgttgatcattggtgccagttcttgcaggctcggcataacaaagcaatatctagggacacatggtctcagcttttggagtttgcaaagactgttggctcaaatttatctgattatgatgccgaaggtgcttggccatatcttattgatgaatttgtggaatatctgaacgagaatggcatcatccaaaatggcctgatcaatgattctagtctaaaatggtgatgcattcagatctcaataaattgctctttaagagaatttgataagcctcttgtgatgagttgtgctattctgtgattgaactcctctttgttattaagtgggattcagtctaaattagattctagagcaaactcattcttgttgacaagtagttgcatcatttgtgagattgttgatatggcatatgaatttccttgggtattgtggaattagtaatgggagcctactaattccacggtgttatagtttctggtctcttttaatttaataattaattcttgaacgatgatgtcttgttagaagataagagacttatgtaattgttgttagctgtccttgtttctggtctactttcatcttgtaaaatatgtggcaccaagttattaaaacattcatgaaatagagaaggggaaaaaataactattatgtgggtccgttttcctgtggactattgagaagcaataccttgcatatcggttcaaaaaaaaaaaaaaaaaaaaaaaaactcggactagttctctc

SEQ ID NO: 6693 - DNA, 1444 bp, Glycine max
cggacgcgtgggggcgtatagatatacagatacgtcgaggtacctcaacaacctcatccaataccaatcaagaagaacgcaatgagacacaatctgctcagctacgtaggcccccccccccccgttctgttaatcaggcaacctctaggcgtccagatgcatccattgctggggagccaggagtaaggttagtgccaattagaaccatggttgcagcagcagtgccaggcaccttagggcgtctgccttcagaatcatctggtaattctatagggctttactatccaattcttgggagatttcaacatgtttcttctggacattcaaatagtgaacaaggatctcaacaatcaagtcagcatcacactgtgttaccgtcgactcctgaatccatattgcaaaggcaaaacacagaagattctgccaggaatgtaggatccttatcaactccaagcacaaggcaagagccttcaagttctcgtgttgtaaatatcaatattctggctgctagtggaccccaaaacaaccaagaatctgagagacaaataccaagcagtgtacttcagtttttaaggacattctttcctggtggagaaattcacgtggaagattcaagtgtacaaggaacaactgcaggttctgccttagatcatgctgcaacatcaaggggtgctgccccagttcctgaagcacaacctaatgtcagtgaagaaggaatatttttgtctaatatactccgtgaaatcatgccagtgatatctcaacaagtagggtctgagggaaatccttcagaagatcatatggctcaagattcttcaacccaggttgaaactgatgtcgggacatcacgcagacagagtgattctgatccaagccccccaaatgcaaaacgtcaaaagatggagtgatatagaggataatgttaagtttgcggtcgtggaagattgtgatcgtaagaaacagaattcggggtggatctcatgatgtcaatttggtattatgtgcttacgtagttttctatatcaagcgtgatttcattttctcctgctgtagacaaaccttaagaagactgctctccgaatgtgacattttgtacatcattggcattggaattgagcttcccttaagttcagtttatgcttggaattggtaatagaattcaacattacagtggagattagccatcttataaacttaatttggcgtccgtgaagttgaaacagaactaaatcaaacatttctgaatttttaatcaggaagcattttggtttttagaaagcaataattgagacgcaggtacattaattttgttgcttctgttactatcaattttgttgttcaagtattaacctttttaagtggttcttaaagtgaaaaaaattataaaaataatgttatgtagtcttttgaatattaaaaaacccgttaaatctgtgagatgact

SEQ ID NO: 6694 - DNA, 2030 bp, Glycine max
gaacaaacgtccataaggcgcgggctagcattattgatcgtttgtgtgggtgtgtctgttttcgttgtttcccactttccaaatcacatccaacgtgaatccgtcattcaacttgattgaagtatccaacgaaaattcaaacacacactaaccttactgagtgtgttcattgggaactggttcattccacacattttatttaagccaaaaaaacccacaatttctcttagtgtgtgcttttttgttgaaattgttgtttcttcctctgagttccaactttcacctcagccaaatacacaacaaaatggggtttcagaagataagggtgggcaaccccatcgtcgaaatggatggggatgaaatgacccgagtgatttggaaactgataaaagataagcttattttcccttatttggagctggatattaagtattttgaccttggccttcctcatcgcgatgccactaatgatagagttactattgaaagcgctgaagctacactcaagtataatgtagctatcaaatgtgctactataactccagatgaagctcgtgtcaaggagtttaacttaaaacaaatgtggagaagtccaaatgggacgatccgaaacattttaaatggtacagtttttagagagccaattatctgtaagaacattcctcgtcttgtttcaggatggacaaagccaatatgcattggaagacatgcttttggagaccaatatcgggcaactgatacagttataaaaggcccaggaaagctaaaattggtttttgcacccagtggaaatgaaggcattaaagagctagaggtctataactttactggtgctggaggcatagctttgtccatgtataatactgatgagtccattcgagcttttgctgaggcttcaatgaactttgcttaccagaagaaatggcctctctatcttagcactaaaaataccattttaaagaaatatgatggaagattcaaggacattttccaggaagtttttgacacccaatggaatcacaagttcaaagctgcagggatatggtatgaacaccgtcttatagatgatatggttgcttatgctctcaaaagtgatggaggttatgtatgggcctgcaagaattatgatggtgatgtgcagagtgatttcttagctcaaggatttggttcacttggcttgatgacgtcagtactggtttgcccagatgggaaaaccattgaagcagaggcagcccatggcactgttacccgtcattatcgggttcatcagaagggaggtgaaaccagcacaaacagtattgcttcaatttttgcctggtcgcgaggtcttgcacatagggcaaaattggatggaaatgctagattgttggacttcacagagaaactggaagcagcttgcattggaacagttgaattgggaaagatgacaaaggatcttgcacttcttgttcatggacctaaggtttctagatcccagtatttgaatactgaagagttcattgatgccgtagccgaggagctgcgaacaagattatcttcacaatcgaagctgtaatgttcaaaatgagtgtgcccaataaatgttctccatttccttcatttttcctttttctttcttgaaggagggaaattctattgcttgagttaaacattttagagcaataaggtcaccaaaattctgatgcatcacttattgcatgttgcttccttcagccataagaactcaacatttgaagaactcataccatgtaccacaaaatcaatactatcttttcattgtcaaaacaacagtgctactttggaagtccttacaacaatattaaagacattgtaaaaaaaaatagggaaaaaaagcatcttcgaatgaatttacatgtctgtttacaatctatatttctcagggatgtcttcaattttctttagggaaagaggaggtggaggcgacagtttgtactgtatattcttgtcaaagaaatatatattttaacagaatatatgacttttactactaaaaaaaaaaaaaaaaaaaa

SEQ ID NO: 6695 - DNA, 2428 bp, Glycine max
ctggtccccaaccctccaaagctcaacagcatcgccaccagcaaacagggaacgttgccgatctggtttgtgatcccagtggcttgggacgaagaagaagaaccagtgggtcgttgccttccaacacagccatggcttcgtgaaagacgcaccacccactgtcgcacgcatttacagcaactagtttctctcgttcttctccaagacgccccatttctgcaattggtaagctatattgcatgaccaaactttagggccacggtttcgaattataaatcccctcctttgaaatgatttttactaatcaatgttaaatgtgaacagaactatattattccaaactcattccactgcaatggcaatgaatttgttagagtatcgacagtttaaaattcagtaaattgatggttttgagtgaaaatggggatttgagagttttaaggtagagcaaaaccatgctaaacttcagtacataggctggctagctagctcaagggataaaatgagccgaatccggaggcttgtctatgttcatctcattccacctgtgactgagaggggattttctagcctgagtgtggtcactgcaccttttgattttactgaaattcaaattagtcgccttcccactgtcgtcattctagggcgacctaatgtagggaaatctgcattgttcaaccgtcttattcggaggagggaggctctggtatataacacccccgatgaccatgttacccgtgacatacgagaaggacttgccaagttggccgacttacgattcagggtcttggactctgctggcttggaagctgaagccacttccgcttctatcctccacagaacagcttctatcactgcacacgtcttagcaaagtcacactttgcgctcttcctcactgatgcaagagctggacttcatccacttgatctccaggttggaaaatggttacggaaacatgcacctcaaatcaagcctattgttgccatgaataaatccgaatcactctttgatgccactggctctctggcttcagctgcaaacgaaatgtgccgcttgggatttggggatcctattgccatatctgctgagactggactcggtatgcatgacttatatatgtctcttaagcctctcctcgaggactatatgcttcgtgtcttcactgaagaaggtgctcgcgaaaatagccacaacgaggtcgaggacagcagcgaccttgatgttgacaaaagtaagctgccattgcagttagccattgtaggacgccctaatgttggtaaatcaactttattgaatgcattgttgcaagaagaccgtgttcttgtgggtcctgaagctggtctgacaagagattcaatcagaacccagtttgaatttcaaggaagaacaatttatctggttgatactgctggttggttgcagaggacgaagcaggagaaaggagcagcatccttgagcattatgcaatcaaggaagagtctactccgggctcatataattgctttagtactagatgcagaagagattataaatgcaagacgaagtatgaaacatgctgaagtagttatagccagacgggcagtggaagaaggacgtgggctggttgtgattgtgaacaagatggaccttctaagaggcaaacacaaatcgtcatcctatgagaaggttatggaagttgttccacaagaaattcagacaattatacctcaggtaacagggatcccagttgtattcatttcagcattggagggaaggggccggaccactgtcttgaatcaggtcatcgatacttatgaaaaatggtgttcaagattacctacagctcgtctaaaccgttggttgcaaaaggttatgagcaggcattcttggaaagaccaagcagcacagcctaaggttaagtatttcactcaggtcaaggcccggccacctacatttgttgcgtttgtgcgtgggaagactcagctttctgatacagacattaggttcttaaccaagtccttgaaggaggacttcgatttgggtggaattcctatacggatcatgcaacgttctgtcactaagaaagatgccagtggaagtggaaatagcaagaatagccattcggtatgcagagtggttgaaaggactgtctctgacaagagaagtatcgtagatgaataacaaatttgacttctcattaaaggacatgagtatcactccgcagaatttgctaaaacgagtttagagttatttaattacagtataattttattctcagttcaaaagcttgattctgaattattgaactatgtgcagcgaggaggagcacaatttcaaaggtgctgagttttatgcaacaataatatagtgttatgaatcgttgatgattttttttgagtaaaaaaaaaaaaaaaaaagtagtgcaatatatattgaatgaattgttgc

SEQ ID NO: 6696 - DNA, 1240 bp, Glycine max
gtaccgatcccgaattcgacgcccgaccaccccttcgtcggtcagctacgtaggccccccccccataacagacctaatcaatcagtcatacgaatttccagaatacaaattcacactctctttggctctggtgttgtgttgtgttgaggtacttgagaagagaaaatggtgtcgtcgcaggttgtgaatacgtacccgttgtcgagctacacgttcggcacgaaggagcccaagatggagaaggatacctccgtcgcggatcgtctcgctcgcatgaaagtcaactatatgaaggagggaatgaggaccagtgtggaaggaattttactggtacaagagcacaatcatcctcatatacttcttctgcaaattggaaacacattctgcaaactcccaggtggtcgtctcaaaccaggagagaatgaaaatgagggcttgaagagaaagttgactagcaagcttggtgctaattcaccagctcttgtgcctgactggcagataggtgagtgtgtagcaatctggtggaggccaaattttgaaaccataatgtatccatactgccctcctcatataacaaaacccaaggagtgcaaaaagcttttccttgttcatttatctgagagggaatactttgcagtgcccaaaaatttaaaactactagctgttccattgtttgaactctatgacaatgttcagagatacgggccagttatatccaccattcctcagcagctatccagattccagtttaaaatgatcactaattgaacataaatttgaagcttacatgctgataattactactttcatttgtaattttcgtaactaggaattatcattgcatagactggctagaaaactgagttttgaagtgagttgctgagtagagtagttatgttgtgacatggtttgtctgtatttcattcattgtactgtgggttgatgtcggttatcaacaatcaacccaagagggaatcaagtaatcaactagtaggctatatgcatctaatgcctagtagaaatgaaggtgatcaggtagtgtttgatctcatgtctgttgcttctgccctgctcaggttgccaatattacaataggaaagggtaaaggaatgggcattggttttcattactagtttttctggtgaaaggcattgaatggaaaaaattatacatttgaaattcaaacatcgccctcggcgcaaaatgtataaaacaatgactaaaatttaaaatgtaaaaa

SEQ ID NO: 6697 - DNA, 2221 bp, Glycine max
  misc_feature (2054)..(2058): n is a, c, g, or t
ccacgcgtccgcgttggtgtgttacagaaagatgagcggcggtggtgggtcttcgagttgtgctagggttccgatcccaaacaatgtacgcaaaatcatccaggacatccgtgagatcaccggcaagcagcacaccgacgacgaaatctacgccatcctccgtgaatgctccatggatcccaatgagaccgctcagaagcttctctatttagatacttttcatgaggtgagaaggagacgtgaccgaaagaaggagggattgagcagcagggcttctgatgagcctaggttaaagcaaggcggacaagggagggggggaaggggtgcttctggaggatattcctctaactttcctgatggtggtggtgggaggaaccaagctaatcgaagggaaaatggagtcaatcacattgcagagagaagtcatgctccctctactcagccattttcacagaaaactaagactaatacaacatctcaagctacaagagtttcagctgttgcaccccaaggtgctgcaaatcaatccaatgggaagtcaggtcatgattctggtggccaatctcccatagttagtgtacctaaaagtacttcagctgctaaggacactggccatcaagaaaatgtccaacctcaagcagctgttgttgcagcagcatcctcctctactcaaacctttggctcagttaccagctctaaccaaggaatgtctgtgtcaagttctgatcaacttcaaacttctgtatccgatgttcattcttctttggatcctgtagtggcatcatctgtctcccggagtcttggtgtgagtggtgctattagtagggaagttgtgagcaaccgaatatctgctggaccaaatcatgttagaggaagtaaggttgttcatgaagttaatgatttatcggcatcaaagaatgaaaaatatgggtccatgaattcagcaagcaaaacaaattccccacagaagttaaatgaagttgaaaataatcatttatctgaaccctcacaacttccatctccatccccaaatgattcattgaggccatcttgcagttctggtagccaaccatctctagctaatatcgcagaggtttcaacttcagaagtttgtgtgcaatcttcagcagagttgagacatgttactttcccaaaccatttccaagtacccaaggctttaaaaagtggtctgacatttggaagctttgatacttttggcccaagtgaaaaatccaacagtggagctggtggtgacaataacgcttctcctgcccttgaattgagtgacgaaactgcaacttcaagcaaccaaaatgcatcattgactgcacaaggagatcatcttgactatccacattcttcaccatattggattgaaaagacaccagctacaaaaggcaatcctataactggtactgacacaaaggttgatcagccaaagaaggaggttttgttggctcctgaaggccaacaaattccaactgttcaaactgctcaaaactatggtttgaatttcatttcctccatgttaggcactcagcaagttcaatttgagggaactgaacctcagtcacaagatacatctcgctttcctaactttgttaatgcaagttctcaggctgtgtcccctagcccaactccacccctgcagaattctatacctgtgactccacagtcggtttctattttcaggccaccataccctgctaatttcttcccatatggccactattaccctccaatttatgtgtctccaatccaccaatttttaaaccacaatggtttccctcaacaaccatcagctggcagcatgtatctaccagcagctgctgggatcaaattccctctccctcaattcaaggctggagccaacacaggaaatgcagctcatattggaattccttctggatcatttatcactccacctgtaggatatgcgccaggtcaaacagttaatactggaagctccactggaaatgaagatctggtagtgtctcagttaaaggaaaaccagatctatacaacaggacagctgagtgaatggtttacttccnnnnnaatgtccttttatttcacccatgcatatttcttgataaaataggaaattttgttccatattttggtccctggttttcaatagtatcaatcttattttgtcaagagtttatgtttgcttcatcagcttgaaatgaaattcttggactttctggagttcctaatc

SEQ ID NO: 6698 - DNA, 1709 bp, Glycine max
cgacccacgcgtccgcttataaatagtcggggctcagctatataggccccccccccggctaaaactcagcatcacattcactcgcacaacacagtacaggagctcaaatatggataaagcaattcaaagacagagagtcctgcttgatcatcttcaacccatttcttcaagttcaaatttttcttctcaaacccatcaatctacggatctctcagcttcattatgttttgccaagaattcttcgcacggtcaaataggtggatcagatgacgacgtggtgattgtagctgcatatcgtactgccatctgcaaagcaaagcgtgggggctttaaggatacccttccagatgacctgcttgccacagttctgaaggctgtaatagagaaaacaaatgtgaacccagcagaagttggagacattgttgtgggcactgtactggcacctggatcagatagaggaattgagtgcagaatggctgccttttatgcaggtttcccagagacagtgcctcttcgaactgtcaataggcaatgttcatctggacttcaggcggtttctgacgtagctgcttatataaaagctgggttctatgaaattgggattggggctggattggagtctatgacagtagatcgtgtgaataggcttcgcaacattaacccaaaggtagaaacctttgcagaagcccgggattgtcttcttccaatgggaattacttctgagaatgtagcgcagcgttatggtgtgacaaggctagagcaagatcaagctgctgttgagtctcatcagcgtgctgcagctgcaacagcagctggtaagttcaaagaagaaatcattccagtttctacaaagtttgtggaccctaaaactggagtggagaagaaaattgttgtttctgtcgatgatggtatccggccaaacacaaatttagtggatttggcaaagctgaagcctgcattccagaaagatggaaccacaacagcagggaatgctagccaaattagtgacggtgcagcagctgttctcctcatgaagagaagagtggctgtgcaaaaggggcttcctatacttggaatcttcaggagttttgctgctgttggagtagatcctgcagtcatgggtgttggccctgctgttgctatcccagctgcagtgaaatccgtgggccttgaacttggcaacattgacttatttgaaatcaatgaggcatttgcatcacagtatgtttattgcctcaagaaattgggacttgatcccagaaaggtcaatgtcaatggtggtgccattgctcttggacatcctttgggtgttacaggtgcacgctgtgttgcaactttgttgaatgagatgaaacgtcgtggcaaggattgtcgctatggtgtaatctcaatgtgcatagggtcaggtatgggagctgctgctgtatttgaaaggggagacttttgaagatttgtgcaagtttagaagagttcatacaaataacgatcttttgtcaccgtatgcttgacattagacatcatttgaagtctttctattttgaattcagctttgattgaaatattacaaaaaattggaagtgtaaacaagaattattttaaccatgaattatgactcaactatagcattgagtttgctaactcaaaaaaaaaaaaaaaaaagataatctctttcaaacaaaaaaaaaaaaaaaaaagaattcctcagccgg

SEQ ID NO: 6699 - DNA, 1074 bp, Glycine max
tttaaaacaatccatgcacttctacaaacacaacttgtataaagggaagtagtccaggtagtaataaacttaccaccactcaatctctggaatttggtccttgggcttttctttaattacaactctctctgttatttctattaagttaggatttatatcaggagcagcctttgcctttgccaactgtgcttgtttggccttgtgctcttttgcttgagcttctccaaatttactcttcaattttattgtttcagcatcttttgaccattttccttcctcaacaaattggaaattcatcctcttgggccgcaggagctttgttttgttgatacccatgcttgcatcaaaatgaggattagattcaggatcgacatctaatacaggttgtagtatttcaaatgcttctttcttttgtttgttaatgttgacctttaatgtgctaaggttgatgggcttagtcacattaataacatttccatgctcatctatttcccgtccctgagcatcaagacgaagaacaggggccttcatgggtttctgcaggagagtaacatctgttaccatctgaccaggaaacatgtttatcagaggagcaaattgtggatcttgacgaaatcccatcctggcagcaagctcttgagcacgcctgacagcttcccagttgggcagagttgcatttggaataccagcagcactagtgccaattactggagtattagcagaagcagcaaaagcagttgaggggaaaattgacatatttgcagcatggaccaaagaagctgacgtggaactttttgatgccactccagcagcagaagagggtactgcagattcattcattgagcccaagttagagcttccttgtgaattttgggtagaactcttattcaactgaggaattttctttagcttttctgacaactctttctgcatttgtaaagctttcttagccttagctagggcatcaatagagaggctcccagtttttctagcagttgaagatgacccatcttgataggaacagaaggaggaggagccaaagatgtttcggggggggggggcctacgtagctga

SEQ ID NO: 6700 - DNA, 1639 bp, Glycine max
cgggcattattcggctataccagaagggatatcaataaaagcatattaaagtccgagtttaaagtgtcggttcctaagtaaaatcccaaaggacaaaattttaaacaaatgtggtgtatcacctgcaatccgtagcatctctgacgctaccaaacccgacatgacaatgtatgcaccacgaaatggtgtagaaaatttataatgattgtagtagtagatgtcattggccattggaaacaagggaagcactagcagctattcggtttattattttgtttaaaacactgcttaatgcaaaccgtaaaaccgatcactaaccagaagaatttagccaagcaggccaataacggaacactagaagacaagtcaaacagcttcatcttctacgtagttcacagctaggtcccaataatgaggaacaccagcatccacaaaaactttacggccagctgcttcggtgatgcagtcatgaacactgaacctattgaagcttggtttggcaacacttccttgccacaccagaacacacttattgataggcttatcatcatctgaatcttcattttcttctgtctcttttgaaacgtcagtccaattaatacgtctgagcataagtttcccatacctcttaattgacttgcttccaccttcaacaacaacaacactaataccatcacaaatcacagcacatccagtcaaacggttctcttgagcattaacgtcaactctgaatcgggccttcggatgtgagaggtcatttatcctgtaaagagagacaagtgtctccagtgtatttgggtcatcgaacaacttcttctccttcttctcccgcagctcagcaggagtaagcttgcgtgcaatgttcctatctatgtgagcctgctcacgctccgcagctgcagtacgtatttccttttcgagccgagtaggatcttgagttgcttcagagccaagtactttcattaagttgctaatcttgacctttggttttggtggttctatgacaccctgtcttatcatctcctgtcgctctttctccttggctatacgtctttgtgttcggagtttcttctgttcttgcttagttagcttcaatggttgaggtggtggaggggcaggctcagcaggtggttcaattggacgaggatgctccacataaaaagtgatcttttccattttcagtttatcttcacctatggttccattatcaatatcaccataatttccagaatgcagaagaggcacatcccaccattcaatttctggaatttggtccttgggtttttctttgattacaactctctctgttatttctattaggtttggatttatatcaggagcagcctttgcctttgccaactgtgcttgtttggccttgtgctcttttgcttgagcttctccaaatttactcttcaattttattgtttcagcatcttttgaccattttccttcctccacaaattggaaattcatcctcttgggccgcaggagctttgttttgttgatacccatgcttgcatcaaaatgaggattagattcaggatcgacatccaatacaggttttagtatttcaaatgcatcgggccttcgttggttaatcgtgacctttaatgtgctaaggttgatgggcttagtcaca

SEQ ID NO: 6701 - DNA, 1033 bp, Glycine max
atattctcttaacccatgactttgaacctctggtggctgattttgggcttgctagatggcactcagaatggaatatagatactgaagatcgcgtcataggaacttcagggtatcttgcaccggagtatcttgacgctggaaaccttacatataaagtagatgtatatgcatttggaattgtattattagagttaataacaggtcgaagaattagcgagttggaacagttcaatggacactcgtatctttctgaatggtttcatcccatacgcatgttagagcccggtcatatcttacaaaacgttcgttctctcaaaccatgctttgattctaaggagtcagtggaatttaatcttcagttgcaagccatggcacgggctgcttcgttgtgtcttcgtgtggatcctgatgccagacccccaatgtcaaagatcctgagagtgttggaagggggtaatccagttcgtcctatgggtttagacatcaattcagttggcaacacaagtggccatttaagtggtttgaagtcgcacactccaccaaaaggtacaataaatcattcccgtagactatcacattgatcattgtttcggctctttgggctagctagaggatctattgttggcaatatagttctgtttgtgagctgcatagtatcagttatccatttgaaacgtggaactctctcgtacgcttatacaaactttcagacaagcacagcacctggtggaaattagtaagaattaagaagtcattatgttagcattctcattaaaaaaaaaaaatggtttgtaatttggagggggggttctgcagccttgtaattcctaactcaccatttttttaatagcaaaaattcatttgacaggggatgcttctctttgctctattttgtctaggatctaaagggaaatccccaaattgattgttcaccgtaattttttttttttttacgtacaccgtattttcttcttgcttgaagaaaatatattaattttgaatacaagggtactcaagtcctttacaattaaaa

SEQ ID NO: 6702 - DNA, 1574 bp, Glycine max
gggggaacaaccacaacaacaaattttccaattagccactatgagaaagagttggaagaaatgaagcacatgactaggcaagagtacgttgcgtcattgagaaggaagagtagtgggttttctcgcggtgcatccatttatcgaggagtgacgagacaccaccaacatggaaggtggcaagcgaggattggaagagttgctggcaacaaggatctttacttgggaacttttagcacccaagaagaggcagcggaagcatatgatgtagcagcaatcaaattccgaggactaagtgctgttacaaactttgacatgagcagatatgacgtgaaaagcatacttgagagcaccactttgccaataggtggtgctgcaaagcgtttgaaggatatggagcaggttgaactgagtgtggataatggtcatagagcagatcaagtagatcatagtatcatcatgagttctcacctaactcaaggaatcaataacaactatgcaggagggggaacagcaactcatcataactggcacaatgctcatgcattccaccaacctcaaccttgcaccaccatgcactacccttatggacaaagaattaattggtgcaagcaagaacaagacaactctgatgcctctcactctttgtcttattcagatattcatcaactacagctagggaacaatggcacacacaacttctttcacacaaattcagggttgcaccctatgttaagcatggattctgcttccattgacaatagctcttcatctaactctgttgtttatgatggttatggaggtggtgggggctataatgtgattcctatggggactactactactgttgttgcaagtgatggtgatcaaaatccaagaagcaatcatggttttggtgataatgagataaaagcacttggttatgaaagtgtgtatggctctgcaactgattcttatcatgcacatgcaaggaacttgtattatcttactcaacagcaatcatcttctgttgatacagtgaaggctagtgcatatgatcaagggtctgcatgcaatacttgggttccaactgctattccaactcatgcacccagatcaactactagtatggctctctgccatggggctactacacccttctctttattgcatgaataggtggaaaactagggagagaaggaagagtcaaaaaggtgatgaagaagatgcatatattgctgacttgtttcttcctcttgtgaagttgctaatttgatagtgtgcacttttgaagatgaggatatataggatttctttcactatctctaacttgcaggatccttatttcactagggtctaagtaatctagcctcaagtttagtcatggcagaagcatttgctgtgaattttgggaattaactttggagaatgtgtggacagatcattgggatgtttttattatcagcggactttttaattctggaataacaacgatcataccaagggtggagttttcctcaatgtatatgcatggcacttgtttttagttttttaaccaaattctttttatacattatgcatggtaatgggtgttagtg

SEQ ID NO: 6703 - DNA, 1388 bp, Glycine max
  misc_feature (76)..(80): n is a, c, g, or t
  misc_feature (114)..(118): n is a, c, g, or t
ctttcgtgaaggctcagcttctttcatggagtttcctgctcatgttggggaaactcttccaaagttggatgtcgcnnnnntgagtctcctgaaggacatgttgactcagagacnnnnnttgacagattggtgaaaatagatcctttcagaggaagttggggactgcgattccttgaacttgagttatctaatccaactgatgttgtgtttgaaatcaatgtctctgtcaaactggagaaatctagcaatgaggacaatcgtgttgctgatcagggtgctacaagatatgtctaccctaaaacaagaatgatagagatgctcagcaagggttctagtgcctcttgagcattttaaattacctgttcttgatgactccttttttatgaaggacttgcaggcagatgggaatggtggaggaagaaatacgtccttctcagaaaagaacaccaaagctgaactcaatgcttgtatcaagaaccttatatccaggattaaggttcagtggcattcaggacgcaatagctccggagagttaaatatcaaggaagctatccaggcagctctccaaacttcggtcatggatgttttactgccggatccattgacatttggcttcaggcttgttagagatggttctgaatcaggaaaaccttattctgataaagattctgaattagttgaatctcctgcttccaaaggttctgtgattgcacatgaaatgacaccaatggaagttctggttcgcaataacaccaaggatatgatcaaaatgagtcttaatattacatgcagagatgtagctggggaaaattgtgtagatggtaccaaagcaactgttctatggactggtgttctgagtgatattactatggaaattcccccacttcaacaaattaaacactctttctgcctacattttcttgtccccggagagtatacattacttgctgcagcagtgattgatgatgcaaatgacattcttcgagctcgtgcaaagaccacttcagctgctgagccaattttctgtcgtggaccaccatatcatgttcgtgttcttgggactgcctgaacgttatggtccttgaatctcatgtgaaacttgctaaagttttgcggaggttcacgatgttacactgcgcagcataaggttttctcatggccatcaagaataaatcacgtgagttacattagctgatgcttctaggggtctagtgcatagaatttctttccaggtccctattaaagtaagaattcagcgtaaatttatcggtaaatcaaaccaaatgtactatgataagagagtatagggtttgaaagattttgcaacttgtttctttttgccaataactgatacttgttctaaaaaaaaaaaaaaaaaagggcggccg

SEQ ID NO: 6704 - DNA, 1803 bp, Glycine max
ctccttaatttcctccttctttcaaacttgacaaagccacaactcttcttttatctcatataaatacccttccacgacaccaatttctccttcctctgctccaaaggcaaaattaatcatcttacttatttattctccgaaaatggttgatttacattggaaatcaaagatgccaagttccgacatgccttccaaaactctaaaactctctctctccgacaacaagtccttaccctctttgcaactacccttccgcaccacagatatctctcacgccgcaccttctgtttgcgccacttacgactactatctccgtcttcctcaactcagaaagctttggaactcctcagattttcctaattggaacaacgaaccaatcttaaaacctatcttgcaagctctcgaaatcaccttccgctttctctccattgttctctccgatccaagaccttactccaaccacagagaatggactcgcaggatagagtctcttatcacacatcaaattgaaatcattgccatactttgtgaagatgaggaacaaaattccgacacacgtggcactgcaccaaccgctgatctcagcaggaacaatagcagcgagagcagaagctacagcgaggcaagcctgcttccgcggcttgccacgtggtacaaatccaaggacgtagcgcagaggatccttctctcagttgaatgccaaatgaggaggtgttcctacacgctgggtttgggtgagccgaacctagcgggcaaaccgagcctgctctacgacctcgtgtgtaagccgaacgagatccacgcgctgaagacgacgccgtacgatgagcgcgtagagaatcacgagaaccacgcgttgcacgcgacgcaccagatcgccgagtcgtggatccacgcgtcgcggaaggttctagagaggatcgcagacgcggtgctctccagaaccttcgagaaggcggctgaggactgctacgccgtggaaaggatctggaagcttctcgcggaggtggaggacctccacctgatgatggatccggacgatttcttgagactgaagaatcagctctcggtgaaatcctccggcggcgaaacggcttcgttctgcttcaggtcgaaggagttggttgaactgacgaagatgtgcagagatctgaggcacaaggtgccggagatattggaggtggaggtggatccgaagggaggaccgaggattcaagaggcggcgatgaagctctacgtttcgaagagcgcgttcgagaaggttcacttgttgcaggcgatgcaggcgattgaggcggcgatgaagagattcttctacgcgtataagcaggtgttggcggtggtgatgggaagctccgaggctaacggtaaccgagttgggttgagttgcgactcggctgactcgttgactcagattttccttgaaccgacgtattttccaagcttggatgccgccaagacttttcttggatacttgtgggataataacgataataacaaatggatatgataagggaaaaaaaaaaacggcacaaaaacgatggccaaagtgaaattttcggtttgggcattttatggataatgttattcagtttagtttggtagtgttacacctcaataaagagggaaaaagcaaaaaacaaaagatgtaatttagaaattcttttttttctttaaggaaaagtggattaaattctgtaatggtcttgatcgttgtaaaatatttaacaaattatctttggagaaatgcttcccccggtgtgttatttttttagggttcctgttaaataattatttactttt

SEQ ID NO: 6705 - DNA, 1858 bp, Glycine max
ccaacccaacattcccatccactccttaatttcctctttctttcaaacttcacatgccacaactcttctccttcatctcatataaatacccttccgcctccccgcccccccctccaattcattccacacaacaaaaacaccaattctccaccctctcattgaaaaaaaaacaaccaaacaaaaaaaatcaatcattttattttatttttctacgaaaatggttgatttacattggaaatcaaagatgcctagttccaaaacaccaaaactctctctctccgacaacaagtccttaccctctttgcaactacccttccgcaccacagatatctctcccgccgctccttccgtttgcgccgcttacgactactatctccgtcttcctcaactcagaaagctttggaactccactgattttcctaattggaacaacgaaccgattctaaaaccaattttgcaagctctcgaaatcacgttccgctttctttccattgttctctccgatcccagaccttactccaaccacagagaatggactcgccggatagagtctctcatcatgcatcaaattgaaatcattgccatactttgtgaagaagaggaacaaaattccgacacacgtggcactgcaccaaccgctgatctcagcagcagcaatagcagcgtgagcagaagctacagcgaggcgagcctgcttcctcggcttgccacgtggtacaaatccagggacgtggcgcagaggatccttctctccgtggaatgccaaatgaggaggtgctcctacacgcttggtttgggcgagccgaacctagcggggaagccgagcctgctctacgacctcgtgtgcaagccgaatgagatccacgcgctgaagacgacgccgtacgacgagcgcgtggagaaccacgagaaccacgcggtgcacgccacgcaccagatcgcggagtcgtggattcacgcgtcgcggaaggttctggagagaatcgcggacgcggtgctctccagaaccttcctgaaagcagcagaggactgctacgccgtggagaggatctggaagcttctcgcggaggtggaggacctccacctgatgatggatccggacgatttcttgaggctaaagaatcaactctcggtgaaatcctcgagcggcgaaacggcatcgttctgcttcagatcgaatgagttagtggaactgacgaagatgtgcagagatctgaggcacaaggtgccggagatattggaggtggaggtggatccgaagggaggaccgaggattcaagaggcggcgatgaagctctacgtttcgaagagcgagttcgagaaggttcacttgttgcaggcgatgcaggcgattgaggcggcgatgaagagattcttctacgcgtataagcaggtgttggcggtggtgatgggaagttcagaggctaacggtaaccgagttgggttgagttgcgactcggctgactcgttgactcagattttccttgaaccgacgtattttccaagcttggatgccgccaagacttttcttggatacctgtgggataataacgataataacaaatggatatgaaaacgaaaaaaaaaaaaaacaaaaacgatggtcagagtgaaaatttctttatggatggataatgttattcagtttagtttgatagtgttacacgtcaaaaaaaatgaagaaaaaaaaaacaaaagacgcaatctagaaattcattttttcttttaagggatagtggattaaattttgtaatggtcctgatcgttgtaaaatatttaacaaattatttttggacaactgcttccacgttgttattttttttcaggtttcctgttaaataatttatttatttgatac

SEQ ID NO: 6706 - DNA, 1984 bp, Glycine max
aaaagaatttacggagtgaacaagaggggagaaccaggcgaagcatgaaaatctgctcctcggagaaaattgctagtagtaccccacaaccaccatcaccaccatcaccaccaccaccaccgccaccgccgccaccgcaacaacaattgctccgacgacgtcgtttcctctctccaccacttgaatgaatgggcaattgcggtaccagagaggaatctgctgtggtttccaacgctcaagttgttcagcagcttcaccatgcgacgtcgttgggcgcgagtgcgaggagccagaatgcaggtagcgagaagaagcacggtcacggtcacggtcacaggcacaatctgagcgagtgcgcttcggatctgagcgagtcctgttccacaccgcacggtaacaatagcaacaacacgctgctctacacgcacgtgatcgccttcacgctctacgagttggagaccataacgaagagcttccgcggcgactatatcctcggtgagggaggcttcggcaccgtttacaaaggttacattgatgagaacgtcagagtcggactcaaatcgctccctgtcgctgtcaaagtgttaaacaaagagggtttacaaggacatcgagagtggcttacggaggtgaattttctagggcagctgaggcatcctaatctggtgaagttgattgggtactgctgcgaagatgatcacaggctgcttgtgtatgagttcatgtttcgagggagtttggaaaatcacttgttccgaaaggcaactgtccctttatcatgggctacaagaatgatgattgctcttggagcagccaaaggacttgcctttctccacaatgctgaaaggcctgtaatctatcgtgacttcaaaacgtctaatatattattggactccgactatacagccaaactttctgattttggactagctaaagcaggaccacaaggtgatgaaacccatgtatctacccgagtcatgggtacctatggttatgctgcccctgaatatgtaatgactggccacctgacggctaggagtgacgtctatagctttggcgttgttcttttggagcttttaacagggaggaaatctgttgacaagaccagacctggaaaggaacagagcttggtagattgggcacggccgaagctcaatgacaagagaaagctccttcaaataattgatcctagattggagaatcaatactcagtgagggcagcacaaaaagcatgtagcttggcttattactgtttgagtcaaaatcccaaagcaaggccactaatgagtgatgtggttgagacattggagcccttgcaaagttcaagtgttggtccaggtgaagtctcattatctggatcaaatagtgggagtgctgggccttttgctatgaacaaaatctctgactaccggatgcgccacaagttttcaaacaacgttggtcccggtgctacttgtcggtctccgaacccgaattgctcaccaggtggcccagcaacattacgggtcagatgataatcgcatgccatgaatccatgtctggtgtgctttatctcaagaaaatggtgtttgttgttaaaatgtgggtgcatccttgtatttgtttctttgtacatgatatgataatatggtgacaagaagccccggtggatcatttttgtatcaatttttggtcttctgttcatctgggtgggaattagtgtgtgaaaatctgtgtacttgtaatcatcgcggcatcagaactaatataacgggctcctcacaacatcagcagtgcaagagtaagacgacccgaacacgcaagtacctaatgatgtattttatttgagattattaggtaaaatgagggtaagataagacaatcttagttaacatttctctgtcaaacccggttagattgtctgcacgctcgtatctttttgaaatggcctattggtgttttaaagaaataaagatggagggtcattttcaagctttttaaggtt

SEQ ID NO: 6707 - DNA, 723 bp, Glycine max
acaagcttgagctcccccgcggtggcggccgctccaaaacatgtgggaacccccgggctggcagaattcgcaccgagacctttaccttgaacttcctaattcgaaaatccctggctacctccgctttcctccccctcgcgccgccgccgccgccacctcctccgcaggcagcccaccgcgaagcgaggtcgaataagccatggcagacgccaaggccacgacggcggtcaccctccgcacccgcaagttcatgaccaaccgcctgctcgcccgcaagcagttcgtgctcgaggtcatccaccccggccgcgccaacgtctccaaggcggagctgaaggagaggctggccaaggtgtacgaggtgaaggaccccaactgcatcttcgtgttcaagttccgcacccacttcggaggcggcaagtcctccggattcggtctcatctacgacaacctcgaatctgccaagaagttcgagcccaagtaccgcctcatcaggaacggccttgctaccaaggtagagaagtcacgcaagcagatcaaggaaaggaagaacaggacaaagaagatccgtggtgtgaagaagaccaaggccggagatgccaagaagaaaaaaggccctttttttttttaaaacgaattcccttggaaattttctgagggttaatataaaaaaaaaattttccttttttccccccccgggattaaaaagctttttttatattt

SEQ ID NO: 6708 - DNA, 2930 bp, Glycine max
tgtgtgtagtgatggcagagccgttcgctggagctgctgcgggagagttgttgaaaggggctcttgaaatcattcgcagcggttacgagttccgacccaccctcgaaagaagcagagaaaccttcgactctttatcttctcgagtacaaaagattaaacagttgaacaggaacctggatagctccacagaggagatagataagttggaggctcttgtgcgagatggtaaagagcttactgacaagtactccaaagttacttggtggagatttctctgcttcccttgttaccagtgcaagcttaacgccagtgaggatgctctgacgagacacacaactacgattgagccggttcacattaggctcggaatgatggagatccagtccggcatcaaaatcattctccagactctgctcatgtcagggaaggagaatattggcggagcaatcgaagaaccagagtgcattggaatggaacaacatttgaacaagttgaaaattgaactgctcaaggatggcatgtcggtccttgtcttgactggtttgcctggatccggcaaaaccacactggctaagaagatctgttgggacactgacatcaaaggcaagttcggggtaaacatatttgtcacagtctccaaaacacccaacttgaagagcattgtagggacagtgtttcatggctgtagacgtccggtgccggagtttcaaagtgatgacgatgcaattaaccgattaagagctctgctgctgagtgtggggggaaatgataaaaatccaatattattggtcttggatgatgtttggcctggctcagaagcccttgttgataagtttacagtccaaataccttattataagatcttggtgacttcaaagggttgcatatccaagatttggcaccaagattttgttgggtcaacttgatcacaatcaagcagtggcccttttcgctcactatgctaaactaaatgacaatagctcatacatgcctgaagaagatcttttacacgaggtgcttactcttttaattgatcacaatcgaacagccttttatcttattcactgatttgctctgaaactaatattgcagatcgtgagacgttgtatgggttcaccattggtgcttaaggtcactgccggatcactctgtgggcagccttttgagatgtgggaaaaaaagaaggatcgtttacaaaatcaatccaaaatggaatttagtcaaactgatttgttttgtcatcttcaacgaagtttagatgcgttggaggatgagttccacatccacgaaaaggtgtgcttcatggatctagggcttttccctgaagaccaaaggatccctgttcctgccctcattgatatgtgggcagaactgtatgaacttaataacgatggtagcaacgcaatggccatcatccatgatttaaccaccaggaatcccattttccgctggttgtctaggaaagtttcaaaggatgaagacaagtactacaataaccactttgtaattctacatgatctccttagagagttagcaatccgtcaaagcacagagaaaccatttgaacaagacagactgattattgacataacgggaaatgattttcctgaatggtgggtgggagaaaatcagcaaggaaccatcggccaaatgttcccatgtttctccagaatgataagacagaaacagctaaaggttgctgcccgcatattgtgtatttcaactgatgaaacgtttaattcagattggcgtgacatgaaaccttacaacactgaggttctgattttaaatcttcactctagccaatactcattaccgtgttttacaaagaagatgaaaaaacttaaagttctgatagttacaaattatggttttcatcgttctgagataaagaagtttgagctgcttggttctttatctaacttgaaaagaatcagattggaaaaggtttcagtcccttccctctgcgaattgaagaatttgcaaaaattgtctcttcgtatgtgtaatacaaggcaggcttttgaaaactgttctatccaaatctcaaatgcaatgccatgtcttgaggaaatgagcattgactattgcaatgatttgattacattacctgatggactgtgtgagattagcccattgaagaaacttagtatcactaactgccacaaactttctgcactgccacaaggtattggaaaactggagaatctggaagtgctaaggctatgttcctgctctgatttgctagagatgccaaattcttttgaagggcttaacaagctaagctgtcttgacatctcagactgtgtaagtcttaccaaattaccagatgatattggtgagttgaagaagcttaagaagctatacatgaagggttcaaaactgggtgaattaccatactccgtccataagtttgaacaatttaagcatgaaataaatgtgatctgtgacgaagaaacggttaccttatgggaaaattttcgtgcctttcccaatttgaagatagagatatttagagaggacattgacttgaattggcttcatggagttcattcctgagacttgtttcctgaaattgattgtgactcagcatcatgttgggattggagaacgatgttcgtctagtgaaaaacacgagtttgtgttagcatcaatgtggaatgtgttgaaagaacattcatgtgttattttagcatggtcatttatactttttgttatcaagtagagcaatattttctcgtttgtttgaaaaaataaaaaagggagattgtcgtgtatgacatcttattttataattaactttggcatatatctgcagaaccttaccaaagtgtttactacaaataaataaaaatgacacggtcatgattgcatgataccccaggtaaagtcctcaatgaggttaaggaaaaaaaaaaaaaaaaaaaaaa

SEQ ID NO: 6709 - DNA, 1355 bp, Glycine max
  misc_feature (10)..(10): n is a, c, g, or t
gtcatatggnaaagtagcaaaggatgcagacatgtactacaataaccactttgttatgctgcatgatctccttagagagctatcaatctgtcaaagcaaagagaaaccatttgaacagagggaaagactgattattgacttaaatggagataatcgtcctgaatggtggataggacaggatgagcaaggagtcattggccgtatgtcctcattcttcctcagaatgttgtatagacagaaacagcttcgggctcgctgcccgcggatcctctagtgtcgacctgcagatgaaacatttacttcagattggtgtgacatgctacctgatgaagctgaggttctggttttaaatctcaactctagccagtactcattaccagagttcacagaaaagatgagtaaacttagagttctgttagtcacaaattatggtttccatcgttcagaattaaacaagtttgagctacttggttctttcagctacgtgaccccacccccattggaaaaggtttcagtcccttccctgtgcatattgaagaatctgcaaaaattgtcccttcatatgtgtaatacaaggcaggcttttgaaaactgttctatccaaatctcagatgcaatgccaaatcttgtggagatgagcattgactattgtaatgatctggttaaattgcctgatgggatgagtaacatcaccccgttgaagaagcttagtatcactaactgtcacaggctatctacactgccacaagatattgcaaagctcgagaatttggaagttctaaggttatgttcttgctctggtttggtagagatgccagattctgttaaagggctttacaagctaagttgtcttgacatctcagattgtgtaagtctgtccagattaccagacgacattggtgagttgaagaagcttgagaagctctacttgaagggttgctcaaaactgagtgaatttccgtactctgtcgttaattttggaaatttagagcatgaaatatatgtgatctgtgacgaagaaatagctgccttgtgggaaaacttccccaccatgcccaagttgaagatagagatatctacaatggagattaacttgaattggcttccaggagttcattcctgaaacttgtttcctgaaattgatagtgacttagaatcatgttgaaattggacaatgatgttcatgtagatgtaatgaataaagtaggagtttgtgttagtgattttgtagatataacacatcaatttggcttgaaagaacactttatgtgtaattttagcatgttcatttatatttgtggccaactacgcaatatatttttatttatttgaagaaaaaaaaggagattgccttt

SEQ ID NO: 6710 - DNA, 524 bp, Glycine max
actactatgcaatctatgtttttggcagcataacaaacaaaatggctttcatgatttccagagctgaatcagaggcagagaagtctagccttaaacacatggaagacaaggactcgaccaacacacttgatggcgtctcaagccagctccagttgaagtcctcattgtcatccaaagcctcggcgcaaaccctgaacaaacaacaagttctcaatcgcattcgacaccgtaagtccttaaacagaatcaaaggcgcttttgagggtcttttgggcaactccaaaggtaatacaacttcagcacaagaccagatttggctccaacaagatgacgctttctcttctccttaaatatatgtaacccatcaactaagattattcccatatgactatcaacttatcgctttatctctgttactgttactttctttttgtatattgaatatcttagtactaaactactcaagttataatttatcgtcactcctcaaattgactatttttttaacaaaaaaaaaaaaaaaa

SEQ ID NO: 6711 - DNA, 2123 bp, Glycine max
  misc_feature (2112)..(2112): n is a, c, g, or t
cggttgttttaattttgcatgatttccctccagttttttccacatgcacgcgctgctttccatatccgcatatttttttaatggaaaaatatcgacccgcatttacttgatttttaattttccccgctccgccccggacctcccccctcgtcccacgcgcccgaccaatcctcttcaaacttctccaatttcagaagaagaagaagaagaagaaaaaaacccctccctcacactctttctagggtttcacttcgcgattgcattctcgccgaggttgccttgatatggattctacaagtcaggcataccaacatcgcccccttaccatcaaattatggcctcctagccagagtactaggctaatgcttgtagagcggatgaccaagaaccttacaactccgtcaattttctctagaaagtatggccttcttagcaaggaagaggctgaggaggatgcgaaacacattgaggatgtagcttttgctactgcaacccaacattttgagaaggagcctgatggtgatgggagttctgctgtgcaaatttatgctaaggaatcaagtaagctcatgttggaggctctgaaaagaggcccaaaagtgaaggaggatggagagttgataactgaaaagtctggttcaactgctgaaactgtttttgacatatctgggggtcgcagagactttattagtggggaggaagctgcagaagttttgaaaccattgacgggaccaaagtattataccaagatatgttttagcaatagaagttttggcttggatgctgcccgtgttgctgaacccattctattatcagttaaggatcaattgaaagaggtggatctttcagatttcattgctggaagaccagaagcagaggctcttgaagtgatgactatattttcttctgcactggaaggtagtgttttgaggtatctgaacctgtcaaacaatgccatgggtgaaaagggggttagagcttttcggtcactcctaaaatcacaaattaacttggaggaactttatttgatgaatgatggtatatcagaggaagctgcaaaagcagtttctgaattgcttccttccactgagaagctgagggttcttcatttccataacaacatgactggggatgaaggggcaattgctattgctgaaattgtgaaacgttccccagctttggaagattttcggtgctcatctaccagagttggctctgatggtggagttgccctcgttgaagcacttggggattgtaagcatttgaggaagcttgacttgcgtgacaacatgtttggtgaagaagctggagttgctctaagtaaagttgtacctgcatttacagatcttacagagatatacctcagttatttgaacttggaggatgatggtgcagaagcccttgctaatgccctcaaggaatctgcaccatcactggaaattttggatttggctgggaatgacattactgcaaaagctgctgcttctgtggctgcctgtatatcatcaaaacaattcctcaccaagttaaatttatctgagaatgaactgaaggatgaaggtgttgttttgatcagcaaggcactggaaggaggtcatggccaattaattgaagttgatttgagcactaactcgatcacatggtcaggagctaagctggtggctgaagctgttgtgggaaaaccaggttttaagttgcttaacattaatgctaacttcatttctgatgaagggattgatgagttgaaaaatatattcaaaaactcacctgatatgctgggtcctttggatgagaataatcctgacggagaagaccctgatgaggaggctgaagaagatgctgatcatgatgaattggaatcaaaactgaagggccttggcatttaggaagattcgcaggaacaaacatgcaacctttactcaagattaatctgtaggccatttaatattttcaacagacacacttgtttcatgcacaatagctagctttgatctttgtattttagatattctattccatgacccgacattttagaagtttactagatgtatgctcttaatatatctggcaaaacaagaatggtattagctgcaggtatttttgggttctatnaaaaaaaaaaa

SEQ ID NO: 6712 - DNA, 1321 bp, Glycine max
acaattttgtttgcaggcccagctctacttggatcaaatgaccaaactcctccgcctattgccttttctccttgaagcccacaaggtagcttaatttacttaaaattgttaaatattaataattagaaagaaatttaaaagtattgaacgaatgaaaataaaattaaaatacgccttgcattgttgggtacataataaaaattataattaataagtgtaagaaggccgttttcacacctggattgaaggttccttggcttcttcacactcacagcgtgccaccatcacgctacactaagagtgcaggaacatcctgtatgggttggaaagcagctgagaaactcattaggcactggaaaattctcagaggagataatgttatgataacaaggggcaaagataagggtgagaccgggattataaagcgtgtcattcgctctcaaaatcgtgtcattgtagagagtaaaaacctggtaaagaagcatataaagcaagggcaaggtcatgaagggggcatctttacagtggaagccccactgcatgcctccaatgtgcaagttcttgacccagtgacagggtatgtcattgttcagatattgaactggtgattgcatctccaaacgggataacatcattaacatgtatgaaagtaagagttaccaacttttacttgtgcagcaagccttgcaaggttggagttaaatatcttgaagatggtactaaagtcagagtgtccagaggaataggaacctcagggtccatagtccctcgtcctgagattttaaagataagaactaccccaagacctgcagtccttggtcctaaaaatactcctatgaatcttgtgctagagaagacttgcaatgctaaaacaggacggggcatgcctgaactttaaggagacgttgccttgttccgattaggtaattgctatcgtgatgaacaaaaatttggtgtgaatttatctccttgccctttgccatgattcaattaaagacgtgtttggaaccacattctaacaccactttatgatgggttagacgcaaaatctagattgggtagtgtttacacacagttacaaacacattccttgtttaatgttatcatgcctaggagttgaataacttgtaactttaccaattagacattactactagcattctttttcctattcaagttgatgttatctccagttagtgatggtcatttcattccataaacttcaattgttaaaatgagtgaaaagggaaaaaggaacccgtttgattgttatggttctagtgatttttattaattgggtttgtcaaaaaaaaaaaaaaaa

SEQ ID NO: 6713 - DNA, 476 bp, Glycine max
  misc_feature (467)..(470): n is a, c, g, or t
aattcggctcgagatttgagccacacacaaaacatagggagaatgataaaggctcactttccgcactctcagtttattgtggtttccttgaaggaaggcatgttcaataatgcaaatgttcttttccggacaaaatttgtggatggtgtttcaactgttcagcgaactgttgcatctaaacaaagcaaatgatgtgtttgcttcaccgatctgttacaagtcttgcacttgtgttcatcttcagggaacctagaaatgtaggtaatgcctgtaatttaaaagcttttatgtaatttgaacatcagtgtaaaggtccatatgtgatagtgttgtttctataaagtaatttagaagttccaataacgaggatgggggtaacatggttgtgtttgaatatgaatgctctggttttgtataagaaaagtatataagaatgaggaatgagagtcaaatagaggaacatgccnnnnaaaaaa

SEQ ID NO: 6714 - DNA, 1581 bp, Glycine max
  misc_feature (18)..(18): n is a, c, g, or t
gtaccggggccccccctncgagtcagctacgtaggccccccccccgctacctcctcttcctcttcctcttcctgcatttctccgcgtgtgtgtatgtgtgtatactctctcaagtacgcacatacatacacatccattcgtacataaatacttatatctcttcttccttcgccgttaattctctgaatccctagctcttctgttctccgatccgatcatggcctcgcttgtcaacaacgctaacggcgccgtcaatggttttcctggaatatcccagaagctcattatcgataccgaccctgggatcgatgatagcatggccattcttatggcttttcaaagtccagatgtggaggttctgggtttgacaaccatttttggtaatacaactaccgaactttcaacactcaatgctttgcttttgtgtgagatggcaggccgtgaagatattccagttgcacagggaagccatgagccattgaagggtggaaagcctcgtgttgctgattttgttcatggtaaagatggactagggaacacattcctacccccacctaaaggtgagaaaattgagaaaagtgctagtgagtttttggtagagaaagtctctgaatatcctggtgaagtatctgtgctagcacttggaccactaacaaatttggctttggcaatcaaaagggattcttcctttgcaagcaaagtgaagagaatagttatacttggtggtgcattctttgccttggggaatgtgaatcctgctgcagaagccaatatccatggagacccggaagccgcagatattgtgtttacctctggggcagatattgttgttattggaataaacattacaacccaagtccaattcacagatgctgatctcctcgaactgaaggaatctaaaggaaagtatgctcccttcttgagtgacatatgcaaattctatagggactttcatgtaaaatctgatggtgtccacggaattttcctccacgatcctgtaagttttgtggcagttgtgcgtccagatcttttcacatacaagaagggggtagtgagggtagaaacacaaggcatctgtgttgggcatacacttatggaccaaggattgaaaaactggaatacgagcaacccatggacgggttattctcctgttgcagttgcttggacagtgaatctcgaggaagttcttgattatatcagggagctggtgatgaaaccctgaagtataggcatttgtactacccttctgacagacaaaaagcattggaaagtgataggacgatagcttcttatttgcaaaaatatgcataaggtcattttctttatttcattcaaggtcacaatgagttcttaccccgtttaatattataaagttcatgtaccaatgaaattctctttacatgaacttatttgtgtttggatttcgctactcttatttgagaagaaagcagtcattctttacttttcctaaaaaaaaaaaaaaaaaaatttccgcccggcggaataaccaattatagaatttcggtttgaaaatcgcactaaagacttcttcgcttgtaccaagaatattcataattccat

SEQ ID NO: 6715 - DNA, 649 bp, Glycine max
agctacgtaggccccccccctacctagtttccttattcttcttccttcgctgaatccctagctgttctcttctccgatccgataatggcctctctattcaacaatgctaacggcgttctcggaaaatccgagaagctcattatcgacaccgaccctgggatcgatgatagcatggctatttttatggcttttcaaagtccagacgtggaggttctgggtttgacaaccatttttggtaatacaactactgaagtttccacacgcaatgctttgcttttgtgtgagatcgcaggccgtgaaaatattccagttgcacagggaagccctgagccgttgaagggtggaacgcctcgtgttgctgattttgttcatggtaaagatggactagggaacacattcctacccccacctaaaggtgagaaaattgagaagagtgctagtgagtttttggttgagaaagtctcggaatatcccggtgaagtatctgtgctagcacttggaccactaacaaatgttgctttggcaatcaaacgagattctgcgtttgcaagcaaagtgaagaggtgaagagaatagttattcttggtggtgcattctttgccttggggaatgtgaatcctgctgcagaagcacatatccatggggaccc

SEQ ID NO: 6716 - DNA, 1373 bp, Glycine max
atagaaatgaagttgcttcttgcaagaagtttctgagcttttatatcctctatatatagttctctggcaattaaggtctcatccaaataagcacaaatgggtagccagagttacttcaaggctttgattatttgccttatagcactaattggatcaactcaagctcaattgcagcttggtttctatgccaaaagttgtccaaaggctgagcaaataattctgaagtacgttgttgagcatatccacaacgctccatcactagcagctgctctcataagattgcacttccatgattgttttgtcaatggttgtgatggatcagtgcttgtggactcaacaccagggaatcaagctgaaaaggacgctattccaaatcttacactccgaggctttggcttcattgaagcaataaagaggcttgttgaagctgaatgccctggtgtagtctcttgtgctgatatcttggctttgactgccagagactctattcatgccactggtggaccctattggaatgttccaacaggacgaagggatgggttcatctctagagcagcagatccgttacgcagccttcctgctccttttcacaacctcactacccaactaacactctttggcaatgttggacttgatgcaaatgaccttgtcttgcttgttggtgctcacacaattggtattgcccattgttcatcaatttcaacccgtctatacaatttcacaggcaagggtgacacagacccaacaatagacaatggatatgcaaaaaatctcaagaccttcaagtgtaagaacattaatgataactcacttattgagatggaccctggaagtcgtgatacatttgatcttggatattacaaacaagtggttaagagaaggggtttgttccaatcagatgctgaattgcttactagtcctatcacaaggtctattatcgctagtcaacttcagtcaactcaaggattctttgcggaatttgccaagtctatggagaaaatgggacgaattaatgtcaagcttggatctgaaggagagataaggaaacattgtgcacgagttaataactaagaatctctttgataatgaccatctaagtgcattttgtatgtctacttttctgtgtaacttattctatgctaggcctatggtgtcttgatatatgagataccatatgatttgattgtttttccaagtgatgcgagaaagggttgggagtgattactaggtttgaatggaaatcatgttatggtgttaataagaagtagaatcaagagagagagaatttattgtaatacacaattgcacaataaagtctcccttgctatattgaaaataaaaaaaaaaaaaaaaaaaaaaaaaaaaagcttgtt

SEQ ID NO: 6717 - DNA, 1796 bp, Glycine max
cggaattccaaaatttagttaggacgtattaggagacaatcatgtgaaggacgaggcaagaaggaagtgttgtgggaggaaagaggcagagctgcaatcaccagagtggaagcgcgaaacggtcctccccggctttccattttttctcttctgatgaaattttagttcatcccagttgctgattgagattgaatttaaattcgaaaaagcgtacttgtgccactgtacttttacagatctgcggctacgggctagcctatcgtatttttgcgtagatctagtgtccgtgaagcggttaccatttcaccactcaccactattcatctctttcttctatattgatctgaaattgaagatggaaagcgaaaagaaatcgtcagcaatatctgatgtgggagcatgggccatgaacgttgtcagctccgtcggaattattatggccaacaaacagcttatgtccaacaatggctatgctttcagctttgccagttcgttaactgggttccactttgccgtaactgctctcgttggtctggtgtcaaatgctaccggttactcagcgtcaaagcatgttcctatgtgggagcttatttggttctcactggttgccaatatgtctatcacggggatgaactttagcctcatgctcaactccgttggattctaccaaatatcaaaactgagcatgattcctgtggtttgtgtgatggaatggatacttcacaacaaacactactcaagggaagtgaaaatgtcagtggtggttgtggttattggtgtcggtgtttgcactgtaactgatgtaaaagttaacctcaaaggtttcatgtgtgcctgtatagcagttttgtcaacatctttacagcaaatttcaataggttctcttcaaaagaaatattcaattggatcttttgaattgctgagtaaaactgctcccatccaagcgctttttcttcttattcttggtccatttgttgattactacctcagtggcaaattgataaccaactataagatgtcttctggtgccattttattcattcttctttcatgctcgctagctgtattttgcaatgtgagccaatacctttgcattgggcgcttttcagctgtttccttccaggttttaggccacatgaaaacagtatgtgttctgactctgggatggctgctatttgattcggagctaactttcaaaaatatcatgggaatggtcatcgcagttgttggcatggtaatttacagttgggctgtagagcttgaaaagcagtcaaatgcaaagaccttacctcacgcgaaaaacagcatgacggaagaagaaattagattattgagggatggagtagaaaagagtcccctgaaggatgttgaacttggtgaggcccaaggatagattgactcagatttggtggtgaaattgatgagaaatgatgcaggcaattatattgtgtattgctttataatttggtttgttcttttgtctagtttacctagtagtaaaacttggtttctatttgctcacactggcacggatccagttttagaaattgtgttcccgttcatcagcaatgtttctttgttagttttatttcatttgttgttatgttgaggttatttatttggcctgccaggaaattgctagatgaacaatatgatggcgccattaagatgtataatgtgcacgctaatgatacgcgatatcaattccctcttcaaacttcttttcgtgtcttcttcttttaatgtgaaaaaatattttattgtgctcttcttatgatatacatttatcattattt

SEQ ID NO: 6718 - DNA, 599 bp, Glycine max
cctctagtcttgtcccctcccgcggctagggtttcctccgcttcgctctcgcagaatgcctcgctacgatgagcgtgatcgttatggcggcaacacaaggctgtacgtgggtcgtcttccctcgcgcacccgcacaagggaccttgaagacctcttcggcagatatgggagagtgcgacatgtggatatgaagcacgagtttgcatttgttgagtttagtgatcccagggatgctgatgaagcaaggtacaaccttgatggtcgtgactttgatggaagccgcatgattgttgagtttgctaaaggggttccgcgtggccaaggaggaggaggtgaccgtgaccgtggccgtggtggtgaccgtgaatatatgggtcggggacctcctcctggttctggccgttgctttaactgtgggattgatgggcattgggctcgtgactgcaaagctggcgactggaaaaataggtgctatcggtgtgggagatagtggcacatagaaagagattgccagaacagccctagaacctcaagcgggaaagagttactccagatctccatctcctgcccgggaagggtgcgtgataagagctacggag

SEQ ID NO: 6719 - DNA, 644 bp, Glycine max
tccccctcattctttgtcatcccggcggcggcgcgtagcacaggagaaggagcaggcggcggcggtgcccgaagaggagaagcacggcgacctagcccgagctcgcaaccatggctaggggtttgaagaagcatctgaagaggctcaatgccccgtctcactggatgcttgacaagcttggtggagcttttgcccccaagccatcatctggtcctcacaaggccagggagtgcctgcctctgatcctcatcctgaggaacagactgaaatatgctctcacctaccgtgaagtgcaatctatccttatgcagcgtcatatcatggttgatggaaaggtccgcactgacaagacctaccctgctggtttcatggacatcatttccattcccaagactggtgagaactacaggcttctgtatgacaccaagggtcgcttccgccttcactctgtcagggatgaggatgctaagttcaagctctgcaaggtcaggtctgtccagtttggccagaagggcatcccataccccaaccacctatgatggcccggacaaccgggtacccaaaccccctcttttaggggcaatgacaccttcaaggttggacgtggaaaaccaacaagattggtggcattcctccagggtggg

SEQ ID NO: 6720 - DNA, 2105 bp, Glycine max
cgattgggtaccgggccccccctcgagtcagctacgtagcccccccccccccccttatcttgggagttctgtgcaaggtgccatgaggaacttcttcctcgaaggttggttgcaccacaggtcaaccagttagttcaggtagctaaaaaatgtcaaagtacaattgctgaaagtggttctgatggggtttctcaacaagacatccaaacaaacagcaacatgttgttgacagctgggggtcagcttgcgaagattttggagatgcaatcgctaaatgagttgggcttttctaaaagatacgtgagatgtttgcaaatttcggaggttgtcaatagcatgaaagacctaatagatatctgtgcagatcacaaaattggtgccattggtaattttgcttgtggtttttatgactatacccgattgagttctaatttttatctttctctctcattggactcctaatctttagttgtatgaagctgtttcaattttagattttttggaaataaatttgtatattgtcaatggtctttgtatattgatccaacatttactgcagagagtttgaaaaatttatcctcgtactagcaacagcctcaaaggtccagatgcagaagatgcaggaaatggaacagctggcaaatgttcaaggtctgccaactgatcgaaacacactcaataagctaatggcactgaatcctggattgttcacccggatgaacaacactaataatatggttggtcgtggtgctttgagtgggtcagcccaagctgctttagcactgaacaactaccaaaatcttctcatgaggcaaaattcaatgaactctagccctggctcacttcagcgcgaagggtcctctttcaataattcaaacccgagtccctcttctgctttgcaaggaactggtcctgctttaattccaggctcaatgcagaactcgcctgtaggtggtttcccaagtccccatctaaccccacagcagcagcaacaacaactccttcaacagcgcacattaagtgcaaatggtttacttcaacaaaatcattcacaggggtcccaaggaaatcaagctctacagcagcagcagatgatccagcaactgctgcaggaaatgtcaaataacaatgggggactgcaatcacagtctcttggtggacataatgcaaatgggaatatttcaaagaacacaatgggttttgggggccatactccatctttaagcggaggttctgccaatgttccaggaaacaatagacccatttcaaggaataatagcttcaaaacagcttcaaatagtgattcttctgcggccggtggcaacaatggattcaaccagagaacatctgatatgcaacaaaatctacatttgcaagacgtggctcaggatattggcaatgagttcttggataaccccttctttaacagcgatcttgatgacaacatgggtttcagctggaaggcatgactagcacaacttggccatgtaattggcatatcttgttgaagtgtttatcttattatctttgtacaggacactttaaatttatgggtttttttatttattttcctccttggttttccctgtcattttcttgatggaatttgtttggactcggactcgagtaggtgtttagagattttatttgagtgtttttgtcctgcaagtgtaacctattggacaattaaatgaacaattagctttctatacggcacttaaaaaaaaaaaaaaaaaaaaaaaaaaaaaaaaaaaaaaaaaaaaaaaaaaaaaaaaaaaaaaaaaaaaaaaaaaaaaaaaaaaaaaaaaaaaaaaaaaaaaaaaaaaaaaaaaaaaaaaaaaaaaaaaaaaaaaaaagggggggccccctttaaaggaaccaaatttaaagccccgggggggggagggaataattttttttttggggcccccaaattaaattccgggggccgggttttccaccggggggggggggaaaccccggggggtcccccaataaaacggctggggaaaaaccccccttttgcccgggggggaaaaaaaagagaggcccgccccaaacccccttcccaaaaatttggcccccttaagggggaaggggccccc

SEQ ID NO: 6721 - DNA, 2053 bp, Glycine max
  misc_feature (22)..(22): n is a, c, g, or t
tcagctacgtaggccccccccntttttccccaagcatctatggtaagtttttgcacttgttatttatcattgcatttcttgcttaataaataggatgatgccttagtaatttctaatgaccaatcatgcattcaaaatgttactagattgcattagcttatcatgtgattgttgacaactcctaataatgcctctatacaatagttatgtctgaagctattgcatttgttttgttttctattttaggaatacactatttttcccttctaatttgttagtgcatatgaatatttgatgaatacatactctgacatggatattactttgttcaggatgcatggcactgtgacatatgtggttctaaatctggaaggggatttgaggcaacttatgaagtgttacctaggcttaatgaaatcaaatttggcagtggagtaattgatgaactattgtttctggacatgccacgtgaaatgagattcgcttctggtgcaatgatgttagaatatggaaaagcagttcaagagagtgtatatgagcagctttcgtgttgttcgtgaaggtcaacttcgtatcatattcactcaagacttgaagatattgtcttgggagttctgtgcaaggcgccatgaagaacttcttcctcgaaggtcaaccagttagttcaggtagctaaaaaatgtcaaagtacaattgctgaaagtgggtctgatggggcttctcaacaagacattcaaacaaacagcaacatgttgttgacagctgggggtcagcttgcgaagattttggagatgcaatcactaaatgagttgggcttttctaaaagatatgtgagatgtttgcaaatttcggaagttgtcaatagcatgaaagacctaatagatatctgtgctgagcacaaaattggggcaattgagagcttaaaaaattatcctcgacttgcgacagcctcaaagcaccagatgcaaaagatgcaggaaatggaacagctaggaaatgttcaatgtctgccaactgatcaaaacacactcaataagctaatggctctgaatcctggattgaacaaccatataaacaactctcataatatggtaaatcgtggtgctttgagtgggtcagcccaagcagctttagcactgaacaactaccaaaatcttctcatgaggcaaaattcaacgaattctagccctggctcacttcagcgtgaagggtcctctttcaataattcaaaccagagtccctcttcagctttgcaaggagctagtcctgctttaatttcaggctcaatgcagaattcatctgttagtggtttcccaagtccccatctacccccacagcagcagcaacaccacctacaacagcgctcattaagttcaaatgctttactgcaacaaaatcattctcatggttcccaaggaaatcaagctctacagcagcagcagatgatccatcaactgctgcaggagatgtcaaataacaatgggggaatgcaaccactgtctcttggtggacccaatgcaaagaatgcaatgggttttggaggccatactccatccttaagcggaggttctgccaatgttccaggaaacaatggacctatgtcaaggattaatagcttcaaaacagcttcaaatagtgattcttctgcagttggtggcaacaaccgattcaatcagagaacatctgagatgccacaacatttgcaaaatgtggttcaggatattggcaatgaattcacggataatcccttcttaaacagtgatcttgatgataacatgggttttggctggaaggcatgactaacacaacttggccatgatattggaatcatgtcttgatgtagtgtttatcctattatctttgtacaggacactttaaatagatgctgttttttttacttgggtttccgtgttattttcttgatggaatttgtttggactcggactcgagtaggtctgtagagattttgtttgagggtttttgtcctgcaagtgtaatctattggacaatttaatgaacagttagtttaccaaaaaaaaaaaaaaaaaaaaaa

SEQ ID NO: 6722 - DNA, 2160 bp, Glycine max
aattcggctcgagctcgagccgaatcggctcgagcggctcgagctcgagccgaatcggctcgaggcagcaacaacaacgacaacggcaacaaatgcaattgaggcagcagcagcaacaacaacaacaacaagtgatgcagccctcttctgctgtcaagcggccatatgagagtagtgttagtggggtatgtgcccgtcgattgatgcagtatctctatcatcaaaggcaacgaccaaatgataatagtattgcctattggagaaaatttgtggctgaatattactctcctcgtgcaaagaaacggtggtgcttgtcattatatagtaatgttgggcatcatgcacttggtgtttttccccaagcatctatggatgcatggcactgtgacatatgtggttctaaatctggaaggggatttgaggcaacttatgaagtgttacctaggcttaatgaaatccaatttggcagtggagtaattgatgaactattgtttctggacttgccctcgtgaaatgagattcgcttctggtgcgatgatgttaggccccccccccccccaatatggaaaagcagttcaagagagtgtatatgagcagcttcgtgttgttcgtgaaggtcaacttcgtatcatattcactcaagacttgaagatattatcttgggagttctgtgcaaggtgccatgaggaacttcttcctcgaaggttggttgcaccacaggtcaaccagttagttcaggtagctaaaaaatgtcaaagtacaattgctgaaagtggttctgatggggtttctcaacaagacatccaaacaaacagcaacatgttgttgacagctgggggtcagcttgcgaagattttggagatgcaatcgctaaatgagttgggcttttctaaaagatacgtgagatgtttgcaaatttcggaggttgtcaatagcatgaaagacctaatagatatctgtgcagatcacaaaattggtgccattgagagtttgaaaaattttcctcgtctagcaacagcctcaaaggtccagatgcagaagatgcaggaaatggaacagctggcaaatgttcaaggtctgccaactgatcgaaacacactcaataagctaatggcactgaatcctggattgaacaaccatataaacaaccctcataatatggttaatcgtggtgctttgagtgggtcagcccaagctgctttagcactgaacaactaccaaaatcttctcatgaggcaaaattcaatgaactctagccctggctcacttcagcgcgaagggtcctctttcaataattcaaaccagagtccatcttcagctttgcaaggagctggtcctgctttaattccaggcccaatgcagaattcatctgttagtggtttcccaagcccccgtctacccccacagcagcagcaacaccacctacaacagccctcattaagtgcaaatgctttactgcaacaaaatcattcacagggttcccaaggaaatcaagctctgcagcagcagatgatccatcaactactgcaggagatgtcaaataacaacgggggagtgcaaccacagtctcttggtggacccagtgcaaatatggcaaagaatgcactggggtttgggggccattatccatccttaagtggaggttctgccaatgttacaggaaacaatggacctatgtcaaggaataatagcttcaaaacaactgcaaatagtgattcttctgctgctggtggcaacaatggattaaaccagagaacatctgagatgccacaaaatctacatttgcaagatgtggttcaggatattggcaatgaattcacggataatcccttccttaacagtgatcttgatgataacatgggttttggctggaaggcatgactaacacaatcttggacatgaaatcggcatatcatgtgttgatgaagtgtttatcttattatctttgtacaggacactttaaatagatgctgtttttttccttgtttttccctgttattttcttgatggaatttgtttggactcggactcggactcgagtaggtttttagagattttatttgagggtttttgtcctgcaagtgtaatctattggacaatttaatgaacagttagtttattatacggcactcacatttcgtggcaaaaaaaaaaaaaaaa

SEQ ID NO: 6723 - DNA, 1511 bp, Glycine max
  misc_feature (1501)..(1501): n is a, c, g, or t
tacggaagacgggagactcttggtgtaagtgttgttcttccgatttggttcaatcaaatcaatgatgttgaggaggaggggttctgtgacctccttctattccaaattcatcgattctcacaatcttaattgtgggcgttcctcttcgaatccccatcgcgtcgctgcttctgcaacttcattcgatatctcttccgcttctgcgtctaaagctacgaccgacttcgtgtcgttgacccgccactatggaaggtgctattgggagctctccaaagctcgtctcagcatgcttgtggttgcaacatctgggactgggtttgtcttggggagtggtagtgctgttgatctttcggcactttcttgcacttgcttgggtaccatgatggttgctgcatctgctaactctttgaatcaggtgtttgagatcaataatgatgctaaaatgaagagaacaagtcgcaggccactaccctcaggacgcatcacaatacctcatgcagttggctgggcatcctctgttggattagctggtacggctctactagctacgcagaccaatatgttagctgctgggcttgctgcttccaacctaattctgtatgcatttgtatatacacccttgaagcagattcatcccataaatacatgggtgggagctgttgtcggtgctattccaccacttttgggatgggctgcagcttctaatgatatttcactaaatggaatgattcttccagctgctttgtatttttggcaaataccacattttatggccctagcctatttgtgtcgtgatgactatgctgctggagggtttaagatgtactctcttgctgatgcatctgggcatagaacagcattggtggctttaaggaactctatatatctaatccctttggggttcttggcttatgattggggtttgacttctggatggttttgtcttgagtccgctgcacttacacttgcaataagcgctgcagcattttcattctatagaaaccgtaccaaagaaaaggcaaggagaatgttccatgccagtcttctttacctccctgtgtttatgtctgggcttttgattcaccgtcgttctgaaaacgaacaattcttagaagacaaagcaaagggttttgtgaaatctgcatcctctacggagtcttcagagttggatgatgataacggcgatcaaaatatcaaggccaggcgtccctatcggactgaagcgcgtcctcccgtatcgtatgcctctgttgcaccttttccctttttgcctgctccatcatataacttcccttgatatctgtcagttatacggattttgtatgacttcaacattttctcggccaagttttgtttggttaagttgatatattcattgaaatgatacattctaatttgtctgtttaagccgttaaggttgttttatgtgccacaataaaaattgaagatgcatctgtaatctgaaataaatgagattttgtttcttttaaaaaaaaaaaanaaaaaagaat

SEQ ID NO: 6724 - DNA, 1965 bp, Glycine max
  misc_feature (1784)..(1784): n is a, c, g, or t
ccacgcgtccgaaagaggccagggtttgatcaccacaaaaaggctggtgcaatgaatgctctggtacgggcttcagcaattatcactaatgcaccctatcttctgaatgttgattgtgatcactacattaacaatagcaaggcacttagagaagctatgtgttttatgatggatcctcaactagggaaaaaggtttgctatgtgcagtttcctcagcgatttgatggaattgatagacatgatagatattcaaacagaaatgtggtatttttcgatattaacatgaaaggattggatgggatacaaggtccaatatatgtcggaacgggatgtgttttcagaaggtacgcactttatggatatgatgcacctgccaagaagaaaccaccgagcaaaacttgtaactgttggccaaagtggtgctgcctatgttgtggctctagaaagaaaaagaatgccaacactaagaaggagaaaaagaggaaggtgaagcacagtgaagcatcaaagcagatacatgcacttgaaaatattgaggcagggaatgaaggaaccaacaatgagaagacatccaatctgactcaaacaaagttggagaagaggtttggacagtctccagtatttgtggcctccacactcttggataatggtggagttccacagggcgtgagtcctgcatcacttttaaaagaagccatccaagtcatcagttgtggttatgaagacaaaactgaatggggaaaagaagttgggtggatatatggttctgtgacagaggatatcttgactggatttaaaatgcattgccatggttggcggtctgtgtattgcattcctaagcggcctgcattcaaggggtctgcgcctatcaacctttcagatcgtctgcatcaagttcttcggtgggctcttgggtctgttgagatttttttcagcagacattgtccaatctggtatggttatggtggtgggttgaaatggttggaacgattttcctacattaactcagttgtatatccctggacttccctcccactgcttgtctactgtactctaccagccatatgccttctgactggaaaatttattgtacccgagattagcaactatgccagtattgtgttcatggccctcttcatatccattgcagcaactggcatccttgagatgcaatggggcggtgttagcatagacgactggtggaggaacgaacagttttgggtgatcggaggtgtatcttctcatctttttgccctatttcagggtttactgaaggtcttggctggtgtgaacacaaacttcactgtgacgtcaaaagcagcagatgatggagaattctcagaactctacatcttcaagtggacatcactcttgatccctccaatgaccctactaatcatgaatattgttggggtggttgttggggtctcagatgccatcaacaatggttatgactcatggggacctctctttggtagattgttctttgcattgtgggtgatcctccatctctaccccttcttgaaggggttgcttggaaaacaagatagaatgccaaccattatattggtttggtcaatccttctggcctccatcttgactctcatgtgggtcagaattaacccgtttgtgtcaagagacggccccgtgttagaaatttgtggattgaattgcgacgagtcgtgaataaagaaaagctgaagaagaagggttagttatttttcagctacactgcagtcatgttgaagaatgcagccagcacatgcttcacaaagttgcacganattttcggatggaagttttatttttccggtgtgtagagattaaagagaggaaggggagggggctgacacattgttaccttgtaatagggttttttcatttattctttgattatattttctgtgggttttagtgttattctctttccagtttcatgtattataagaaaaaggccttgaatgt

SEQ ID NO: 6725 - DNA, 1547 bp, Glycine max
  misc_feature (312)..(312): n is a, c, g, or t
cttacctgtgcgcgggcccaagaacacaagaggcctcttgctcgaacatcaattattcagaaaaggaaagaagaccaagaacgacaagcttcttgaaatggaacgggaggaggagtcgaagaggctaagactgctgaaaataactgaagaagcggaacacagaaggcttgccactgagtttgagcagaggaaaaatcagaggatcctcagggagatagaggagagagaaaatgaagaagcacaagcattactccaggaagctgaaaagcgtatttaaatgaagggaaacacaccatgcatggagccggacanaatcaccaagcagacattgatggagttgactttgactgaacaactccgggaaagacaggaaatggaaaagaaactgcagaagttagcaaaaaccatggatcatttggaaagagcaaaaagagaagaggctgctcccctgattgaagctgcatatcaacagcgtctagtggaagagagacttcttcatgatcgtgagcagcagcaagaggttgaactgagcaaacagaggcacgagggagatctcaaggagaaggagaggcttgttcgcatgatgggcaataaggagatatatcaagcaagggtggttagtcaccgccaagcagagtttaacagattgagaagagaacggcacgagccgaatcggctcggagtttacggctccaggagacaggagagggaaaaaaatgaggaagttgaagtattatctcaagttagaagaagagagacaacaaaaattgcatgaggaggaggaagctcggaaacgtgaagatgctgaaaggaaaaagaaggaagaagaggaacgcttgcggaaattggaggagatagctgaaaagcagaggcagagagaaagggaacttgaagaaaaagagaaacaaaggagagaagcattgttgggtagagctgctgctgaaccagctcctcctgcccgtccattggaatcgggatctgctgctcctgctgcagctgcagctgccgccgcagctccaacaccagggaaatatgtccctaagttcaggcgacagagaactgaaagcacaggagctgcgcctcctccagagacagaccgttggaacagtagcagcaggccagatggtggtgacaggtggcgtggtgatgatcggaaaagtgcatttggttctggtggaggttcaaggtcatcttctacttggacatcttccaggaatgcccgttgaacattttgtgctctgttttattgctggcagctttttgggagttctcttggtactcttcccagtttacgttctagaattatttttgataccgagttcttaaatttattatcttattaatacttacgaagtcctctatttgattggggaacatgccaaaacaaaatttgattgaatggattgcatatggtaatcgaagtttcaattagacgagtacattcgacctatttttctacttgttgatattgtcgtagaaaatgaagggtatcattagtatgtggttttgtatactttatttgcaattggaaaccttttgcttgctct

SEQ ID NO: 6726 - DNA, 1312 bp, Glycine max
atcagaggatccttagggagatagaggagagagaaaatgaagaagcccaagctttactccaggaagctgaaaagcgtattaaaaagaagggaaagaaaccaatcatagagggggacaaaataaccaagcagaccttgatggaattgactttgaccgagcaactccgggaaagacaggaaatggaaaagaaactccagaagttagcaaaaaccatggattatttggaaagagccaaaagagaagaggctgctcccctgattgaagctgcgtatcaacagcgtctagtggaagagagacttcttcatgagcgtgagcagcagcaagaggttgaactgagcaaacagaggcatgagggagatctcaaggagaaggagaggcttgttcgaatgatgggcaataaggaagtatatcaagcaagggtggttagtcaccgccaagcagagtttaacagattgagaagagaacgtgaagagcgaatctctaggattttacagtccaggagacaggagagggaaaaaatgaggaagttgaagtattatctcaagttagaagaagagagacaacaaaaattgcgtgaggcggaggaagctcggaaacgtgaagatgctgaaaggaaaaagaaggaagaggaggagcgcctgcgtaaattggaggagatagctgaaaagcagaggcagagagagagggagcttgaagagaaagagaaacaaaggagagaagcattgttgggtagagctgctgctgaaccagctcctcctgcccgtccattggaatcgggatctgctgctcctgcggcagctgccgccgccgccgctgctccaacacctgggaaatacgtacctaagttcaggcgagagagaaccgaaagcgcaggagctgcgcctcctccagaaacagatcgctggaacagtagcagcaggccagatggtgacaggtggcgaagtgatgatcggagaaccgcatttggttctggtggaggttcaaggtcatcttctacttggtcatcttccaggaatgcccgttgaacattttgtggcctgatttattgctggcgactttttgggagttctctttgtaccgagttcttaaatttattatctttttaatacttacgaagtcctctattggattggggagcctgccaacaaaattttctatttatgattgagtggattgcatatggtattcgaagtttcgattagacgagtacttccgaacaatttttctattttttgataatgttgagccttcgtagaaaatgaagggtaaccgtatactttattttctacgaaactttttgctgcctctaaaa

SEQ ID NO: 6727 - DNA, 644 bp, Glycine max
tctcctcagcgtctcattttcatccccccgcccgccgccgccgccgctcccgccgctagaccagctcgccagcagcaatggcccggatcaaggtgcacgagctgagggggaagaacaaggcggatctgcagggccagctcaaggacctcaaggcggagctctccctcctccgcgtcgccaaggtcaccggcggcgcccccaacaagctctccaagatcaaggtggtgcgcacctcgattgcgagggtgctcacggtgatctcgcagaagcagaagtcggcgctgagggaggcgtacaagaacaagcgtctcccgctcgacctccgccccaagaagacccgcgccatccgcaggcgtctcaccaagcaccagctctctttgaagacggagagggagaagaagcgcgagaagtacttccccatgaggaagtatgctatcaaggcctaggttaggaggacatgttttaccggccgagttttgctcagaagttgcatgaattttatgttctgtgtggacaccgctgctatctaagtactatgtattcgatatcctgcatgaaattcgaacttatgcctattggcaaaagaaaaagaaaaaaaacaaaaaacggggaagctgggccccccaacggcacacctccccccg

SEQ ID NO: 6728 - DNA, 1570 bp, Glycine max
attaattagtgatgaaaaagaaacatgagacggagtggtaaaatcagctacgtaggccccccccccaacgcaacgcaacgctagcagagcagtgtcaaacgaacgacggtttcgttgaaccttgcagaatttgcctttcatctagagattgttgattaattaaaccccaagacttcttcactccaactaccacatctgtttcaaaatcctctggatgaaaaatggatgatggccgccaacacgaaaatggcaggcataagatggaatactatagaggagcacattccctgtggaatactgattcccagcatcaagtaaaagagccgaatgcactagttatgaataagaagattaggtccattatggctgaaaggcaggctgccattctagaaattgaactagaggctgctatatctgaaaagaatgaagccttggctgctcgagatgcagccattcggcagagggatgaagcacttgctcagagggataatgcccttttggaacgagataatgccctcgctgcccttcagagtcggaataattctgtcaacttcccatttggcggtggaattcaatgtggatcgaaacggatgcaccattcttctaaccatctatctaacatgactgaagctgcatacaacacaaaggatatgataataagagatgcctccccagtgactgttataccttctgaagctgtcaattctcatcaatcaaagagatcaaaggagaacaaggtaattaattctaaggcatcaaagccaccctgcaaagtaaagaaaatgggagaggatttaaataggcaggcttcttctgaagggacaaagatcagatctgaattggataggcaggatgttggcgtgaatctggttgcatttgatgaaactatcatgctggtcccagtttgcacatgtactggtgtaccacgacagtgctacaaatgggggaatggcggatggcagtcatcttgttgtaccacaacattgtctatgtatccgctaccacagcttccaaacaagcgccatgcccggattggaggacgaaagatgagcggaagtgtctttacaagacttctcagtaggttggtgtctgaaggccatgatttatctataccattggatctcaaggaatactgggcaagacatggaacaaaccgctacatcactatcaagtaacctgctgacattcatatgtattgagtcgtgttcagttttgaacctcttgcaaagactggcctttagttgaaatcatgccttgataagcatggtatgcttgaattttgtgaacattgatatggctggaccctacttttatccttataaatgggatagctgtaaagtatcatttatgtacatgtgactttctacatgactagaagtagatccccttgggtccctgcatattttcagcaaaaaaaaaaaaaaatgaatacgctgtgtaggaaattttctccatcttttcttgttctgtgatcctttaatcaatcatcatttataaatttcggtggggaaattttcccaaaaaaaaaaaaaaaaaaaaaaaaaaaaaaaaaaaaaaaaaaaaaaaaaaa

SEQ ID NO: 6729 - DNA, 1269 bp, Glycine max
tccacggcgtccgtacaggtgcgagaggacaacagaaggggtacgaaaattgagcctgatgacccaaatgggtacataccggagaggttaattggtgaaatagagtttcatgaagtgcatttcgcgtaccctgctaggcctaatgtggccatctttgaaaatttctccatgaaaatagaggcgggaaaatctacggcaatggtgggacaaagtgggtccgggaaatcgacgatcattggtctaatagagaggttttatgatccacttaaagggatggtgacaatagatggcatggacataaaatcgtataacctaaagtcactaaggaagcacatagcactagtgagccaagagccaacgttgttcggtgggaccataagggagaacattgcatacggaagatgtgagagtgagagggttgatgagagcgagatcatagaggcggctcgagcggcgaacgcgcacgatttcttatcttgcttgaaggaagggtatgagacatggtgtggggataaaggggtgcaactttcagggggtcaaaagcaaaggatagcaatagcgagggcaatactgaaaaaccctaaggtgttgttgttggacgaggccacaagcgcattagatggtccatcagagaaggtggtgcaagatacgttgatgagggtgatgagagggaggaccggcgtagtggtggcacacaggttgagcaccatacacaattgtgatgttattggtgtgttggaaaaggggagggtggtggagattggaacccactcgtccttgttggccaaagggtcatgtggagcttattactccttggtcagtcttcagacgagacatgcaacaacaccaaataacactagttgtactaaagctggtagtacccactctatcaattgaccctgccaaagtaccatccatctagtctttgtctacttgggatggctagctagctactaggccacctttttgaggttgataggagataatagctagctagtatgataaagatgagagatgggtttgtgataggtgaaggcaacttaaacaagtggacgagatggagaaggaactttcaaagtgtgtgtcacctttcttataattttgcactttctcatgtattcctccatcaacatcgatccatgtttaaataatgtatgtacatatatgtctctatatatgatatcaagtagaatgatttctttctacttctgaaatcattattattaacttacttattataagactaaagcaatatgttagtacctttac

SEQ ID NO: 6730 - DNA, 1274 bp, Glycine max
aattaacaagacacacttattttccattcccccaagttggtgcagtagaagtaaccagtccccagtcgtgacccagaccagagtaagtttccaacaccaacacagcaccaacccagggttagggtttctgcaattccccaatctccatcttcccaaaattagggtttcttcgcgccatgacggacggctactggaaccgacaacagacgcttctgtctcaatccggcatgctcaaacgaccgcattccgactacggtaatgagatgcataataattttgctcgtgatgatgaccgtaccggtcaccgaatgctaaaggacacaaaaacaattggatctgcttatgaccgctaccttcagagtgggcaactttcttcatttacttctggggaagccagtacagttgggggtcttgggttggctaggggtggtggtggattatcagaccattcactagctgatccttctgtcatggggcgtcatgggggtggtggtccagatctagcaccaaatggacggggtgttaactatggtggtcagctacctgtagatgcagtttccagacctggacctgagacagtacctctacctccagatgcttcaagtactctatatgttgaaggtctcccttctgatagcaccagaagggaagtagctcatatttttcgcccttttgttgggtatagagaagttagacttgtgagcaaagaatccaaacatcgtggtggagatcctcattacctttgttttgtggactttgcaaatccagcttgtgcagcaactgctatgagtgccttgcaaggttataaagttgatgaactcaatcctgaatctagtcacttgcggcttcagttttctcggtatcctggtccaagaagtggacctgcttttcgtggtaaaagatgatctggttcacaaaagccatctaggttttatgctcatcagaatgtcagtggttctttacaccatcgttttgggggtgatacaccacatgcaattttatttaccctcactggacacaatccttattagagcccttggaacaggccgagatcaaagtacaatttcaatttgcataaaactaacagatgaggatttttagaacatgtattcagttactctgatgtatcattatttgctaaattacattatcctggtgtctgatttatggtagcgtttcctttgagcttctcaaaaaaaaaaaaaaaatctattactattttttggattcaatattatcataccaacctgggtatgtggtaaaaaaaaaaaaaa

SEQ ID NO: 6731 - DNA, 580 bp, Glycine max
gtgaccagtagctattttctcttttttctaaaaaaaaaaaacggacggctcctggaaaataacggaccaacccatccgtggggttgtaagttttgtcttttatttgcagaaacggaccaacgcttagggtttggtgttttccgaattagggtttgtgattggatcttcatcttcaccaatcaatcaccataaccataacttgttcttctctctcgccatgacggacggctcctggaatcggcagcagcagccgtttctcccttcttccgccatgcttaaacgacctcgtactgaatacgatatttcaccttctggtctgacttcagggggcaatgagatgcataattatattggtcgaaatgatgaccatactggtcaccgaattctaaaggacactaaaacacttggatctgcttttgaccgctaccttcaaagcgctgggcttacttcgtttaactcgggggaagcctgcgcaattggcagtgttggtttggaaaggggtgttggtggattgccacgccattcactaactgatcctgctgtcatggggcatcctggtggtggtcatgatcttgcacga

SEQ ID NO: 6732 - DNA, 537 bp, Glycine max
agtttctctaccccctcgccgccgccgcctcctcttcggattgcgtccctgccggagaccagagagcgcggtgcccgagcaaaccctagcctcccacgatggtgctgcagaacgacatcgacctgctgaacccgccggcggagctcgagaagctcaagcacaagaagaagcgcctcgtccagtcccccaactccttcttcatggacgtcaagtgccagggctgcttcaacatcactactgtgttcagccactcacagaccgtcgtggtgtgcccaggctgccaaacagtgctctgccagccaacgggtggtaaggccaggctcaccgagggttgctccttccgccgcaagggcgactaaacggaaggctatcttaaaaagcaagccgttgttgaactctttagtttttcaggggtgttggtctgaaaattttgcaatgtcggcaaattgaatccatctttggtaatttggtatctagctcgagcaatattactatgacactgtactatgttccgtttgggctgtgagatcagactag

SEQ ID NO: 6733 - DNA, 579 bp, Glycine max
cccccactcctccctattcctatccccccagcctccccccacgaacccacagcgcgcacccgagatccgcagccgaagcccgtgagagcagcgaagcgcgagaggaaaggcactgaactagtttgcaacaaagaagagggaaaatgtctaccgctgaggcaacccgtgaggagaatgtgtacatggccaagctcgccgagcaggctgagcgttacgaggaaatggttgagttcatggagaaggtcgcaaagaccgctgatgttggtgagctcactgttgaggagcgcaacctgctctctgtggcttacaagaatgtgattggtgcccggagggcttcctggaggatcatctcctccattgagcagaaggaggagagccgtgggaacgaggcctatgttgcttcaatcaaggagtaccgtaccaggattgaaaccgagctcagcaagatctgtgatggcatcctcaagcttctggactcccaccttgtcccctctgccactgcagcagagtccaaggtgttctatctgaaaatgaggggtgactaccacaggtactttgcggaggtcaggcaggcgctga

SEQ ID NO: 6734 - DNA, 1352 bp, Glycine max
aaatcgggcctcctctcagctacgtaggcccccccccccgtcatatgctgatgatggcctatgagttccatcaggacaaatccatggtggcatgctctttcaattctcaattgaaattcccccaaagccaccttcttttgattcaataaatcaacacccaattttcaaaattccaacttgtaatcaatttttctttccatttgacacaccataccaatcaaccaaccttgttgcttcttgtgatcactcctgaaccacactaatggatattgatgagtgggagtttctctctgatgatggctaccttgatttcaatgaagagggtgggaagcaaaagcaaaagcagaattcctttggaaaattggactccgagggcatctttgacatggactacttttgctcatcaccaccaccaccaagggtgagaactcaactagtccctttgccaattcaattggagccaaaaattgggaaggccccagaagatattttggtgaaagacatcatcaagagtagtcctatggaagtggctattgctaccccatcagagaacacaaaggaatttgagacagtggaagctgatagagtgaaggttttcttcaagatcaaggagaaaagtgagtttgtggacatgaaaaggggaatcttggctccaatggatgctgctggttccttgaaatttgaggacaaaggtgaggccatggagatcatcacctctcccagaaggagggttattgagaaggatgtgtgtgacaaagaagaggagtccacttgggaggaagacaacaacagtggtttcaacttgtggaagtggagtttgacaggtgttggagctatctgttcttttggtgttgctgctgctactatttgtgttctcttctttggaagccagcagaggaacaaactaaagcaggatcagaagattcggttccagatctatactgatgacaagaggattaagcaagtggtgcagcatgcgaccaaattgaatgatgcaatttcagcagcaagaggtgttcctatgagcagagctcacataagcgttggtggttactatgatggtctttgaaagcattgattaggtgccttcgtgaagcaattgtagtctacaatggatcaaccatgctataagatctattaatctggccctatcctatgttgctgtaaataacatgatgccagatgttaccttattgttgttgtttgttctgtatattttctgtggtcttgtaaattaagtcacagatcagaggcacttttttttattattattatttgattaatattttggaatttatgtatcaagaattcaagatgtttctagccttagtttgggtttttggtaaaaaaaa

SEQ ID NO: 6735 - DNA, 1215 bp, Glycine max
ttctttacggctgcgaaagacgacagaaggggatggtggcacttactactcttgtgttgtgtgctactagtaatgaaatgaaattccacgcaaaactccacaaaagccaccttctttgattcaagaaatcaacaccgagttttcaaaatcccattttgttttcccttccttttttcctatataaaccaaccttttaatttccttctgaattaatactccttgatctggtgtgaagatggacactactgactgggaagtcctttcttatgatggcctttctgattttgatgactatgacttgtgcacctcaccaaaattcaagaaagcctctgaagcatcaaggaattttcatccaagggtgcctaaacagattcttcatattccaattcaattggaaccgagaattgggaaggccccagatgaagggtcaatggaagaaaacactaaggatcatcatcgtgttgaggtccctcttgttccatcatcaccaactaccattgagaatatcaaaggagggattttggaggctgattatgacactgttgcacaccttttctccaagatcaaggaaattgagtctccaaagtccattgatagaggattgttgttccctgatatgggtgctttgaaatttgaggacaaaggtggtgatcaggcacaagagatcatcatggcctctccaagaatgaagattgagaaagaaattgatactattatggactgtggcaaagaagtggaggactctagtggtggttttaacttttggaagtggagcttgaatggtgttggggctatatgttcttttgggtttgctgctgccacaatctgtgtcctaattcttggaagccagcaaaggaacaacaaaatccagcaggatcagaagatttggttccagatctacactgatgacaagaggattaagcaagtggtgcatgcaaccaaattgaatgaagcaatggcagcagtgagtggtgttcctctgagtagagctcgcataacctgtggtggttactatgatggcctctgattgagcattgattaaggaagtttcggatagtgcaatgggccaactatactactattctagatctatcatataggtgttttttcttttgttggggataagataatggggagggggcgcttgggattgaggtgcgggttgaggggtcgtttgggggtgtggggggctggggggggtggggtgtggggggg

SEQ ID NO: 6736 - DNA, 1309 bp, Glycine max
tacgagacgacagaaggggggcctatgagtttcatcaggacacatccatggtggcatgctctttcaattcccaattgaaattcccccaaagccaccttttttttattcaataaatcaacacccaattttcaaaattccaacttgtaaattgtaatcaattttctttccatttgtcaaaccataccaatcaaccaacctcgttgcttcttgtgatcactctttgaaccaccctcatggatattgatgagtgggagtttctctctgatgatggctaccttgatttcaatgaagagggtgggaagcaaaagcaaaagcaaagttcctttggaaaattggactcaaagggtgtctttgacatggactacttttgctcatcaccaccaccaagggtgagaactcaactagtccctttgccaattcaattggagccaagaattgggaaggccccagaagatgttttggtgaaagacatcatcaagagtagtcctatggaagtggctgttatggccccatcagagaaaaccaaggagtttgaggctgtggaagctgatagagtgaaggttttcttcaagatcaaggagaaaagtgagtttgtggacatgaaaagggggatcttgcctccaatggatgccggtgccttgaaatttgaggacaaaggtgaggccatggagatcatcacctctcccagaaggaaggttattgagaaggatgtgtgtgacaaagaagaggagaccacttgggaggaagagaacaacagtggtttcaacttgtggaagtggagtttgacaggtgttggagctatctgttctttttggtgttgctgctgctactatttgtgttctcttctttggaagccagcagaggaacaaactaaagaaggatcagaaaattcggttccagatctatactgatgacaagtccttgattgtgatttcagaggattaagcaagtggtgcagcatgcgcccaaattgaatgatgcaatttctgcagcaagaggtgttcctatgagcagagctcacataagcgttggtggttactatgatggtctttgaaagcatttgattaggtgccttcatgaagcaattggagtctccaatggatcacccatgccataagatctattaatctggccatatcctatatggctgtaaataacatgatgccagatgttaccttattgttgatgtttgttctgtatattttctctggtcttgtaaattaagtcccagattagcggccctttcattattattattattatttgattaatattttggaatttgggtaaaaaaaaacccacgcgtccg

SEQ ID NO: 6737 - DNA, 868 bp, Glycine max
tctccattccgcctccacccccgaactccaaaccctagtagcgccgccgccgccaggtaagaggcgagatggtgtccggctccggcgtgtgcgccaagcgcgtggtggtggacgcccgccaccacatgctcggccgcctggcctcgatcgtcgccaaggagctgctcaacgggcagcgcgtggtggtggtccgctgcgaggagatctgcatgtccggcggcctcgtccgccagaagatgaagtacctccgcttcctccgcaagaggatgaacaccaagccctcccacggccccatccacttccgcgccccggccaagatcctctggcgcaccatccgcggtatgattccgcacaagaccgcgaggggcgaggccgcgctcgccaggctcaaggcgtacgagggcgtgccgccgccgtacgacaggaccaagcgcatggtcatccccgacgcgctcaaggttctgaggctgcagcctgggcacaggtactgcctcctcggccagctctccaaggaggtcggatggaactaccccgacaccatcagggagctggaggagaagaggaaggagaaggccaaggtcgcctacgacaggaggaagcaattggccaagctgcgtgtcaaggccgagaaggcagccgaggagaagttggggtctcagttggagattcttgcccctatcaagtactgaggagctgtgctttgtcatcagttttggggaacatctagtctttgttttaagtgttcggtaacagtttgtgacagtataatctggtaaaccgtgttatttttctgccactcctatttgaacacattttctagctggtgaatgaactgtttggtcgatcttgtccaaaaaaaaaaaaaaaa

SEQ ID NO: 6738 - DNA, 2206 bp, Glycine max
gagattcttttttaatgaccaaaggaaacagaggcaccagaaaaagcaatcatgaagtgtttctccttatcctcaatttctcttttcattctcctctttctctgttccgagagtgtgtcctctcaaaatgtatccgagagtgagcagcagcaagctagcattcctccaagaggttggaactcctatgattccttttgctggacaatttctgaagaagaattcttacagagtgctgaaatagtttctcaacgtctccatgatcatggatacgagtatgttgtagtggattacctctggtatagaaggaaagtagagggcgcttatcatgattctcttggatttgatgtgattgatgaatgggggaggatggttcctgacccaggaaggtggccttcttctgaaaatgggaaaggattcactgaagtagctaatcaagtacatagcatgggtttaaaatttgggattcatgtcatgagagggataagcacacaagctgtcaatgcaaacacccctatccttgatacaacaatgggaggtgcttatcaagaatctggtcgagtgtggtatgcaaaagacatagcaatcccagaaagggcttgtgcatggatgtctcatggtttcatgagtgtaaatacaaagttgggagctgggaaagcttttttgagatccctttatgagcagtatgctgcatggggtgttgattttgtgaaacatgactgcgtattcggggatgactttgatttaaatgaaataagctatgtgtctgaggttctcaaggagtttgatcgccccattgtatattctttgtctcccggaaccagtgcgacaccagcaatggccaaggatgtcagtggactggtcaatatgtatcgtataacaggagatgactgggatacatggggggatgtcaaagctcattttgatataacaagggatttttcgaatgctaatatgataggagcaaaaggtttaatggggaactcctggcctgatctggacatgctaccatttggatggctaactgatcctggttcaaatgaaggtccacataggtatagttacctcaatctagaagagaagaagacacagatgactctgtggtcgatggcaaagtctccccttatgtatggaggggatgttcggaagattgatcctagcacatatgatgttataacaaatcctacccttttggagattaattcttttagctcaaataacatggagtttccttatatcacaagcgtgaatagtgaagatcaggatcttggtaggccaatgagaagaagcagcatggaaataaaaacatcctacactcattcattgggcctcacaagctgcactgagtcaaaggcaagcggttgggctagtgaaagtcttaaccaataccttgaaagaatatgctggaaaaggagtttaggaaacaagcatctttcccccttctgtgtgcacaagagggaactttacttcccatttgatgaagcgagtatgtatcaagagtatcatcaaaggaaacatcatttagttgcaactaacagaataaaattttgcttggatgcttctccaaaacgcaagcttacttctaaagagttcaagagagggacattttctccctgcagttgggattcaaatcagatgtgggagttgaaccctaatgggaccctggtgaatagttattctggcttgtgtgcaacagtagaatctagtgaagatactattaattctggtggcttgcactcttggattgctacaggaagaaaaggagaagtctacgttgctttcttcaatctaagtgaacagaagagggtaatatctgcaaaaacatcagacctggctaaggttcttcctggcagagacttcagttcttgtcagggcagtgaagtgtggagtggagatgctatagaaataactcggggaacgttatcaacggcagtggaagtgcatggaagtgcactaattgttctcaattgcaacgagtcccccctcctttccccaaaaatagaaagaaagaaagaaaataagtaaagcaaaatggcatttcattggctgacttagtgtatgcttgaaaatcaggtggaaaatgactttggaggcgaaagtactttaaaaaaagatcagaattcttgttttgacttttatccattggatctgtattgaaacatatgtcgtaataatttcaacttaccaaacatacacttaatgttttcta

SEQ ID NO: 6739 - DNA, 2615 bp, Glycine max
tacggctgcgagatgacgacagatgggggggaacagacctgcccgcaatgatgaagtgtttctcggtgtccttagcctctttatgggttctccttgctctcttttctctgagtgtgtcatctcaaaatatatctgagagtgggctacagcaagctagcctcccaccaagaggttggaattcctatgattccttttgctggacgatttctgaagacgaattcttacaaagtgctgaaatggtttctcaacgtctcaaggctcacggatatcagtttgtcgtggtggattacctctggtataggaagaaagtcacgggtgcttatcctgattctcttggatttgacgtgatcgatgaatggggaaggatgctccctgacccaggaaggtggccttcttccataggcgggaagggattcagtgatctgcctcgtaggcccccccccccaggtttgaagtttgggattcacgttatgagagggataagcacgcaagctgtcaatgcaaacacccctatcctagatataacaaagggaggtgcttatcaagaatctggtcgagtgtggcatgcaaaagacatagcaatgccagaaagggcttgtgcatggatgcctcacggtttcatgagtgtaaatacgaagttgggagctgggagagcttttttgaaatccctttatgagcagtatgctgcatggggtgttgatctcgtgaaacatgactgtgtgtttggagatgacttggatttaaatgaaataagctatgtgtcggaggttctcagtgtgcttaatcgccctattgtgtattctctgtctcctggaaccagtgtgacaccagccatggccaaggatgtcagtggactagtcaacatgtatcgaataacaggagatgactgggataaatgggaggacgtcaaggctcattttgatgtaacaagggatttttctacagctaatatgataggagggaaaggtttgaagggaaattcctggcctgatttggacatgctaccatttggatggctaactgatccaggatcaaatgaaggtccacacaggtttagtaaactcactctagaagaaaaaaggacacagatgactttgtggtctttggcaaagtctccccttatgtatgggggggatgtgcggaggatcgatccaaccacatacgaacttatcacaaatcctaccctgctagagattaattactttagctcaaacaatatggagtttccttacatcacaagctcaattaacttgaagcaccctggagggaaggaaagaagacttaagaaaggaatacattcattgggtttgactagctgcagtgaatcaaaggcgaggggttggtctattgaaagtcttaaccaagatcttgaaagaatctgttggaaaaagggtttagaaaacaagcatcaggcccctttctgcgtacacaaaagagaacttcaattcagattagacggggtgagtatgtatcaagaggactatcgagggaaacatcaattagttgcaactgacagaatgaaattttgcttggacgcttctccaagacgaaaggttacttctaaagagttcaagagaggtacattttctccatgcagatgggattcaaatcagatctgggaactgaactccaatgggaccatggtaaatagttactccggtctttgtgcaactgtagagtatattgaagctaatgttaattctggtgggattcgctcttggatcgcaacaggaagaacaggggaaatctatcttgctttcttcaatctaagcgaacagaagacggagatatatgcaaagacatcatatctggctaaggttcttcctgacaaaagcatcacttcatgcaagggcgaggaagtgtggagtggaacagatgtaataacaacgcaagggacgatatcaatgaacgtggaaattcatggatgtgcactatttgttctaaattgcaactagtttggcatggcttccaattaatatttacagaagaaaaaaaggaaaagaaaacagcatctcattgttgaggcttttttccccctctatttaattattactcttcccatggtgggggttaggtgaaatttgtatgtgttaatgcactgcagtgcggtacgtaactgttggatcgcaccgtgtttagacaaactacataggaaattatacttgttgtatgttacgattcttttggtaagagagaaagtgagaggaaataaattagagaaaaaaataataatacgactaattttgtttgtttggttgggtcggtaagtgtcttttttaaaaaaaatatatatattttacaaattaatttaaaattatttgtcgaaaagattttcgtgcgtattaaatagtaattgttttaaatttacatgaatattaaatatatattggaaattttagtattatatatactaatattagttattttataattagcttaattgttaaaaattttaatattatatataataatattatttattttataattaattcaattggttagaaaatgatattaataatgcgaaagtcaatatttgagattgtgatatttcaagtaggagttttcattgttgatgagttattttttataggcatgagccgtcaattaaatag

SEQ ID NO: 6740 - DNA, 1694 bp, Glycine max
  misc_feature (232)..(236): n is a, c, g, or t
  misc_feature (320)..(324): n is a, c, g, or t
ctgcagtcaaacttcgcaactcttgatgagaaaactggaatagtcaccagtaggagagccgacaggcactttgaagaagaaggtcccctactttgtgctgccctggatggaatgaagctgccatctttccctcaatatgaagtcagagtcaggtgaagatgcctaaggttgctataacatttaagggttaatcgttaatgtaggtaactgcttattatgggtaatgttaagnnnnnaagggttaattgttgagctctatctggcttaaagatttcattccaaaattttgaaattcagcactcaagtaaaattgactactnnnnntatttactagtttgggaactcaagatttatgcagagtatattaacaattcttctctaccaaaagaattagaagtacttcatacgttttggctatttctttattcgggatgcaacagaacatagatgtggagtggttgttaaaggaccaaatctgagtggaaatatatcaggaacagacccattaaaggacaaccgcttacttttgaaagcagaagctttagatgattctcatgaagcaaggaacactgctgctgttgttaacgagctgtccaaggaaataacaaaaattttggtttctcatcctgtgaatgctaaacgtgctgcagaagggaagaacatagcaaatgtagtccttttaagaggctgtggcattcgaattgaggttaccccatttttaaatagacatggtttgcggccatgcatggtagctccaacgaaaataattgctggcctgcgcttatcacttggtattgatattctacatgctcctggagcaactggggactatcgaactttactaacatcaaaagcatcagcaatagctaaggcactctcagctcctttacagtcctgtcccagagtttttgttcctggagaggatgagcttaaagcaggccggtcagatggctatgactttggatttcttcatattaaggcaatagatgatgctggccatgacaaggcgagcatcctcatggtcaaagcattagaagctgtagataaagccttggggcagttggcaaggcttctctgggaggcagaatcaacaggaaagtttcagtttttcctttgtgtcacaggagatcactctactccagtagaatatggagatcatagctttgaatcggtcccgttcgcaatttgccggttgaaagactttgttggtgcaattggggaatccactatttccaaatcttctcttgacccatttcctattccaagtgttaagtcgggtgaagacttgcttgatgatctggaaacagaagagagagacaaatgctgtgaagcttatagtggtgattcggtttatgagctgaatgaagtggcagctgcaaagggatgtctggggcgtttccctgggggagaaatgatgggaattataaagaaattcattaacttagatgcgggaactgattaactaaggaagctaggacttgttatgagactttttcttttctcactctgaaatcaaagtgatttcagtttcagggtacaaaaaatcaaattttgaacttttgtactaagtgtagaataagaagctttgttctcaaaataactatgtaaactcaacttaaataaatttctctggtgtttttgcactctcgctggagagtcctaaaaaaaaaaaaaaaaaaaaaaaaaaaaaaaaa

SEQ ID NO: 6741 - DNA, 731 bp, Glycine max
cttcctccttgcgagaccaaaccaaagctgcggcggcgcgcgcataggaggcgaatcagcagcggaaccaagccgccgacgccaccatgggtatctcgcgtgactccatgcacaagcgccgggccaccggtgggaagcagaaggcttggaggaagaagcgaaagtatgagctcggccgccagccagccaacactaagctttcaagcaacaagacagtgaggagggtccgtgttcgcggaggtaacgtgaagtggagggctctccgtcttgacactggtaacttctcatggggtagtgaggctgtgacccgcaagacccgtctcctggatgtggtttacaattcgtcaaacaatgagcttgtgaggactcagacccttgtcaagaatgccattgtgcaagttgatgctgcccccttcaagcagtggtacctgactcattatggagtcgaaatcggtaggaagaagaaagctgctgcagctgccaagaaggaagctgctgagggacaagaggctgaggttgctgctgctgccacagaggaagcaaagaagagccaccatgtccagaggaagcttgagaagcgccagcagggacgtaccctggacccccacattgaggagcagttcagtggtggaaggctgctggcctgcatttcgtctcgccctggacagtgtggcagagctgatgggtacatcctggagggcaaggagctggagttctacatgaggaagctc

SEQ ID NO: 6742 - DNA, 598 bp, Glycine max
ttttttccttctcatctctagcctgcgccgccgcctccaccgcaccccccaaaaccctagcgctcgcttcgccccgccccaccaccatggccggcgcgcaggagtccctcgtctacgccggtgtgatgcgcggccacaacgacgtggtcacggccatcgcgacgcccatcgacaactcgcccttcatcgtctcctcttcccgcgacaagtcgctgctcgtctgggacctcaccaaccccatccaggccacccaggactccagctccgagtacggcgtccccttccgccgcctcaccggccacggccactttgtccaggacgtcgtcctcagctccgacggccagttcgcgctctccggatcctgggacggcgagctccgcctctgggacctctccaccggggtcaccacccgccgcttcgtcggccacgagaaggacgtcctctccgtcgccttctccattgacaaccgacagatcgtctccgcttcccgcgaccgcaccatcaagctgtggaacaccctcggtgagtgcaagtacaccatcggcggtgaccttggaggcggcgagggccacaccggctgggtgtcctgcgtccgttt

SEQ ID NO: 6743 - DNA, 562 bp, Glycine max
ctagcccagctgcccacccattcccctcaccgccgccgccgccactccgccgctgccgccgccgagatgggtcgcgtgatccgcgctcagcgtaagggtgcgggctccgtcttcaagtcccacacccaccaccgcaagggccccgcccggttcaggtcgctcgacttcggcgagcgcaacgggtacctcaagggcgtcgtcaccgatgtcatccacgacccggggcgtggtgcgccgctggccaaggtgaccttccgccacccgttcaggtacaagcaccagaaggagctcttcgtcgccgccgagggtatgtacaccggccagttcgtctactgcggacgccgcgccaccctctccgtcggcaacgtcctcccgctccgctccgtgcctgagggaggcgtcatctgcaacgtcgagcaccacgtcggcgaccgtggtgtcttcgccagggcctccggtgactacgccatcgtcatcagccacaaccctgacaacggcacctcaaggatcaagctcccctctggtgccaagaagatgtcccaagcagctcccgtgcatgatt

SEQ ID NO: 6744 - DNA, 917 bp, Glycine max
aataggtaatcataccacaacccgagcattctacaaccactttcatcaacgccatacacgtctcctaccctcacagttcgttgctccgcacatcagcaggacttgcaatggcgggagacggcgagctgaagctgctgggcgtgtggacgagcccgttcgtcatcagggtgcgcgtggtgctcaacctcaagtctctgccgtacgagtacgtggaggagaacctgggcagcaagagcgcgctcctcctgggctccaacccggtgcaccagagcgtgcccgtcctcctccacggcggccgccccgtgaacgagtcccaggtcatcgtgcagtacatcgacgaggtctgggcgggggccggcccgtccgtgctcccggccgacccctacgagcgcgccacggcgcgcttctgggcggcgtacgtcgacgacaaggtcgggtcggcgtggacggggatgctcttctcgtgcaagacggaggaggagagggcggaggccgtgtcccgggccgtggcggcgctggagacgctggagggcgcgttcgcggagtgctccaaggggaaggcgttcttcggcggcgacgccatcgggttcgtcgacgtcgtgctcggcggctacctcgggtggttcggggcgatcgacaagatcatcgggcgccggctgatcgacccggcgaggacgccgctgctggccaggtgggaggagcggttccgcgcggcggacgcggccaagggcgtcgtgccggacgacgccgacaagatgctcgagttcttgcccaccgtgctcgcttggatcgccggcaaagcgaagtgaactgtgtctgtgaggccgtgacatcgccagctcgtgacatgtgtgtttgtgtgtgtctgagtccggccagtgtgtgctgaataaatgcaccgcatgtcgtgtgttgta

SEQ ID NO: 6745 - DNA, 1727 bp, Glycine max
tacggctgcgagaagacgacagaaggggtcagctacgtaggccccccccccgaagaagggttctttcttccctgcgaagattcagagtgctaagtgtgagagaaagaaaatgccaaagtctcaatttcgaaccccatttcttgtttctttttctcttttgttattcatcttcaacctcaccccttcatacgcactctatggagcatccacacccgtgcttcaactcactccctctaacttcaagtccaaggttctgaattcaaatggagttgttcttgttgaattctttgctccatggtgtggacactgtcaggctctgactcctatatgggagaaggcagctactgtgttgaagggtgttgttactgtggcagcaattgatgctgatgctcacccgtctttggctcaggaatatggaattagaggatttccaactataaaagtgtttgcacctggaaagccgcctgttgattaccaaggagcaagagatgtcaaaccaattgctgaatttgcacttcaacaggtaaaggctcttttgaaggatcggttaagtggaaaagcaacaggaggatctagtgaaaagacagaaaccagttcttcagtagaattaaactctggcaactttgatgaattggtgatcaaaagcaaagaactctggattgtggaatttttcgcaccttggtgtggacattgtaaaaaattagctccagagtggaagaaagcatccaataatttgaaagggaaggttaaactgggccatgttgactgtgatgctgaaaagtctctaatgagcaggttcaaagttcaaggattccctacaatcttggtatttggtgctgataaagatagtcctattccttatgaaggcgcaagaactgcctcggctattgaatcatttgcattagagcagctggaaacaaacattgctcctcccgaagtgacagagctatacagtccagatgttttggaagagaaatgtggttctgctgcaatctgttttgttgccttccttcctgacattttggattccaaggctgagggaagaaacagatatcttcagcagttattatcagttgcagagaagtttaaaaggagtccatacagttacgtctgggtagctgcagggaagcagccagatcttgagaagaatgtgggtgttggagggtatggttatccagctttagtggcccttaaccttaagaaagctgtttatgctcctctcaagagtgcttttgaacttgaccaaattatagaatttgtgaaagaagctggacgtggaggcaaagggaatttgcccattgaaggaactccaacaattgtaaagacagaaccatgggatggaaaagatggagaaataattgaggaggatgagttttctcttgaagaactaatgggggaagatgcttcaagcaaggatgagctatgatcaatttagaagaaatttataccaaattaaagtttcaaccaccgatttttacgttattggcaacttgtttctcatgatgattgtgatcactgttctgtttttccatgttccaatttaaagaccagtctagtgatgagtgatcttatgaggattttgatatgtcatttagtggtactgatatatctcaggaaaatgttagcatgttttggtattttcttttccctctcaatgagcattcagccaacaggttcaaccttcttaacaaaggaattattttttatctggcccgggaaaaaaaaaa

SEQ ID NO: 6746 - DNA, 585 bp, Glycine max
tacggctgcgtcgagacgccacgtgggccccccccctcagagtgcaaagtgtgagagaaagacaatgccgaagtctcaatttcgaaccccatttctggtttctcttccccttttgttattcatcttcaacctcaccccttcgcacgcactctatggagcatcctcacccgtgcttcaactcactccctctaacttcaagtccaaggttctgaattcaaatggagttgttcttgttgaattctttgctccatggtgtggacactgtcaggctctgactcctatatgggagaaggcagctactgtgttgaagggtgttgttactgtggcagcaattgatgctgatgctcatccgtctttggctcacgaatatggaattagaggatttccaactataaaggggttggcacctggaaagccacctgttgtttacctaggagcaagagatgtcaaaccaattgctgaatttgcacttcaacaggtaaaggctcttttgaaggatcggttaagtggaaaagcaacaggaggatctagtgacaagacagaaaccagttcttcagtagaattgaactctggcaactttgatga

SEQ ID NO: 6747 - DNA, 1471 bp, Glycine max
tacggctgcctgtcgccgtctggcggggagaagaagagagagacagacagaacaatgggggaagcaaagggaaaggaagaagaagtgttagcctcagttcactcaaccgtgttcaaagaatcagaaagccttgatggaaagtgtgttaagattgagggctatgatttcaaccgcggcgtcaattatccgttgctactcagctccatggtcacaactgggtttcaagcttccaacctcggtgatgccatccaagtcgttaatcaaatgctagattggaggctagttgatgaacccgtagctgaggattgcagtgaccaagagagggatttggagtaccgaaaatctgtgacgtgtaaagtgtttctgggtttcacttctaatcttatttcttctggtgttagagatactgtgaggtttcttcttcagcatcgcatggttgatgtagttgttacaactacaggtggcattgaagaagatcttataaagtgcctggcaccaacatataaaggagatttctctttgcctggagcatatctgcgctcaaaagggttgaatcggattggtaatttattggtcccgaatgacaactattgcaaatttgaggactggattattcctatctttgatcagatgttgggggaacaaaataatgagaatgtgttgtggacaccatctaagttaatagctcgattgggaaaagaaataaaaaatgaaagctcttacctttactgggcatacaagaacaacattccagttttctgtccgggcttaactgatggctcattgggggacatgctgtacttccattccttccgcaatcctggtctgattgtggacatagtgcaagatataagggcaatgaacggtgaagcagtacatgcaagtcccaggaagaccggaatgataattttaggaggtggccttccaaaacatcacatttgcaatgccaatatgatgcgcaatggtgcagactatgctgtttttatcaatactgcacaagaatatgatgggagtgattctggagctcgtccagatgaagctgtttcatggggaaagatacgagactctgctcagactgttaaggtacactgtgatgcaacaatagcatttcctctgctggttgctgaaacgtttgcttcaagagtgaaacctccccattgatgaaggttaaagatgaatttactctgaagttcattttaattgtgtgtgtttgaggatcttgatggacaagttcggcattggtgttcaatttgactatcatttgattcctaagctcctcttagcagtggagacctttttgaccattcaaaggtaatccattaatcctgtcagtgaggaagtcaggaattatagatgtgaggatcattgtactaatatctttagggaaaataaggctaagaaaactaactgatcatatatggcatttttaatattttccacctgatggctgcatttcatgttggtaaaaagt

SEQ ID NO: 6748 - DNA, 551 bp, Glycine max
ctcctctctctccccccactctttgcccaagcccccctactgccggcggcggagacgacggaaacatggtgcagcgtctgacgtaccggaagaggcacagctatgccaccaagtccaaccagacgcgggtcgtcaagaccccaggtggtaagctcgtgtaccagtacaccaagaagagggcgagcggccccaagtgccctgtgaccgggaagaagatccaggggattccccacctcaggcctactgaatacaaaagatcaaggttgtctaggaaccgcaggactgtgaaccgtccctatggtggagtgctctctggaactgcagtgagggaaaggatcatccgcgccttcttggtggaggagcagaagatcgtgaagaaggtgttgaaaatacagaagaccaaggacaagacgacctcaaagtaatctgtttgaaacggaagtgcgaagtgagatggtgttctgtaaacaaggaaaatatttttgttggtggttatgatcaatggtttagtcccttcctgcgctaaaggttttagagtacttgaaatcctt

SEQ ID NO: 6749 - DNA, 565 bp, Glycine max
cccctccccaaaccccagacgaaaccctagcctgcctcccaggagcgccgagtccctccgcccccaacagatctacgcgcgcgaggttcggttcggtcttcggagctcgagacatggcggaggagaatgccccagttgaggttgctgctccggttgcggcccctaccccagttcttggagagcccatggacttgatgactgctctgcagcttgtgatgaagaagtcaagcgctcatgatggccttgtcaagggactccgtgaagctgcgaaagcgattgagaagcatgctgctcagatctgtgtgcttgctgaggactgcgaccagcctgattacgtgaagctggtgaaggcactgtgtgctgagcacaacgttcacttggtcactgtgcctagtgccaaaactcttggcgagtgggctgggctttgcaagattgactctgagggcaaggcaagaaaggtggtgggctgctcatgtgtcgttgtgaaggactacggcgaagattccgagggtcttcacatcgtgcaggaatacgtcaagtcgcactagggacgggctttcaggtt

SEQ ID NO: 6750 - DNA, 2089 bp, Glycine max
cggtccggattcccgggtcgacccacgcgtccgaaaactcagggtgggcgtgtaaacgtgaaaccacgtgtatagagaccggcggcgaaggtaaggtggtgcaaacaagcaaaacctaattctcgaaaatcagatcggcgatcggaggaagaacctgaagctgagcgaagatggttctcgcggagttaggtggtagcatttcgcgtgctcttcagcagatgagcaatgcgacgatcatcgacgagaaagtcctcaacgattgcctcaacgacatcactcgcgcgcttctccaatccgatgttcaattcaagctcgttcgcgacatgcagaccaacatcaagagcatcgtcaacctcgacgaccttgccgcaggtcacaacaagcgcaggatcatccagcaggccgtcttcaacgagctctgcaagatcctcgatcccggaaaaccctcttttaccctcaaaaagggcaaacccagcgtcgtcatgttcgttggcctgcaaggatctggtaaaacgacgacgtgtacaaaatacgcgttttatcatcagaagaaaggttggaaggcctgctctggtgtgtgcgcgatacggcccccccccgtgcttttgatcagttgaagcaaaacgctactaaagcgaagatccctttctatggcagctatatggagtcagatcctgtgaaaattgctgtggaaggggttgaacgattcaagcaagaaaactgtgatcttataattgttgacactagtgggcggcacaagcaagaagctgctctttttgaagaaatgcgccaagtttcagaagcaacgaaaccagatcttgttatattcgttatggatagcagtatcggtcaggctgcttttgatcaggctcaagcatttaaacagagtgttgcagttggagctgtcattgtcactaaaatggatggccatgcaaagggtggtggggctcttagtgctgtagcagcaacaaagagtcctgtcatattcattggaactggagaacacatggatgaatttgaagtttttgatgttaaaccatttgtcagtcgtctactaggcatgggagactggtctgggttcatggataaaattcatgaagttgttcctatggatcaacaacctgaactgcttcaaaagctgtcagaaggaaacttcaccttgaggattatgtatgagcagtttcagaacttacttaaaatgggtcccatcagccaggtcttttctatgctaccaggatttagtgctgaattaatgccaaaaggccgtgagaaggaaagccaggcaaaaattaaacgttacatgacaatgatggactcgatgacaaatgaagagttggatagttcaaacccaaagctcatgaatgagtcccgaatgatgcgaatagctcgaggttctggtcgtccagttagggaagtaatggaaatgttagaagagtacaaacgtcttgcaaagatatggagcaaaatgaaagggcttaaaatacctaagaagggtgaaatgagcgccttatcccgaaatatgaatgctcaacacatgagcaaagtcctccctcctcagatgctaaagcaaattggaggcatgggtgggttacaaagcttgatgaagcagatggggtctgctaaagatatgatgggaatgtttggcggtggtggtgattagtagattggctgtggcatatgagctgaggattgtttctgatctgtactacaaactctaatacttcacaagaactcatcgttgtgaaattatgctgttcacatggaattcggatgtattgttttgtcaatcaacctgcagcatctcaatggtggaaatagttcctttcaattttaccttaagatcctttcttctgtaaaactaagcccccttattttcctttttctgtatatttttgtctttaggtgaagtcaaagcaattttatagcgaattggaaattttcttgtagttgtaacattataaataagttatatattgctcctctctgaatatattgaataaggtgaagttaaaaatgacaaaaaaaaaaaaaaaaaaaaaaaaaaaaaaaaaaaaaaaaaaaaaaaaaaaaaaaaaaaaaaaaaaaaaaa

SEQ ID NO: 6751 - DNA, 733 bp, Glycine max
atatttactattgtgataatgaattccagtgttgcttgatttggtaaaaaaaataaaacaaaaaaaaaaaatcggactagttctctctctccctcgtgccgaattcggcacgaggcgaatatcaaacaacctcgtcgaagaacattctgggttgacgtttcatcattcgcggttgttgaattctgagcagccaccgtgaaccggtctcacctcgttgactcattctccgtccacttgcgaaagagaagagatctgaaaccctaacctaaccctaacagaggtaatggattcagtgcctcgaagaagcagaggaggaggcgttttcgaaagcctctacaaggtcctcatgcgccgcaactccgtctacgtcaccttcatcatcgccggcgccttcctcggagagcgggctgtggattacggagttcacaagatctgggagcacaataacgttgggaaacgatatgaagacattcctgtactagggcaaaggcaatcagaagagtgaacatcacgagttaaataatggttttagctttagcaacttgttaaatgctttatgtttgtaaaagcttgatttcaatgactatttggaaatatacagtattgaattagttcacatttctgtattgaattttatcagggaacattgaattgtattcacttgtttttatatatatataaaacttttttctgaaaaaaaaaaaaaaaaaaaaaaaaaaaaaaaaaaaaaaaa

SEQ ID NO: 6752 - DNA, 1816 bp, Glycine max
ccgctctcatgaattccataaatgcttcccaacaacactgctctatatcgatccgccaacctgacccccccccacatcaaaccaacattcagttcataatttcttccaacaaattatatttttcttacaaaaaaaatggcaggtgaggtggtgaagaaggaagagtctctcaacctgaaagtcactaacaagagccatgttcaatcagaggagaaaattggaagaaaagagtaccaattggtcacttttgatcttccctacttggccttttactacaaccagaagctcttgttttacaagggtgaagatttcgagggcatggtccaaaaactcaaagttggacttggagtggtgctgaaggagttccaccaacttgctggcaagttagggaaagatgaagagggggtgttcagagtggagtatgatgatgacatgcttggtgtggaggttgttgaagctgttgtagctgatgatgaaattggtgtggatgatctaactgtggctgaaattagtaacactaatttgaaggagctgataccttatagtggtatcttgaatttggaaggcatgcataggcccttgctggctgttcagttaacgaagctcaaagatgggctcgcaatgggcctagcgttcaaccatgctgtcttggacgggactgccacgtggcagttcatgacctcatgggccgagatctgcagcggttcaccttccacgtcagcaccacccttcctggaccggaccaaggcccggaacacacgcgtgaagctggacctttcgctaccagagcccaacggcccaccaacttccaacggtgaagcaaagcccgcgccagcacttagggaaaaaatcttcaaattctctgagtcagccatcgacaagatcaagtcaacggtcaacgagaaccctccatcggacggctcaaaaccattctcaacatttcaggctctttcctcccacgtttggcgccatgtaagccatgcacgtaacttgaagccggaggattataccgtgttcaccgtctttgccgattgccggaagcgggtggacccgccaatgccggagacttatttcggaaacttaattcaggctatttttaccgttacagcggttgggctcttaacggcccatccgccacaattcggggcttcattggtgcagaaagccattgaagcccacaatgctaagactattgaggaacgtaacaaagagtgggaaagtgcacccaaaatttttgaattcaaagatgctggggtgaattgtgtggctgtgggaagttccccaaggtttaaagtttatgacattgattttggatgggggaagccagagaatgtgaggagtgggactaataacaagtttgatgggatgatttatttgtatccggggaaaagtggaggaaggagcattgatgtggaactaaccttggagcctgaggctatggggaagttggagcaagacaaggattttcttttggaagcataaaattgctagagcaagtgcaataaaaaaaatggctagaaaaagtacgttgagcaaatttggaagtagtactgctcagattgttgaaggggtcgacttcaatgtccaattatgaattctgatgtgattcatggatgcaatttaatttaaagttgtgctgttttaggattttatatattttgtggttctacgcttgattgattttgaacctactaatgtctgttccatatgtatggtcaatgattgtagttcatgacaagtgaaaggaattattgtgagttttaattaaaaaaaaaaaaaaaaaaaaaattaaaaaaaaaaaaaaaattatattatt

SEQ ID NO: 6753 - DNA, 1821 bp, Glycine max
ctcgagtacgccggccgcgacctcaagctcgtgcgcatggccgtgcctctcagagacaccgagaaggagcttctccggcgggagcgccgcctgcgcggcacggctgcccgaaggaaatcaacattcgtaataatttcttccatcagatatattttcttcaaaaacaatggcaggcgaggtggtgaagaaggaagactctctcaacctgaaagtcactaacaagagtcatgttcaacctgaggagaaaattggaaggaaagagtaccagctggtcacttttgatcttccctacttggccttctactacaaccagaagctgctgttttacaagggtgaagattttgagggtatggtccaaaaactcaaagttggacttggtgtggtgctgaaggagtttcaccaacttgctggtaagttagggaaagatgaagagggggtgttcagagtggagtatgatgatgacatgcttggtgtggaggttgttgaagctgttgttgttgatgataatgagattggtgtggatgatctaactgtggctgaaattagtaacactaatttgaaggagctgataccttatagtggtatcttgaatttggaaggcatgcataggcctttgctggctgttcagttaacgaagctcaaagatgggcttgcaatgggcctagcattcaaccatgctgtcttggacggtactgccacctggcaattcatgacctcatgggccgagatctgcagcggttcaccctccacgtcagcaccacccttcctggaccgaaccaaggcccggaacacacgcgtgaaattggacctctcgcttcctgagcccaacggcccaccaacttccaacggtgaggcaaagcccgcgccagcacttagggagaagatcttcaaattctccgagtcagccatcgacaagatcaagtcaacggtcaacgagaaccctccatccgatggctcaaaaccattctcaacatttcaggctctttcctcccacgtttggcgccatgtaagccatgcacgtaacttgaagccagaggactacacggtgttcactgtcttcgccgattgtcggaagcgggtggacccaccaatgccggagaattatttcggaaacctaattcaagctatttttaccgttacagcggttgggctattagccgcccatccgccacaatttggggcttcattgatccagaaagccattgaagcccacaatgctaaggcaattgatgaacgtaacaaggagtgggagagtacacccaaaatttttcaattcaaagatgctggggtgaattgtgtggctgttggaagctccccaaggtttaaggtttatgacattgattttgggtgggggaagccagagaatgtgaggagtggaactaataacaagtttgatgggatgatttatttgtacccggggaagagtggagggaggagcattgatgtggaactaacattggagcctgaggctatggagaggttggagcaagacaaggattttcttttggaagcatgaaattgctagggtaagtgcaataaaaaaaagtgggtagaaaagtacgtggagcaaatttggaagtagtactactcagattgttgaaggggtcgacttcaatgtccaattatgaattctgatgtgattcatgcatgcaatttaatttaaggtcgtgctgtcttaggattttatatgttttgtacgtggttctacgcttgattgattttgaacctactaatgtttgttcaattatctacggtcaatgattgtagttcacgatcgatcgacaagtgaaatgagttattaatgtgagttttaattatagt

SEQ ID NO: 6754 - DNA, 1811 bp, Glycine max
  misc_feature (1598)..(1612): n is a, c, g, or t
tcgagtccccacccgtccccctacgcccccgttcctgtgtgattgcgtttcaaaaaaacgtgtctctctattttgaatctggatccagcgccttctattcagcattcacccaaaccctatttctctctctctttcttccctgtttggtatcagcgagcacaatgaggagaggagctaagagaaagacgaagcaggaccaagaagccaaacacgtcgcagccgaagataacaagaccgaagctcagcctcgagctaaacgggccaaaacctccaagcctcaatccgaacctgagtacttcgaagataagcgcaacttggaagatttgtggaaggaaacattccccgttggaactgagtgggaccaattggatactgtctatcaatacaagtgggatttctcgaatctagaaaatgcgtttgaagaggatggcgtgttgtatgggaaaaaggtttatctctttggttgcactgagcctcagctggtcatgtttaaaggggaaagcaaagttgtcttgatacctgctgtagtagctgttgtatcacctttcccaccatctgataaaattgggataaactcagttcaaagagaggctgaagagatagttccgatgaagcaaatgaaaatggactgggttccatatattcccttggagggcagagatagccaagttgatagactaaaatcccaaatatttatcttgagttgtacccaaagaaggtctgctttaaaacatctgaagttggatagattaaagaaatatgagtactgcttgccttatttctatcagccatttaaggaagatgaacttgaacagagtactgaagttcaaattatatatccagctgagccaaagccggtcttttgtgaatttgattgggaattagatgaacttgaggagtttactgataagctcacagaggaggaggagttatccgaagatcaaaaggatgccttcaaggaatttgtcaaggaaaaggttcgtgaagcaaagaaagctaatagagaggcaagggaagctcgaaaaaaagccattgaagaaatgagtgaggaaactaaagctgcgtttgagagtatgagattttataagttctaccctgttcaatctccagaggcacctgatgtatcgaatgttaagtctccattcattaacaggtattatggaaaagctcacgaggttctgtgattggctccaagacaataatgacaatttttctgtggcttgttttgcctaacacaagagatgttttgtttattatgaactatgtagttcaggaggcaaccccctggtgccccatcaaattgtctttgacagtgtagttgtctaaagtgacatataccatgtaaaactgtatgtaggtcagagatcctagagaagtgaactaggtgttgggaggaatttaagagatgtttctggcttccatggtgaagagaatttctgaggttctggagctgcaatttgggtggctcttgcatgtcttggttttctcttagattattctttttcccttcaaaattagatgtacgacagttttgactaatgagctaaatgaagaaatcaattcattattgtttcgtttaaaaaaaaaaaaaaaaaaannnnnnnnnnnnnnnaaaaaaaaaaaaaaaaaccggccccagtgacattgattttgggtgggggaagccagaaaatgtgaggagtggaactaataacaagtttgatgggatgatttatttgtacccggggaagagtggagggaggagcattgatgtggaactaacattggagcctgaggctatggagaggttggagcaagacaaggattttctt

SEQ ID NO: 6755 - DNA, 1860 bp, Glycine max
aacttctctttcgtttctcatcatcagagacttacactccaatttccaaaccgaatcgaatttgaatttcgatttgaatttgaatttcattttcaacttccctgtgatgccttacacggtccgcgagaacctttcgatcgggaacatcggcgacgcggcggagattctcgaaaacggcgccgtccagagcgtgacacacatcctctccgtcctcagctccgcctccatctccttcttctccgaatggaaaaccactctctccatccccgccaaggagatcaccaaagtccacgcggcggacgccgccgccaaatcggcgctcccgccggagaagctcctctactctctcgagtacgccggccgcgacctcaagctcgtgcgcatggccgtgcctctcagagacaccgagaaggaggacctgctcgattacttggaagcctgcatcgatttcattgatcgcggtcggaaggaaggttccgttctcgttcactgttttgccggagtttccagaagtgcggcggttattacggcgtatttgatgagaaccgaacgtctatctgtagaagatgcccttgaatcgttgaggcagagctgtgaatttgtttgtcccaatgatggttttttagagcagttgaaaatgttcgaggggatgggttttaaggttgatcactccagccctatatacaagcgctttcgtctaaaattactatatgagaatcattcccccgggctgtggtgtggtagaggacttgtgctcgagccgaatcggctcgagcggctcgaggtgctatggcacataattgagagacagtaatgatttgttataacactaccgatgtgagaaaatatagatgagaatcatttctcagggttgaggatagacagttctaaacttggtgcagatcctggtatgcctgttgaagtttcttcagaggcagaagaaactactaaagtaggaaataatcgtaggcctacatatcgctgtaagaagtgtcgacgacttgttgcattgcaagaacatgtcatagaccatgttcctggtgagggtgagagagcctttgagttccacaaacggagaggtggcaaccctttcaacaaatctgatgaatttgagtgttcatccatatttattgagcctctacggtggatgaaagctgttgaggaaggtgcaatggagggaaaactgtcctgtgcacattgtgatgcccgtttgggatacttcaattggtcaggcatacaatgcagctgtggaagctggatcactccagcttttcaactccacaaaggccggatagacataagccccatgtaatcatttttgcgtcattttatgcataagggatgcctcctatatttttgtcattgttctaggacttgtattctgcccgaattctccaagctggtccactgccaacaatgaaattgtgtaaggaaggattggagtcttgctctttggacatgctcaacttttccaagctgaactaatgcagttatatggaagggaggactattatagttttacaatttttgtgcatcttccagaatgactttttcgagctatgattggagattattactggtttctagtaaatggtgaggcatgagttgggattccaatattagggcttgttccctcgatgattttaccgtaagcaaggataatgcttttttctacaaaagaaaatgagtgttctccattgtacgtttttctattattttcaatatacaaatttttttcttcgctgtgaagaaattggttacaagttgaaacagacacaagaatataaatccaatgtggatgaatacatccacttgacctgaatgaagatatatttcttgcctcaaaaaaaaaaaaaaaaa

SEQ ID NO: 6756 - DNA, 989 bp, Glycine max
tttaattggcagcttctggaactttgatgccttgttccagccccaacaacacccagcccgtgattcacatgatacattctttttggaaactccttcaacaacaaagatattgccagaggactatgttcagagagtgaggcaagttcatgaatctggtggttatgggtctagagggtatgcatatgactggaagagagaggaagcaaataaaaaccttctgcgaacccatacaactgctgtttcctccaggatgctttaccaattagcacagaaaccatttgcccccaaaaaatatttctctatagatcgtgtattcagaaatgaagcagttgatcgtacacatcttgctgagttccaccaaatagaaggccttgtatgcgatctaggactcactctctgtgacttaataggagtcctacatgatttcttctcacgcttaggcatgaccaagctgaagttcaaaccagcttacaatccatacactgaacctagcatggagatttttagttatcatgaaggctttaaaaaatgggtagaggtaggaaattctggcatgttcagacccgaaatgttgcagccgatgggacttcctgaagatgtccaagttattgcatggggcctttcccttgaaaggccaacgatgatactatacgggatagataacattagagatctctttggacacaaggtggatcttgggcttataaagaagaatccaatatgtcgacttggaattgactaaaatgattcatgtttgtctcttgtatttcttttcatttataaattataatttatttttgtctctaagattaaacactagctgtagattattagttcaatttctatatgtagaattttgatacgacagataaagttatgcccttgttatttttattatgttttgaacaaaatattaatgggaaggaaagttaccaaatttcgattaaaaaaaaaaaaaagtgtctcatgctcagtccttcttttctcct

SEQ ID NO: 6757 - DNA, 916 bp, Glycine max
  misc_feature (5)..(10): n is a, c, g, or t
  misc_feature (16)..(23): n is a, c, g, or t
  misc_feature (29)..(29): n is a, c, g, or t
  misc_feature (31)..(33): n is a, c, g, or t
aagtnnnnnnccagannnnnnnnaaaaanannnattcggcgcgagctcgagccgctttgagaagtccaatgtggtatctccatttgcaatgcatcaacagcagctggccatgctggcacagcaacagtctcttctaatggctgccgctaaatctgctggtggggatcccaagtacctggccagcttacaacaacaacagtctcttctaatggctgctgctgctgctaaatctggtggcacggattccaagtacctggccagcatacaagaacctgggtccaacattcctctccaaagttggctgggtgctggctacccaatgcctggtgcaatgcccatgggtagtcaggaagagttacagaaactcatgcagaccgtgaacatgaatgcagcccattcagctgggagttcagttcaatatccaccatctagctactatgctatgggacaagttgctccctctaatggttccacgccaacggaagcgagcaaacctcaatcagcctctccagcatcatcgaacacttcaaagacagggaacgactatgatttttcctccttaacacaaggaatgtttgcaaaacactgattggcctttgcttaacatcccctgctatgtcatataccacagaagattagttaaaagttacagaaaagtgcactcttcttctttcccttgacccgtatacttgggttgtaaaccatatctagagctactgagccagttcagttttcctgttacgggtgattgcttcatttgtatccataggtgtattcacaataaaatttagtgatatttattatttattccttttctttttcgcggccgccgcttgtgtactgcaactgttcgtttcatgtcacccctccttataattatgtacaaaacataatacgtcaaaaaaaaaaaaaaaaa

SEQ ID NO: 6758 - DNA, 1200 bp, Glycine max
agtccagagcgccgtgtccgccgaccaccacttcaactcctccactgcagcctgcaggaagctactagctagaacccgaataatctgcacctagccatggtgaagctagccacggcgcgggactgccgcgcgtacagcctcggcgccacgggcggcgagacgtcgcgcaaccggcggtgggagtacatcaacgccggggtgtacgtcttcgccgccgtcctcctcctcgccggcttcctggcgcagctgtggccgtgggcggtgtccaccaaggccggcctcgccgtggccgtcgtcgggctgctgggcgtgctggcagtgaacgcgcacgacctgctggcgcacgtcgccggcgtcgattacaaccttggcctggccgggctcgacacccagttcgtgctcgtcgagctcgccgcccccgccgtgcagctcgccggcgccgcgctcaccttggtcgcgctcatcttgttcgaaatccagatggagagagggcaccggcgtggcctggagaagcacggcctgaacctgctcatcgccgggccagcgctgtggtgcctcgggtccatacacaacatgtgccaagtctacgagcgagccaacgggcacgtccagatcctccagaagagcgtgcacatcccgtttctgctcggcagcaccctcttcttcatcggcggcgtcgtcaaccggaacgacgtccacggccactcctcccacagcttcaccctactggggaggagctgggcgtggtactgcctgttcggggagcctgctgttcttggcgggagggctgctgaacctgctcaaggtgttcaagatgcagcagatgggcgggcgggggctggagaagctgcgcggcggcgcgcaggagcggcttagcagggagagggagggcaaggtgcctctcatcctggaggagggacggagggggaagcacggaggcaatgtaggggacacctgggcgccgccggcgccgcggcacgagccgagggctccgccagtcccgccgccgccggagggttcttacaaggacgctgtcgtgagcggcggcaactagtgtgatcttgccgtccacggcggtaacgaataataagagaggacgtgacaaggcagctggtagaggcgaagcattggcttagggcgacgccatcctgtatttcctatctgtacacgatgtcatgtgaattatttcgacttgcggcc

SEQ ID NO: 6759 - DNA, 762 bp, Glycine max
tacggctgcgagaagacgacagaaggggacagcacagatattttctcaaagggaaatagcaccatttggcattttacaatttccaagctatggccaaatcaactgggtcacttgtctttctctctattttcactttgctcctttcttgcaacttaggagggcacttaaagtttgctaatggaatgctagaccaggaaagttggtgcgtagcaaaaccttcaacaagtgatgttgcactgaatgataacattcaatatggttgcattgccttgggtgattgcaaaatgatccaaccaggtggatcctgcttctacccaaacactctgttaaaccatgcctctgttgtcatgaatcagtactatgcagctaatggtagaaacacttggaactgtttcttctctggctctggtctctttgttgtcagtgacccaagttacgctaactgcacctatgcttagcgggaataaaccggaaaaaagatgtcttgtttagagatatttttactattttactctataggctacgtttgatttccaaagcttattactacattctactaggtgctgtaaggaataggaagtttattattcactgttgtggtctttgtatttcatgaagattagtactttgttatttcattacctaatgaaaatatactaggtttcaattataagattacttttatggctatattgttgtctctttatttcatgtttactttgtctataaaaaaaaaaaaaaaaaaaaaaaaaaaaaaaaaaa

SEQ ID NO: 6760 - DNA, 1556 bp, Glycine max
cggctccgggcagctgcgagaagacgatattatcttgcttttgtacaaaatttgaaatagaaataatctgtgctgtggtagtggaagcatcgagaacatcgcagcgatggcgagagtgggtagaatgaagttgggttcacaaggcatggaggtgtctttgcagggacttgggtgcatgggcatgtctgcgttctatggtcctcccaagcctgaccccgatatgattgctctcatccaccacgctgttcaaactggtgtcacttttcttgacacttctgacgtctatggtcctcacaccaacgaactccttctaggaaaggctctgaagggaggggtgagagatgaggttgaattggctacaaagtttggaatcaacgttgctgaagggaagagagagatccgtggtgatccggcatatgtgagggctgcttgtgagggaagcttaaagagacttggcatcgattgcatagatctctattaccaacatcgtattgatactcgtgtgcctattgaaatcacgattggggaacttaaaaaactcgttgaggagggaaaaataaaatacattggtctgtctgaggcctcggcttcaacaatcagaagagcacatgcagttcatccgataacagctgtgcagttggagtggtccctatggtcaagagatgtggaggaagaaatagttccaacatgcagggaacttggtattggaattgttgcatatagtcctcttggacgaggattcttgtcatcaggaccaaagttgcttgagaatttgacacaggatgatttccgacagagtctacctagattccaacctgaaaatttggagcagaataagactatattcgagagggttaatgaactggctgcaaaaaagggatgtactccatctcaacttgcattggcctgggttcatcaccaaggaaaagacgtgtgccctatacctggaaccaccaagattgagaactttaatcagaacattggggctttgtcagtcaaactaactccagaagacatggcagagctcgagtcctttgctgctgcagatgctgtcaagggtggcaggtacatggatggttttgctacatggaaggaatctgatactccaccactttcttcttggaaagctgcatgatgaagtgcattgcttaatgcttatactagtgatccttaagtgtttgctgctgctactttaagaaacatatcagtatgagtggcaagccttcacagttgaaaggaataagccattctagtttctagtaattgatgtgtctttttaagtggtttgaactctgtggcagatggttccatatatgtgtttatgtatgtattaaaatgaacaaagactggctatggcatgacttttacttgagtgtgagttgattattgcctcaacaagttagcttgagcatatcttgcttcagaaggcatgctaatctttgagtacagtgggagtgaattttcacatctacatgaagaataagtctgtatcttttaaaatttgaacagttgatttcgttctaagagttttcagtttcaaaaaaaaaaaaaaaaaa

SEQ ID NO: 6761 - DNA, 1396 bp, Glycine max
ctcgagccgcccccgcgcccgactcaatatagtgcaacctttgctgtggtagtggaagcacacaaagagcacaacgttacatatagtaactatggcgagagtgggtagaatgaaacttggttcagaagggtttgaagtgtctatgcagggacttgggtgcatgggcatgtctgcattctatggtcctcctaagccagagcccgatatgattgcactcatccaccacgccgtccaaagcggtgtcacttttcttgacacttctgatgtctatggccctcacaccaatgaactccttctgggaaaggctttgaagggaggggttagaaagaaggttgaattggctaccaagtttggaatcagctatcctgaagggaaatgggagatccgtggtgatccagcatacgtgagggatgcttgtgagggcagtttaaagaggcttggtatcgattgcatcgatctctattaccaacatcgtattgatactcgtgtgcctattgaagtcacgattggggagcttaaaaaacttgttgaggaaggcaaaataaaatacattggtctgtctgaggcctcggcttcaacaatcagaagagcacatgcagttcatccgataacagctgtgcagttggagtggtcactatggtcaagagatgtggaggaggaaatagttccaacatgcagggaacttggtattggaattgttgcatatagtcctcttgggcgaggattcttgtcattgggaacaaagttgcttgagaatttggcacaagatgacttccggcagactctgcctagatttcaacctgaaaatttggagcagaacaagacaatattcgcaagggttaatgaactggctgcaaagaagagatgtacaccatctcagcttgcattgtcctgggttcatcaccaaggaaaagatgtgtgccctattcctggaaccaccaaacttgagaacttcaatcagaacattggggctttgtctgtcaaactaacaccagaagaaatggcggaacttgagtcccttgctgctctagatgctgtcaagggtgatagatatgcggatgatggtttatctacgtggaaggactctgaaactccaccactttcttcttggaaagctgcatgatgaagtgcattgcttaatgcttatacatgtgatccttaaatatttgatggtgctactttaagaaacagattagtccgagggacatgccttcggattcaaaaggaatatggctatataagcctttatagtttctagcagttgatgtgtctttattagtggtttgaactttgaactctatatgtgtacgtataatatcaaaataaatgatggttatggcctgacttttacttaacaaaaaatgattctacgaataatatatcttacttcagtagc

SEQ ID NO: 6762 - DNA, 2646 bp, Glycine max
actcctttcccccctcccgttccaactttattgtgtttaaacaattacctagaacatcctaatcaaaaccgaggctctgagaatccctaactccttctttttcttcttagattttcctttcagatttgattcagattatgctttttcttcttccatctccttgtgcaaattaagataaaataaaagaaagatattaggatgaagagagggaacgaggaagagaagttgggggggcccatgttcccaaggctgcatgtgaatgatgcagagaaaggagggccaagagcaccaccaaggaacaagatggctctttatgaacagttcagtattccatctcagaagttcaatccacgccttcttccacgaaaaccaaattcttcttctaacatagttcctcccccaacccagggaaatggccatgagagaagttatgtctacccagttcgtttctcttcacaaacacccactcatcgagctgaaagttatatttctcgccaatctgatgatggatcaaggtcgaacacttcattggtgcaacttgaacggagaaaaaaagtagatgatgacattcacgtgtacacttgctcggggattgatcaatctaatgataaaacgatggaaagtgtagatgggaaaaaattcactcctttcggtgctaggaatttttgttattcagttgctgtgcaaaatgatggtgacaaggatccaacacaatttagctcctgctcccttcctgttgatctgagaaaagatgtgaggaatgggaatgaggctaatccacatgtaagctcaagtagacggaaaccaaaaatgtcggtcaaaaacaattcaagtggagaaattatcgacagtctaatgatgcaagccaaggtgattccaaatctagaggatcaagattattctgtgccaaatataagcaggttacatcaggatgatacttgcctacagaaggagtgtgtggctgggtcccaatccaatgacgttgagcatggtgatgatctcctgaactctacaagggatattgataatggaaatgcccttgtaccaagaggctgttttcattctgcagcaaaccaaacacgtccacttgaggctaccaatgacgctgaatatcacgatactgggactggaggcccaatacagaagggaaattttgatgaaagggacaacatttccaagatctccactgtaacaaatttatcaagtctgattgtttctcctgatgatgttgtagggatattaggtcaaaaacatttctggaaagcaagaagaaaaattgccaatcaacagagtgtgtttgcagtccaagtgtttgaactgcacagactgattaaggtccaacagctaattgctgcatcaccggatgttttgcttgaagatgttgctttcatgggaaaatttcctctgacggaatctcctcctaaaaatatctcattggaagtggttgttgagcctcagcaacaaaatcctaagcggaaaaacgattctgaaaagctaaaccataaaacagaatgttcagctgagaatgcagttgcaaaaagaacatctttttcgtccccgaaaaatggtagccaccttgcaaatcacacccccttttcaggaactccacaccaggcaaatgtagcttctgataataaaacaagtccctggtgtttcaatcagacacctggacatcagtggttaattcctgtcatgtctccttccgaagggcttgtctacaagccatatcctgggcccggatttaagggaacaatgcatggaggatgcggcgggccattcggacaagcacctctcagtgctactttcatgaatcccgcctatcaattcccagcttctcatccagtagttggggtttcaccgtttgtccctccggccagtcacacctacttcgctccctttggcatgccggtaatgaatcaagcaacatcaggatcagccgttgaacaggtgaaccagtttgctgcacaaggttctcatggtcaaaatggtcattcatctgtagagggagccgattttaacactcatcataaccaaagctcatctaacttgccagttcagaagaatggagctaggttacatgttaaaaaatctcaggccctgaaggagagagggttacaagggagcacaagaagcagtcctagtgaaatggcacagggaatcagagcagggaaaattgctgacggaagtgatgcacagtctctttctcttcacgctgttgaaaccagacagcaaacacaagccatcaaagttgtaccccataaccggaaatccgcgacggaatcagcagctagaatttttcaatccattcaagaagagagaaaacagcatgatttggtctagtgctgtttgtggaggtggagttatttgggttgattttgtacaatgcgtcaagtcttgtactttgttgtttgataatatgtatcttgccgttttattctacttttccttttggttgtcctttttattgcaaaaatattcgaatgtagatattgttaaaactactacatggaatgctaaaattcatcaaatgtaatattagtggatggtgtctccgtgtatagtgataattttcattttgctcaattaaattggaggtttcaacccccctgcggccctggtcccgtagtgaaattgttgtcggaagcc

SEQ ID NO: 6763 - DNA, 958 bp, Glycine max
tccctttgcccgggttttattccaaaaacctttaatgttatttccccgggaagaagaagccaattgaagctttccagggttaagaatgaattttcctccaatcccattttatccaaaacttgtgatttcaaacctttttaaatttgaagaagccaggttcaacggatccattttggaaaatccagagactagcttgcccctgggttttaagctgctgaagggccctggggtgatgtctgatgatgtagcattttggagtcagcttattagagattccatggagctcccagctcaagaaaggattcgggccaatctgaagatcgcggattagatattatgaaaccactgcaggtgagagttgctgtctcgagggaagcacgtgtactggcggcaacaacttcaccagaagctgaattatcagaaatgaatcagaatgatcaagcttcatcagttagaaatcaaagagaagtagatccagaagaacaagattatgaactaaatgaagctgtgaatttagaaggaaatggtgttttagttatcaaacaaagtagtgaagaaagctcaatgattgtagaccaatcaaacccttcttcccatactgccactgaggaaccctgaatagggcttcttcccatttattttgctcctctaacccccataacttctgaaagatttcaggaagttatcattttcattgcagagctaacaatatatgtataggaaacatcccaatgtaagagagtttgtagaacagcatcattccaactccgatgcttcaattcttttgagaaccacaaaatgtatagtaatttaacaccagtaacataacttttatttcttgtgggaagtcctacacagtttaagcctttatggtgatatcaaactctagaggttaaaatgtaaaaatggcgtgtgaagtattttttatgatgataatgcatcatgttataatcaaaaa

SEQ ID NO: 6764 - DNA, 1275 bp, Glycine max
gaattaaagggagggtaccagctgtcaaatagggctttccacacactttcaccaatttataaattatttgcagttacactccaagtctactttttctttggcagcttagccttcctattttggaaaccctcttcactgctctcccaccttttttgtgtgtatgtgtatgagcttctcttctactctattcactgcactcttattaataaatatcagtgcttggaaagcagaagagaagatccatagctaagatagatctcgagatgggtcgtggcaagattgagataaagttgattgagaaccccaccaacaggcaagtcacctactccaagcgaaggaatggtatcttcaagaaagctcatgaactcagtgttctctgtgatgccaaggtttcactcatcatgttctctaaaaacaacaagatgcatgaatacattagccctggcctcacgacaaaaaagatcattgatcagtatcagaagactttgggggatattgatctgtggcattctcactatgagaaaatgcttgaaaacttgaagaagctgaaagatattaacaataagctcaggagacagatcaggcataggataggtgagggcttggacatggacgacatgagcttccagcaactgcgcactcttgaagaagatatggtttcatccatagggaaaatacgcgaacgaaagtttcacgtgatcaaaactcggactgatacctgtaggaaaaaggttaaaagcctgaagcagatgaatggaaatctgctgcttgaacttgaaaagtgtgtgatccatccacaatttcttttgcacgatgaaggagacgaggaatcagcagcagcagcagcagcagcagcagttgcactggccaacggtgcctccaccctgtatgcattctgtcatcagcaccattctcatctgaaccttttctcccaccattctaatggagaagagcaaccctttaaaactgatcatgaccttcgccttgcttgatccagtgcaacaattaactagcaataatgtaaattaactagctagccagcactaagcacttgttatttatgctttaatttgtattaattggacctgttaaacccaactttgcttgcaacctctctagtttctatccaggtagagaattagctaagcttatatagtgtttggcaagagcgtgctatgaaaaacagaaagactgtactttatttgttattataagtttacattgagtgattatgtaaaaaaaaaagaaaaaaaaaaaaaaaaaatcctgcagccg

SEQ ID NO: 6765 - DNA, 763 bp, Glycine max
gttaatgagaagatataaaactctggtgaggaaattacaatctctcatttcaggcagtcttttggggtttaaccgtgtacctctcacttcttctacgaccatcatcttccttccttccttcaatcgttctaactcttagcagccatggcgagcaccaaagttcagagggttatgactcagcccattaacttgattttcaggtttcttcagagcaaagcacgcattcagatttggctatttgagcaaaaggatttgaggattgaaggccgaatcattggttttgatgaatacatgaatttggttcttgatgatgctgaagaagtgaacatcaagaagaagagcagaaaaacattagggaggatccttcttaaaggagataacataactttaatgatgaacacggggaaatgatgaacactccttgacagttgtaaactatgttcctatcaaacaagaaggcataattatctttcccttgggtttgtattcatctaacaaactctcaaaccggaagctgatgattttatgattaaggaagtatagtaccaatattacaacatttccctcatttgttagctttctccttttattatgtttattttgtatcttattcaatcctttatagaagtttgtttgatcaatttctttgggatgtctttttattgtatttgccaaggttttgcaagaggcaaatgtctattatgctggatatttaatattgcattttgataacattcacttctattaaaatggactgcttcca

SEQ ID NO: 6766 - DNA, 826 bp, Glycine max
tccgaggttaggctatatgaaagttgtttttttatcatatatgtgtatatttatatgagtacttgttgtctatctttaactccgagtatcctttttcttgataggatttttgtctgaaacagagagtgagagagagggcaaaaccctagctttggagtcttccctcccatctcccacttcttgcaatctctgcagccatggcgagtaccaaagttcagagggttatgacccaacctattaacttgattttcaggtttcttcagagcaaagcgcgcattcagatttggctttttgagcagaaggatttgaggattgaaggccgaatcatcggttttgatgaatacatgaatttggttcttgatgatgctgaagaagtgaacgtcaagaagaaaagcagaaagacattagggaggatccttcttaaaggagacaacataaccttgatgatgaacacggggaaatgattaacactctggcacagttgtaaactccgttcctatccaacaagaaagaaaaattatctttccctttccagtttaattactgtttctcttgttaacatcttgaatatgttgtgggagaaatattatcatgtatgaatctgtgaatttttaatactctagataaattcttagttgagcagtttaacatgttatattgccatcagtttgcctctattatatttgtgcctggaagcttgtgattttatgactgaggaagtatagcatcaatcttaacctcatttagtggatttctccttttattatgtttatatcatatcttattcaatcctttataggagtttgttagattaaaaaaaaaaaaa

SEQ ID NO: 6767 - DNA, 618 bp, Glycine max
  misc_feature (593)..(596): n is a, c, g, or t
ttcgggagttgtctgcaacagagtaagagggcaaaaccctagctttagtgtcttcccgcccatctcttgcaatctcatagattttagcagccatggcgagtaccaaagttcagagggttatgacccaacctattaacttgattttcaggtttcttcagagcaaagcgcgcatccagatttggctctttgagcaaaaggatttgaggattgaaggccgaatcattggttttgatgaatacatgaatttggttcttgatgatgctgaagaagtgaacgtcaagaagaaaagcagaaagacattagggaggatccttcttaaaggagacaacataaccttgatgatgaacacggggaaatgatgaacaacgctggcacagttgtaaacactgttcctatccaacaggagagaaaaaaatatctttccttttccagtttaattactgtttctcttgttgaaatcttgaatatgttgtgagagaaatattatcatgcatgaatctgtgaatttttaatacactagatgaattcttagttgagcagtttaacatattatattgccttcagtttgcctttaaaaaaaaaaaaaaaaaaannnnaaaaaaaaaaaaaaaaaaaaaa

SEQ ID NO: 6768 - DNA, 1755 bp, Glycine max
tcgagtcagctacgtaggccccccccaagttacaagtactagtttgtttgttcccctttctaccgacctaacacgagaggagaggagagaagagaggaagttttggggtttgaatctatagaatagaatcaaaccaaattgaaagaagatcgatcgatcgatcgatggctctggtcggagttgaagtgaagcatgcggcggagggcgcaccggaggagaattgctccgccaagcccaccaagcagggcgagggcctccgccactactattctcacaacatccacgagcatcagctccttctccgtcaaaagacgcataacctcaaccgtcttgaggctcagagaaacgagctcaattccagggtgaggatgctgcgcgaagaattacagcttttgcaggaaccaggctcttatgttggtgaagttgtcaaagtcatgggcaagaacaaagtccttgtcaaggtccacccagaaggaaaatatgtcgttgatattgacaaaagtattgacattacaaagattactccatccactagagttgcacttcgcaacgacagttatgttcttcacttagttctgccaagtaaagttgatccattggtcaatctgatgaaagttgagaaggttcccgattctacttacgacatgattggtggtttagaccagcaaattaaagaaataaaagaggtcattgagttaccaatcaaacatcctgagctgtttgaaagtcttggaattgcacaaccaaagggtgtcctgctctatgggccacctggtacaggaaaaacattgttggctagggcagtggctcatcatactgactgtacattcatcagggtgtctggttctgaattagttcagaaatacattggagaaggttctagaatggtcagggaactttttgttatggccagggaacatgctccatcaattatcttcatggacgaaattgacagtattggatctgctcggatggaatctggaagtggcaatggtgatagtgaggtacagcgtactatgctggaacttctcaatcagttggatggatttgaagcttcaaacaagatcaaggttttgatggccacaaatcggattgatatcctggatcaagccctccttagacctggacggattgaccggaagattgaatttccaaaccctaatgaagagtctcggctggatattttgaaaatccattcaagaagaatgaatttaatgcgtggcattgatctgaagaagattgccgagaagatgaatggagcatctggtgctgaacttaaggctgtttgcaccgaagctggaatgtttgcattgagggagcggagggtacacgtgactcaggaggattttgagatggctgtggccaaggtgatgaaaaaggagactgaaaaaaacatgtcattgcggaagttgtggaagtgatttttatttcatgtttgtggtgcacattattatcctgcgaagatgggcagcgaacacaccttagggttatttcaatttacagtggcattggatttcattttgcttaagtttaccaagttatgtaccgaatcatatgattctttctttgagtttttccttgtctgtgtcttcggacggcacactacatttatagagtatttttaaaagatttatattcaagaccactaaaaaagtagtctctaatctaaaactactgaaaatcattggggcacccccatgtcaaaacccattctttttcaaacatcggacaaatggtagtaaaagcttacctacc

SEQ ID NO: 6769 - DNA, 1906 bp, Glycine max
  misc_feature (1748)..(1755): n is a, c, g, or t
tgctcgagccgaatcggctcgagggctgcgagaagacgacagaagggggttttgttcttctgtctaccgacctaacccaagacgagagaatagaggaagcttggggtttgaatcgaatcgaatcgaagcgattcatcgatcgatcgatggctcttgtaggagttgaactgaagcatgcggcggagggcgtaccggaggcgaattgctccgccaagcccaccaagcagggcgagggcctccgccactactattctctcaacatccacgagcatcagctccttcttcgccaaaagactcataacctcaaccgtctcgaggctcagagaaacgacctcaattctagggtgaggatgctgcgcgaagaattacagcttctgcaggaacccggctcttatgtcggtgaagttgtcaaagtaatgggcaagaacaaagtccttgtcaaggtccacccagaaggaaaatatgttgttgacattgacaaaaatattgacattacaaagattactccatccactagagttgcactccgcaacgacagttatgttcttcacttagttctgccaagtaaagttgatccattggtcaatctgatgaaagttgagaaagttcccgattctacatatgacatgattggtggtttagaccagcaaattaaagaaataaaagaggtcattgagctaccaatcaaacatcctgagctgtttgaaagtcttggaattgcacaaccaaagggtgtcctgctctatgggccacctggtacaggtaaaacattgttggctagggcagtggctcatcatactgactgtacattcatcagggtgtctggttctgagttagttcagaaatacattggagaaggttctagaatggtcagggaactttttgttatggccagggaacatgctccatcaattatcttcatggatgaaattgacagtattggatctgctcggatggaatctggaagtggcaacggtgatagtgaggtacagcgtactatgctggaacttctcaaccagttggatggatttgaagcttcaaataagatcaaggttttgatggccaccaatcggattgatatcctggatcaagccctccttagaccaggacggatagaccggaaaattgaatttccaaaccctaatgaagagtctcggctggatattttgaaaatccattctagaagaatgaatttaatgcgtggcattgatttgaagaagattgccgagaagatgaatggagcatctggtgctgaacttaaggctgtttgcactgaagctggaatgtttgctttgagggagcggagggtacacgtgactcaggaggattttgagatggccgtggcgaaggtgatgaaaaaggagactgaaaaaaacatgtcattgcggaagttgtggaagtgattctcatttcatgtttgtggtgcacattgtcctgcgaagatgggcagagaacacacattagggttatttcaatttacagtggcattggctttcgttttgcttaactttacccaatcatgattctttcctcgagttcttccttgtctgtgtcttaggacggcacactacatttatagagtatttttaaaagatttatattcaagaccactaagtattctaaaactagtgaaattattggcatccacaaggatattaacaaaaaaaaaaaaaaaaaaaaaaaaaaaaaaaaaaaaaaaaaaaaaaaaaaaaaaaaaaaaaaaaaaaaaaaaaaaaaaaaaaaaaaannnnnnnnaaaaaaaaaaaaaaaaaaaaaaggggggggccgtttaaggggacccaggttaccgccccgggccgggcaaggaaaaactttttttttggggcacccaaattcaatttccggggccggggttaacaaccgggggggggggaaaacccggggg

SEQ ID NO: 6770 - DNA, 1034 bp, Glycine max
atataaaatacggcgccgcgccttacctcactttccgaccacaaccatgtcagcgttcatttcccacaaccttaaacccggcggcatcatggtgtccccttctctgcaccaccgttcctcattccctttgcaactttctttgaaagcacccttctctgcttcccatcctttagtcctcacccgaagactcttccttccttcggtttccggcatctgggacgctctcaccggcggcaacaacaacaatgcccgcgaagccgttctcgcaattcgacgcggaatgcttcttttccgccagggtgatgtttcggggtctcttgcggagtttgacaaggcaattcagttggaccctcgtcaaaaggcgtatctttggcaaaggggcttatcactttactaccttaatcgatttgaagaggcagctgagcagtttcggttagatgttgcccaaaatccaaatgacactgaagagtccatatggtgctttctgtgtgaagctcaactgtttggagtggatgaagcaaggaagcgatatcttgaggttggcagagacccaaggccagtcatgcgggaagcatataacatgtttaaagatggtggggatccagaaaagcttgtagctgcattctctggtagcagagaaggtgaatatttttatgcttcattatatgctgggctttattacgaatctcagaacggaacagatgctgctaaagttcatatagttgctgcatgccagtctccttatgggcaaaggtctgatgattatatggcctctcttgccaaggttcactgtcgctgtcgaaattgggtcttcaactaaaacttttttcagtgtgtccattgtgcacgacgaagctcattcataagtttctctatacactactcacagcttcttgtgagttactgtgctactggaacggttaaaagaatttatcatattccttttttccttaaccttttcactttgattttgtggtctatatgaatattagtagactggtagaaagtttttaaacatgagatttcttttagcc

SEQ ID NO: 6771 - DNA, 670 bp, Glycine max
ccgggagaatcggtgcctatgagaggtcggtttatcagatgagatttgtgtgtgaagagaatagcgaatagcgaaggtggaaatgtcgaaaggcggttcgcttcaaaaggacgtgccatggagagcatcgtcttcttctgcgaagcccatccccaaaattcaccacagtccccttcttcgcgtatcccaaacacctgtttccgattacggtatctccgtcatgaggcatccggaccctataggtggtggattgggtcatgaggccatagtggaaccagctggccctgattgtctcgtacctggccagaaaatgcccatccaattacttggcctccaggtctggccaatccatgttgacctgaagtttttggaaccagttgggcgagaacttaagatgcttggaaagttcatggatgacgctgttgaactaatgaacaaatcattcatagagcgttgataatatgggctttgtgaagagacgaagtagccgctgtttgattctttttttatgggatgggaaatatagacaagcagagtgactgtaatgtaacatttgactcattttgtatgcaaaagagaattgcaatgcgagatagttttgttcggtactaattcccttataatgccaattagaaactgtttctgaaaataaaaaaaaaaaaaaaaatat

SEQ ID NO: 6772 - DNA, 1652 bp, Glycine max
tcgagtccgcgtcgttacgcccccccccccccgacacacacacaaattcacacaaacataaaaaaaaaaaaaaaaaaaaaaaaacacacacacacacacacactctcatacacacgttgtcgcgcacacattccttcattccgcagcaacaaacaaacatcttttaccttaaacaacaatggccgatgccgaggatattcaacccctcgtttgcgataatggaaccggaatggtcaaggctggttttgctggagatgatgcaccgagggctgtgttccctagcattgtggggcgtccacgtcacactggggtgatggttgggatggggcagaaggatgcgtatgttggggacgaggctcaatccaagaggggtattttgactctcaaatacccaattgagcatggaattgtgagcaattgggacgacatggagaagatctggcatcacactttctacaacgagcttcgtgtggctcctgaggaacaccctgtgcttctcaccgaggcacctcttaatcctaaggctaatcgtgagaaaatgactcagatcatgtttgagaccttcaacacccctgctatgtatgtcgctatccaggccgtgctttccctttatgctagtggccgtacaactggtattgttctggactctggagatggtgtcagtcacacggttcctatctacgaaggttatgccctcccacatgcaatcctgcgtttggaccttgcagggcgtgatctcactgatgccctcatgaaaatcttgactgagcgtggttacactttcaccacatctgcggaacgggaaattgtgagggacatgaaggagaaactggcctacattgctctggattatgagcaggagttggaaactgccaagaccagttcagctgttgaaaagagctatgagctacctgatgggcaggtgatcacgattggcgctgaacgattccgatgccctgaagttctgttccagccatccatgattgggatggaatctcctggtatccatgagacaacatataactctatcatgaagtgtgatgtcgacattaggaaggatctctatggtaacattgtcttgagtggtggttccacaatgttccctggcattgctgataggatgagcaaggagattacagcattggcaccaagtagcatgaaaattaaggttgtagcaccaccagagaggaagtacagtgtctggattggaggctccatcttggcttccctcagcaccttccaacagatgtggattgcgaaggcagagtatgatgaatctggaccatcaatcgtacacaggaaatgcttctaagttataatcatggagtgtgaaagctggaccagggaaattactatttatacaaatactacaaaaataccatctagtggttgaggaactttcatttcctactctttaccatccttttatctatcttgtttttgtgttttcctttctttggtatgttgagataagagcatgaaggctagcaagatatgtaagattcttttttttttctcccgttctgttgtagaagagatgtgaattgttacctatttggtttggttgaattaacaaattcttttcatgaagtattctgattaacatagtggtacaaaaaaaaaacaaacacctaaaaaaaaaaaaaaaaaat

SEQ ID NO: 6773 - DNA, 1569 bp, Glycine max
tatcggctcgggaggacgacacaccgggacacatacatcatcaaaaaaacacacacgacacactcccatacacacacgttgtctcgcacacattccttcattccgcagcagcaaacatctttaccttaaacgacaacaatggccgatgccgaggatattcaacccctcgtttgcgataatggaaccggaatggtcaaggctggttttgccggagatgatgcgccgagggcggtgttccccagcattgtggggcgtccacgtcacacgggagtgatggttgggatggggcagaaggatgcgtatgttggggacgaggctcaatccaagaggggtattttgactctcaaatacccaattgagcatggaattgtgagtaattgggacgacatggagaagatctggcatcacacgttctacaacgagcttcgtgtggctcctgaagaacaccctgtgcttctcaccgaggcgccgcttaatcccaaggccaatcgtgagaaaatgactcagatcatgtttgagaccttcaacactcctgctatgtatgttgctatccaggccgtgctttccctttatgctagtggccgtacaactggtattgttctggactctggagatggtgtcagtcacacggtgcctatctatgaaggttatgccctcccacatgcaatcctgcgtttagaccttgcagggcgtgatctcactgatgccctgatgaaaatcttgactgagcgtggttactctttcaccacatctgcggagcgggaaattgtgagggacatgaaggagaaactggcctacattgctcttgattatgagcaggagttggaaactgccaagaccagctcagcagttgagaagagctatgagctacctgatgggcaggtgattacgatcggtgctgaacgattccggtgccctgaagttctcttccagccatccatgattgggatggaatctcctggtatccatgagacaacatataactctatcatgaagtgtgatgtcgacatcaggaaggatctctatggtaacatagtcttgagtggtggttccacaatgttcccgggtattgctgataggatgagcaaggagattacagcattggcaccgggtagcatgaaaattaaggttgtagcaccaccagagaggaagtacagtgtctggattggaggctctatcttggcctccctcagcaccttccaacagatgtggattgcgaaggcagagtatgatgaatctggaccatcaatcgtacacaggaaatgcttctaagttataacaatggagtatgaaagatggaccagggaaattactatttatacgaacactacaaaaataccatcaagtggttgaggaactttcattttcctaccctttaccattccttttatctatcttgtttttgtgttttcctttctttgatatgttgagataagagcatgaaggctagcaagatatgtaagattcatttttttttatcccgttttgttgtagaagagatgtgaattgttaccgatttggtttggttgaatcaacaaattcttttcctgaaaaaaaaaaaaaaaaata

SEQ ID NO: 6774 - DNA, 1602 bp, Glycine max
agccttccggttcgttaaaaatagaaagcacaacacataagctacgcacacgtagcttccttcatttcggaaattctaagcaatcaataaaagatggcagatggtgaggatatccaacctcttgtttgtgataatggaactggaatggtcaaggctggatttgctggagatgatgctccaagggccgtgttccctagcattgtgggtcgtccacgccacactggtgtgatggttggaatggggcaaaaggacgcatatgttggtgatgaggctcaatccaagaggggtattttaacactgaaatacccaattgagcatggcatagttaacaactgggatgacatggagaagatctggcatcacactttctataacgagctgcgtgtggccccggaagagcaccctgttctcctcacagaagcaccacttaatcccaaggccaaccgtgagaaaatgacacagattatgtttgagaccttcaacactccggctatgtatgttgccatccaagcagtgctttccctttatgctagtggccgtacaactggtattgttctggattctggtgatggtgtcagccacacagttccaatctatgaaggctatgccctgccacatgcaatcctgcgtttggaccttgcggggcgtgacctcaccgatgccctcatgaagatcttaaccgagcgcggctactctttcaccaccactgccgagagagaaattgtgagagatgttaaggaaaagttggcctacattgctcttgactacgagcaagagctggaaacagcaaagacaagctcagctgtggagaagagctacgagctacctgatggacaggtgatcacgattggcgcggaacggttccgttgccctgaagtgctcttccagccatccatgattgggatggagtctcctggcatccatgagaccacatacaactccatcatgaagtgtgatgttgacatcaggaaggacctctatggtaacattgtgttgagtggtggctcaacaatgttccctggcattgctgataggatgagcaaggagatcacagcattggcaccaagtagcatgaaaattaaggtggtggctccaccagagaggaagtacagtgtctggattggaggctccattttggcatccctcagcaccttccaacagatgtggattgcaaaggcagaatatgatgaatcaggcccctcaatcgtccacaggaaatgcttctaatgatgcagagagtccaggaaattttaatatatactccgcactacagaaataccataaagtggttgaggaagttttattttctattctttaccattttttaaccatgttttcgtgtttcctttattaatatgttgggataagagcatgaaagcaaagcatgatatataagattttttttttttcattttattgtagaagagatgtgtattgttattgatttgatttggttgaatcaaattctcttaagcattttgattagaatagtggtatgtattttgatttattgttctgtgaacgaagagtcattcttgttcagtgttcacggaccaatcttttatataatatacttcatatttggcccactaaaaaaaaaaa

SEQ ID NO: 6775 - DNA, 1524 bp, Glycine max
aattccacacgcgtgaaataactcacactatttcatttactcactcacagggcgaatagctccacgcttctcgttccttaaattcctcttcccaagctctctctctctctctctctgcgtgttttcccttcttgtccattcatatatatcacaatttcaactgcaaattttgaacaaaacttaattaagaaatccttctccggagccatggcagatctcaagtccacattcttgaacgtctattctgttctcaaatctgaactcctccacgaccctgcttttgagttctccgatgatgctcgtaattgggtcgaccggatgctggactacaatgtgccgggaggaaagttgaaccggggactgtcagtaattgatagctacagattgttaaaagaaggacaggcattaaatgatgacgaaatttttcatgccagtgctcttggttggtgtattgaatggcttcaggcatattttcttgttcttgatgacattatggataactctcacacacgccgtggtcagccatgctggtttagagtgcccaaggttggaatgattgcagccaatgatggagttctactaagaaaccatattccacgtatccttaaaaagcacttcaggggaaagccatattacgttgatcttcttgatttgtttaatgaggttgagttccagactgcttcaggacagatgatagatctgatcaccacactggaaggagaaaaagacctgtctaaatacacattaacactgcatcgacgtattgttcagtacaagactgcatattattccttttaccttccggttgcatgtgcattgctcatggcgggtgaggatcttgacaaccatgttgatgtaaagaacattcttgttgagatgggaacatactttcaagtacaggatgattatttggattgttttggtgatcctcaaacaattggaaagataggtacagatattgaagatttcaagtgctcttggttagttgtgaaagccttggaacttagtaatgaacaacaaaagaaagttctacacgagaactatggtaaggcagatccagaaaatgttgctaaagttaaggccctgtataatgagcttaatcttcaggctgtatttgaggagtatgagaacgggagctatgcaaagcttgtttcctccattgaggctcatcctagcaaagcagttcaagctgtattgaagtcctttttggctaaaatttacaagcggcagaagtagagtcaacttaaggtgaggaccaaaattgttgaacatgcaatagaaactagagttgtgatttctatctagagcagtatcatgttccgtggcttggaatttttcaaaaattgattttcttcttgtcatttttttttaatttttgttttttagtgataagatcttgttgtattttatcttctaatctgtcttgggatacttgtttgactatttataatttcttctgaaacttttggttcattattattagagttctgttatttatataatatattttcagtgaaaaaaaaa

SEQ ID NO: 6776 - DNA, 921 bp, Glycine max
cccacgcgtccgttcgtcagcggcgtacgccccgcgtctatttcactgcgaaaccagcaggggctccaattcctactcttagccgcagatctctcagggcttgcatcttctcaggtaagttgtgaagatgtacacatcaaggaagaaaatccacaaggataaggatgctgaaccaactgagtttgaagagtcagttggacaggcattgtttgatctggaaaataccaaccaggagcttaaaagtgatctgaaggatttatacataaactcagctgtgcaagttgatgtttctgggaaccgcaaggctgttgttattcatgtcccttacagattaaggaaaggtttccgtaagattcatgtcaggcttgtcagggagcttgagaaaaagtttagtggcaaggatgtaatcttggttgccacccgaaggattttgaggccaccaaagaagggttctgctgctcagcgtcctcgtagtcgcactcttactgctgttcatgaagcaatgctggaggatgttgtattgcctgctgagattgttgggaagcgtgtgaggttccgaattgatggatccaagattatgaaggtttacttggacccaaaggagcgaaacaacactgagtacaagttggagacttttgctgcagtgtacaggaagctatctggaaaagatgttgtgttcgagtatcctgtctcagaggcttagtttcacttttgttagctttttgaatttgttcggagaattgcatatggagtatgctggttaaaattttggtgacaaattgactttcaatctggaattcgttttctgatttttggaagtactatttagtatgagctttatttattataaaattaagtttcttttattcgcaaatttcacaattattatctttttctggaattaaaaaaaaaaaaaaaaaa

SEQ ID NO: 6777 - DNA, 909 bp, Glycine max
ccacgcgtccgtacggctgcgagaagagtttttcttttcactgcgaaccagtagggactcccattccgactcttagccgccgatctctcagggcttgcatcttctcaggtaagctgtgaagatgtacacatcaaggaagaaaatccacaaggataaggatgctgaaccaactgaatttgaagagtcagttggacaggcattgtttgatctggaaaataccaatcaggagcttaaaagtgatctgaaggatttatacataaactcagccgtgcaagttgatgtttctggaaaccgcaaggctgttgttattcatgtcccttacagattaaggaaaggtttccgtaagattcatgttaggcttgtcagggagcttgagaagaagtttagtggcaaggatgtaatcttggttgccacccggaggattttgaggccaccgaagaagggttctgctgctcagcgtcctcgcagccgcactcttactgctgttcatgaagcaatgctggaggatgttgtattgcctgctgagattgttgggaagcgtgtgaggtaccaaattgatggatccaagattatgaaggtttacttggacccaaaggagcgaaacaacactgagtacaagttggagacttttgctgcagtgtacaggaagttatctggaaaagatgttgtgtttgagtatcctgtctcagagtcttagtttcacttttgttagctttgagaatttgttcggagaattgcatatggagtatgctggttaaaattttggtgacaaattgactttcaatctggaattcgttttctgatttttggaagtactatttctggttttttcaatgtagtatttgagctttatttattataaaattaagtttcttttaaaaaaaaaaaaaaaaaaaaaaaaaaaaaaaa

SEQ ID NO: 6778 - DNA, 671 bp, Glycine max
ttttttttttttttttattttaaattccttaataagtgataaatgtttccaagattcttaaattggacaatatggttcataaaaaagagaacaaaaacctgcaatgtaaactaaagttctgcgtaatgatgtgcgacaaacccaggagagcacacaaacgtgctctaaataatgttcagtaattagttatagatgcatagcaattattcctagcaacaacaaaatcttgtttcaagatgaacatcatatcatagaatgtccctgcaatcccatctatgcttcctgatcttcaagtagtctgcttttggcccgaaaattaattgtagaaagaacatcaaggaatcctagagatgctagctaccttcgggaatccaagcgctcgtgcggcttgaaattgaaagcatggaattcatgagcgcagaagcagtggccgtgtggtacggcatcatcgattcaacacacgaactcaattccacggggaacctgagagtggattgggactgcgagagaggcttattggacgcgatacggaacggagaacgaaccggtttggattccgatgcgacgcgaaacgctgaccggctggcggagcatgatcggaatatcgatctggcggcggcggatgccattttcgcgatcggaatcgttttggatcggcgtagggttttgct

SEQ ID NO: 6779 - DNA, 585 bp, Glycine max
gcttgaatgggacaatttggttcataaaaaagagaccaaaaacctgcaatgtaaactaaagttctgcgtaatgatgtgcgacaaacccaggagagcacacaaacgtgctctaaataatgttcagtaattagttatagatgcatagcaattattcctagcaacaacaaaatcttgtttcaagatgaacatcatatcatagaatgtccctgcaatcccatctatgcttcctgatcttcaagtagtctgcttttggccttcgggaatccaagcgctcgtgcggcttgaaattgaaagcatggaattcatgagcgcagaagcagtggccgtgtggtacggcatcatcgattcaacacacgaactcaattccacggggaacctgagagtggattgggactgcgagagaggcttattggacgcgatacggaacggagaacgaaccggtttggattccgatgcgacgcgaaacgctgaccggctggcggagcatgatcggaatatcgatctggcggcggcggatgccattttcgcgatcggaatcgtttgggatcggcgtagggttttgcgaagtctaaaaccctgactctt

SEQ ID NO: 6780 - DNA, 794 bp, Glycine max
cggctcgagcggctcgagaccgccgcgcggcgcccccatgcgcgggtgccgaaaaccctaacaacacaggcgcagagcgtgatccattgacgaagatggtgcagcgtctcacctaccgcaagaggcacagctatgccaccaaatccaaccaacacagggtcgtcaaaacccctggtgggaagctcgtttatcagaccaccaagaagagggccagcgggcccaagtgccccgtcactggcaagaggattcaggggattccacacttgaggcctgcagagtacaagagatcaaggttacccagaaaccgtaggactgtcaaccgtgcatatggcggagttttgtctggaagtgctgtcagggagaggattatccgagctttcttagttgaagagcaaaagattgtgaagaaggtcttgaagatccagaaggcaaaggaaaagcaagcctcaaaggcttgaatttgaacaacacaatgagacatctttttggaggacttttaggtttgagtggttatagttaatcacaaattttattagagttgtcatgttaattgtcttttattattttgcctgtttgaactctttctagagcaagtgttaactttgtcgacaatgtcattatgatacagttttgtttctcattttcttttgatggtttattggtatcttgtttctatatattctaaatagaactttgtaattccactggaattgggatataactcaattctgactgctttactggtggtattttgcaattaaaatgttttttttggctaaaaaaaaaaaaaaaaa

SEQ ID NO: 6781 - DNA, 1637 bp, Glycine max
agctgaccccctgcgcgaccttttcgaattccgggtcgcttacgcgtccgtcggctgcgagaagacgacagaaggggtcgccgaaaaccctaacaacacaggcgcagagcgtgatccattgacgaagatggtgcagcgtctcacctaccgcaagaggcacagctatgccaccaaatccaaccaacacagggtcgtcaaaacccctggtgggaagctcgtttatcagaccaccaagaagagggccagcgggcccaagtgccccgtcactggcaagaggattcaggggattccacacttgaggcctgcagagtacaagagatcaaggttacccagaaaccgtaggactgtcaaccgtgcatatggcggagttttgtctggaagtgctgtcagggagaggattatccgagctttcttagttgaagagcaaaagattgtgaagaaggtcttgaagatccagaaggcaaaggaaaagcaagcctcaaaggcttgaatttgaacaacacaatgagacatctttttggaggacttttaggtttgagtggttatagttaatcacaaattttattagagttgtcatgttaattgtcttttattattttgcctgtttgaactctttctagagcaagtgttaactttgtcgacaatgtcattatgatacagttttgtttctcatttaaaaaaaaaaaaccattttgagacagacacaacacagatctgtcttgaacttctctgtgttctgaaacagcaacaatgacaaaaaccatgactatgtggtttctgttggtctctctttccttcatttatgctgttgccactgctaatactcaaatcaaaattactaacaaccctgcggacaagttggtagctgcaatcaacgaaaacagaactgctcacaaggtatcagccttaaccgacaacccggggcttgcgtgtattgctctacaatacattaaggcataccagggtgaatgtgatgctgtgggaggatctgatggcaagaaacctcctgagtctcactttgctgaagtttttgccccaaactgtggtgttgaggcatcaactcttgctcctataactggtcgtttcctagcgtgccagactaagtatgtccatgctccggaggcattttctgatatcctcataaggaaccaaaagagcatagacatactctacagtaagaatcacactcaggttggtgctgctgtcacaggtactgatgggggctctccttacttctggtgtgtgttgtttagcagtggcaaacctaacaacacctttacttttgagagtggtgtggctaaaataacaaaacctggttgctttagtggagctaacgatgagtgcagtggtgctagtgattggtcaccactcaatgggatgtgggtatttgtcacttcagttctgattgcaatggggtttgctttatcattgtgatcataaactgagataatctgtgtgatctctccacttgatttggatgcctttgtagtctttgatgtatatgaaaggcttggcctcggctattcccccccgcttgattttgtaatttgtcaagagattcacgtcaattgttttcccaactttcttatttacatataaaatttgtggtattggctcttgcaaaaaaaaaaaaaaaa

SEQ ID NO: 6782 - DNA, 837 bp, Glycine max
ctgtgcggcgctcgaggcggccggttgggcctccgaaaaccctaacaaccaccgaagacgctaacaacacaggcgcaaacgcaaacgcaaacgcagagcgtgatccattgacgaagatggtgcagcgtctcacctaccgcaagcggcacagctatgccaccaagtccaaccaacacagggtcgtcaaaacccctggtgggaagctcgtttatcagactaccaagaagagggccagcggacccaagtgccccgtcactggcaagaggattcaggggattccacacttgaggcctgcagagtacaagaggtcaaggttacccagaaaccgtaggactgtcaaccgtgcatatggtggagttttgtctggaagtgccgtcagggagaggattatccgagccttcttagttgaagagcaaaagattgtgaagaaggtcttgaagatccagaaggcaaaggaaaagcaggcctcaaaggcttgaatttgaaaaacacaatgagacacatctttttggaggactgttaggtttgagtggttatagtaaatcacaaattttattagagttgttctcatgttaattgtgcttttattatttggcttgtttgaactctttctagagcaagtgttaaagttgtcgacaatgccattacgatacagttttgtttgtctcattttcttttgatggtttattggtatcatcttgtttctttatattctaatagaactttgtaattccactcgaattgggtatatctcaattctgactgctttactggtggcattctgcaaatatttttttttttttgctaaaaaaaaaaattaaaaaaaaaaatttaaaa

SEQ ID NO: 6783 - DNA, 1717 bp, Glycine max
tacggctgcgagaagacgaccttgtgggtggaggaaggaacgagaaatgaaagaaacatttgttgtgtctgtgtgtgtgggtgggtggtacttagccaattgtgagcaaataacaaacgagtggctttcccttcttctcatcctatatataccattcccatcactccccatgccctctcaattcacttcctatccccttctctgattctctccatatattatctcaaacccctctcacagaatgggaagtgctggaggaactgactatggtgcatacacttatgagaatcttgagagagagccttactggccatcagagaagcttaagatttccatcactggtgctgggggttttatcgcgtcacacatagctcggcgcctcaagacagaggggcattacattattgcttctgattggaagaaaaatgagcacatgactgaggacatgttctgtgatgaattccatcttgttgatctcagggtcatgaataactgcctcaaggttacagagggggttgatcatgttttcaatcttgccgcagacatgggtgggatgggttttattcagtctaaccactctgtcattatgtacaacaacacaatgattagcttcaacatgattgaggctgccaggattaacggcattaagaggtttttttatgcctctagtgcttgtatctaccctgaattcaaacagttggaaactaatgttagcttgaaggagtctgatgcatggccagctgagccacaagatgcatatgggctagagaagcttgcaacagaggagttatgcaagcactataacaaggattttggaattgagtgccgcattgggaggttccacaacatatacggtccttttgggacatggaaaggtggaagggagaaggctcctgctgctttttgtcgtaaagttatcacttcctctgatagatttgagatgtggggggatggattgcaaacacgatcatttaccttcattgatgaatgtgttgaaggggtgctcagattgactaaatctgatttccgagagccagtaaatattggaagcgatgagatggtcagcatgaatgagatggctgagatcattcttggctttgagaacaagaatattcctattcaccacattcctggccccgagggtgtccgaggtcgtaattcagacaatacacttataaaagaaaaacttggttgggctccaactatgaggttgaaggatggactgaggatcacatacttctggattaaggagcagatcgagaaggagaaggctcaaggtattgatatatcagtgtatgggtcttccaaagtggtgcagactcaagccccagttcaactaggctcacttcgagcagcagatggcaaagaatgaggtggtcaacatatggctgtagtagtattcacctaaatgtttcaagtgaagagttggattatatatagcaactaaatagcggtatctggttatttttaattagctgctaaggatttcttatgtatctgctggttgttcatgtttgaatcggaagccctgatgttcctaatgtattttatatagttttttaaggcacttcgtggtgcttaaggtggtttactgcactagaagctctaaattatttgttttgaattttgatgtctaaataattgattagtaagcaaataatcttttcttccttgtgaaaatggaaaatctgaatgttctatgttgggtctctcctgt

SEQ ID NO: 6784 - DNA, 1613 bp, Glycine max
aattcggcaccagtgatcaaaataaggtgacattcaaataagaagtgataaatgagtggctctgccttcccacttcggcactctcccctctacacagccacgtaggtcgcccccccccccttccaaacccaaccgtatccttcattcttctcctaaatcctaatccttcttcactttcagttctcagcatgggaagttctggaacaaccgactatggagcatacacataccaaaaccttgagagggaaccttactggccctctgaaaagctcagaatttccatcactggggctggtggtttcattgcctcacacattgctcgccgcctcaagaccgagggacattacatcattgcttctgattggaagaagaatgagcacatgactgaggacatgttctgccatgaattccatcttgttgaccttagggtcatggataactgcttgacagttaccaagggtgtggaccatgttttcaatcttgctgctgatatgggtgggatgggttttatccagtccaaccactcagtcattatgtacaacaacaccatgattagcttcaacatgattgaggctgccaggatcaatggtgttaagaggtttttttatgcctctagtgcttgtatctatcctgaattcaaacagttggagacaaatgtgagtttgaaggagtctgatgcctggcctgctgagccacaagatgcatatgggctggagaagcttgcaacagaagagttatgcaagcattataacaaggattttggaattgagtgccggattgggagattccataacatatatggtccttatgggacatggaagggtggaagggagaaggctcctgctgctttttgtcgcaagacacttacttccaaagatcgatttgagatgtggggagatggattgcaaacaagatccttcaccttcattgatgagtgtgttgaaggtgtactgagattgactaaatcagacttccgggagccagtgaatattggaagtgatgaaatggtcagtatgaatgagatggcagagattgttcttagctttgaggataagaatataccaatataccatattcctggcccagaaggtgttcggggccgtaattcagacaatacattaatcaaagagaaacttggctgggctccaactatgaagttgaaggatgggctgagaattacatacttttggatcaaagagcagcttgagaaagagaaggcagaaggtgttgatttatcaggctatggatcatccaaagtggttcagactcaagccccagttcaacttggctcgctacgtgctgcagatggcaaagaataaagctgctagtgcaagggatgttcggcagttgcagcagatggcaaagaataagagtgaacaatgcatttccaagtgaagggcaggcttttatgttgctattttgtagagatctatggttacagattagctattgaagttagttttggaacttgttcatgtatttgtaacggatggtgttatgttcttgttttgtttgaggtaataataataactgctgcttaaggtgaaaaaaaaaaaaaaaaagaacgaaaaaaccaagtaaacacgataaagttggaactgggaggggggaaa

SEQ ID NO: 6785 - DNA, 1617 bp, Glycine max
tcgagtcagctacgtaggcccccccccccccaattcacttcctatccccttcttctctctcaaacagggtttaaacgttgaatactcattcatgggtttgtcttcaacgtctcatgtaacggttttgcctaatgggaagtgctggaagaactgattatggtgcatacacctatgagaatcttgagagagagccttactggccatcagagaagcttaagatttccatcaccggtgctgggggttttatcgcatcacacatagctcggcgcctcaagacagaggggcattacgttattgcttcggattggaagaaaaatgagcacatgactgagaacatgttctgtgatgaattccatcttgttgatctcagggtcatggataactgcctcaaggttacaaagggggttgatcatgttttcaatcttgctgcagacatgggtgggatgggttttattcagtctaaccactctgtcattatgtacaacaacacaatgattagcttcaacatgattgaggctgccaggattaacggcattaagaggtttttttatgcctctagtgcttgtatctaccctgaatttaaacagttggaaactaatgtgagcttgaaggagtccgatgcatggccagctgagcctcaagatgcatatgggctagagaaacttgcaacagaggaattatgcaagcactataacaaggattttggaattgagtgccgcattgggaggttccacaacatatacggtccttttgggacatggaaaggtggaagggagaaggctcctgctgctttttgtcgtaaagtaatcacttccactgatagatttgagatgtggggagatggattgcaaacacgatcatttaccttcattgatgagtgtgttgaaggtgtgcttagattgactaaatctgacttccgagagccagtaaatattggaagcgatgagatggttagcatgaatgagatggctgagattattcttggctttgagaacaagaatattcctattcaccacattcctggccctgagggtgttcgaggtcgtaattcagacaatacactgataaaagaaaaacttggttgggctccaactatgaggttgaaggatgggttgagaatcacatacttctggattaaggagcagatcgagaaggagaaggctcaaggtattgatatatctgtgtatgggtcttccaaagtggtgcagactcaagccccagttcaactaggctcacttcgagctgcagatggcaaagaatgaggtggtcaacatatggctgtagtaggattcaccttaatgtttcaagtgaagagttggattatattatatatagcaactaaatagcggtatctggttatgtttaattagctgctaaggatttcttatgtctctgctggtagttcatgtctggaacggaagccttgatgtattttaatagttttttaaggcacttcgtggtgcttaagatggtttactgcactagaagttctaaattatttgttttgaattttgatgtctaaataattgattactaagcaaataattttttaaaaaaaaaaaaaaaaaaaaaaaaaaaaaaaaaaaaaaaaaaaaaaaaaaaaaaaaaaaattaaaa

SEQ ID NO: 6786 - DNA, 605 bp, Glycine max
atcgatacacttactcttcgcgccgccgctcggagcaagcgccgcaggggacgccgccatgtcgaagcgcgggaggggaggatcggcggggaacaagttccggatgtccctgggtctgccggtggcagcgacggtgaactgcgccgacaacacgggcgccaagaacctgtacatcatctccgtgaagggcatcaagggaaggctcaaccgcctgccgtcggcctgcgtcggcgacatggtcatggccaccgtcaagaaggggaagcccgacctcaggaagaaggtcatgccggcggtcatcgtgcgccagcgcaagccatggcgccgaaaggacggtgtcttcatgtacttcgaagataatgctggggtgattgtgaatcctaagggtgagatgaaaggatctgctatcacaggacccattggtaaggagtgtgctgacctctggcctaggatcgctagcgcagcgaatgccattgtctgaggagcttgttggggataatgatatgtttccttagtttcagatttgtactggatgatgaatgtacctgaattatttgtttgccagatatttatccgaatgaggccccacctcttaaaaaaaaaaa

SEQ ID NO: 6787 - DNA, 628 bp, Glycine max
aattattaaacctagaattttcactgaagccgccaccacctagggtttctagcggcgataggagagagagagagagagagagatctagacaagtgaagcaaaatggtgaagttcttgaagcagaacaaggccgtgatcctccttcaaggccgatacgccggtaagaaggccgtcatcatccgctccttcgacgacggaaaccgtgagcgtccttacggccactgcctcgtcgccggactcaaaaagtacccgagcaaggtcatccgcaaggactcggccaagaagacggcgaagaaatctagggtcaagtgtttcatcaaggtagttaactaccagcatctgatgcctacgcgttacaccctcgacgtggatctcaaggaagtggcgaccctcgaggccctttcgtcaaaggacaagaaggtggcggctctcaaggaggctaaggctaagctcgaggagaggttcaagaccggcaagaacaggtggttcttcaccaagctcaggttctgaagacgttttgatctttttttttttacttgttgttgcttttcgcattgaatttttcagcgtcattttagtttctactgttgaacaatgttggtcttgttttggaagatgaatgatcttt

SEQ ID NO: 6788 - DNA, 811 bp, Glycine max
  misc_feature (810)..(810): n is a, c, g, or t
cccgtagcacggtacgacaccaccgagagacacgtgcgcggtggtcgggccggccgctatatattcgcccgagcccctcgctagggtttcccctcatcctccctcgccgtcaaaaccgaatcagaaatctcaagctcagcacagcaacaatggccgagcagaccttcatcatgatcaagcctgacggcgtccagaggggcctcatcggcgaggtcatcagccgcttcgagaagaagggcttctacctcaaaggtctgaagctccagaacgtggagaagtcgttcgccgagcagcactactccgatctgtcctccaagcccttcttcgctgggctcgtggagtacatcgtctccggcccggtcgtcgctatggtctgggagggcaagagcgtcgtcgccactggacgcaagatcattggcgccaccaaccccctggcctctgagcccggcaccatccgtggtgactttgccgtcgacatcggcaggaacgtcatccatggaagcgactcagttgagagtgccaggaaggagatcgccctgtggttccctgagggcattgcagagtggaggagcagccagcacaactggatctatgaggcctaagatgtgtcatgagtggtttgagtgcaggtttcattaagcatctaccaaactagtctttggttgtttacagttttgagatttgtatcttgggaaccttgtttgtgtgaactgaagttatctccttgtgcttgagcatgcaagcgttatctgctgctctatatttgatatatggtattgagttgcatttcgaaaaaaaaaaaaaaaaaanc

SEQ ID NO: 6789 - DNA, 638 bp, Glycine max
aaacccctctcgccgtccgccgctactcccctgcctcccccagagctcgttagggttttctcttttttcgggggagaaatctcaagaggcggcaccatgctcgtgtaccaggacaagctttccggcgacgagcttctgtcggattcgttcccgtacagggagctggagaacggcgtgctctgggaagtcgatggccattgggtcgttcaaggagcagttgatgtggacattggagccaatccctctgctgagggtggtggtgatgatgagggtgtcgatgaccaggccgtgaaggtggttgacattgttgacaccttccgtcttcaggagcaacctgcttttgacaagaagcagtttatctctcacatgaagcgctacatcaagaacctctctgccaagcttgaaggggatgacctagatgttttcaagaagaatgttgagtccgccacaaagtatcttcttagcaagctcaaggaccttcagttctttgttggcgagagcatgcatgatgatggcggcgtggtgttcgcctactacaaggagggagctgctgatccaactttcctgtactttgcacatgcgctgaaagaggtcaagtgctaatcgcactgtatgctataatctatgcgggcggcaga

SEQ ID NO: 6790 - DNA, 636 bp, Glycine max
aatcaccaaccaggtgctcgaggaggtcgatcgatggcgtcggagaaagacgcggcgctcgcccccgtgcccaacgacaaccccaccatatttgacaagatcatcaaaaaggagataccttctacggtggtgtatgaggatgagaaggtcctcgctttcagagacataaatcctcaagctccgacccacattgtaatcattcccaaagtcaaggatggattaaccggcctttcaaaggcagaagagaggcatgtagagatacttggctgcctcctctacgctgcaaaagttatcgctaagcaggaaggacttgaagatggctaccgtattgtcatcaatgatggccctagtggatgtcaatctgtttaccacatccatgtccatctccttggagggaggcagatgaactggcccccaggctaaagaagctcttggttgtcggtcaatcttcatggcagctatgtcctttgcatctcaatcgaataattcctgtaattgacataacagtttgtgcgaggaacatttgctctatctatggaatagccgaaaccatcctgctgtgaatgtatggacaagaaacttgaagctgaatcgtcacaaaaaaaaaaaaaaagttcaaaagaaaaaaaaaaaaaa

SEQ ID NO: 6791 - DNA, 652 bp, Glycine max
ctcttcgttactccctctctcttgaccgccgccgccgccgccacgccaaaatccggcgtcaactgatcggcggcagccatgagtaagctccaaagtgacgctgtcaaggatgccatcacccagattgttggggaggccagagaaaagaagcgcaagttcactgagactgtggagcttcagatcggtctcaaaaactacgacccacaaaaggacaaacgtttcagcggctcagtgaagctgccccatatcccccgcccaaagatgagggtgtgcatgcttggtgatgcccagcatgtcgaccaggctgagaaaatgggacttgactacatggatgttgaaagtctcaagaagatgaacaagaacaagaagcttgttaagaagctagccaagaagtaccatgctttcttggcatcagaggccataatcaagcagatccctcgtctccttggccctggtcttaacaaggcaggcaagtttcccactctggttagtcaccaggaatctcttgaaagccaaggtcaacgagacaaaagctacagtcaagttccagctaaagaaggttctttgcatgggtgttgctgtgggcaacttgttgatggacgagaagcagatccaacaaaacatccaaatgagtgtcaacttccttgtgtcc

SEQ ID NO: 6792 - DNA, 753 bp, Glycine max
  misc_feature (751)..(751): n is a, c, g, or t
cagtgttaattataacactctttcttcccattctctaggcaccagatttagtctggtgtgagaatcaatgctcagtaaaacctttaatagtgtcttttgtttctcccaaatcttatttctgacacaacttgttgctcgaggttgcaagaatcacaatgagtctggcatgtcttgtgtgccatagtgtggatagtccatcaccgtcacactctttcaggagttactctgtttcaagtgcagaaaatgaaggaagatgtcatgctgttgcaacctgcttaaccaggaaattatctcttccaccctctacatttcactcttttcttgcaccatcatcatcctccaaagtgaccccacaacctactggttcaagtaacaacttgatacctggtacaccgcggcttgtacgaagccgtgccgtgacaagggacagagtaagaaactggaattttgatgaaattgcaatggagtcctagtctaaactataagatagaataagactagggaattttcttgtgggatagtttatagcatgttattgctattttgcccctttgaattttgttatgggtgcaatttatctctttctctagttttctagtaaaagagtatgacatctgtagccatgaaaaaattctacggtgtgattctactttatttggcattttccttttgattcacgaccggctaaaactaaaaaaattggtctaattataaaagggatacttatgtcaagtgtcaaggttgacttaanat

SEQ ID NO: 6793 - DNA, 630 bp, Glycine max
acacaaagcctcttgtccaaccgcagctcgggttttgctccgccgggtaccgccccctcttccaagatgtcgaagcgagggcgcggaggttctgctggtaacaagttccggatgtcgctgggtctgccggtggcagccactgtcaactgtgctgacaacactggtgccaagaacctgtacatcatctctgtgaagggaatcaaggggcgcctcaacaggcttccttctgcctgcgttggtgacatggttatggccactgtcaagaagggaaagcctgacctcaggaagaaggtcatgccggctgtcatcgtcaggcagcgcaagccgtggcgccgaaaggacggtgtcttcatgtactttgaagacaatgctggagtcattgtgaacccaaagggagagatgaaaggttctgccatcactggaccgatcgggaaggagtgcgccgacctgtggcccaggattgccagcgccgcgaatgccatcgtctgatctgatcgccggagcagctagatgatcaaagcttttgatagcatgtcccttttttcttctagttttattacttggtgggcccttgaaggatgaagtttccctgggattatgtaatgctgccgggaataatggcctggtaaa

SEQ ID NO: 6794 - DNA, 648 bp, Glycine max
gatctattatatattcgcagtcgctccacaacatttccatccaaacctagggtttaccttctgccgccgccgccaaatcatctccctccccctcccttctccaacatggctcttcagatcagcaagaagcgaaagttcgtcgccgacggcgtgtttctggccgagctgaacgagatgctgacccgcgagctcggggaggacggcttcgccggcgtcgagatccgggtcacccccatgcgcaccgagatcatcatccgcgccacccgcactcagaacgtcctcggcgagaagggccggaggataagggagctgacgtcggtggtgcagaagcgcttcaactttccggacggcggcgtcgagctgtacgccgagaaggtcctgaaccgcggcctctgcgccgtcgctcaggccgagtccctccgctacaagctgctcggtggcctcgccgtccgaagagcgtgctatggtgtactccgatttgtcatggagagtggtgcgaagggctgcgaggttattgtgagtgggaagcttagggcacagcgtgctaagtccatgaagttcaaggatggctatatgatctcttctggccatcctgtcaaccagtatattgatggagctgtgaggcatgttcttctgagacagggtggg

SEQ ID NO: 6795 - DNA, 644 bp, Glycine max
gttttttttctctccccttcctggttgcgcagctcaccccgaacccccagctcccctccccggcgccgccgcagcagcaagatggtgaagggacgcaccggccagcgcgtgaggctctacgtccgcggcaccatcctcggatacaagaggtccaagtcgaaccagtacgagacggcgtcgctggtgcagatcgagggggtgaacaccagggaggacgtggcctggtacggcggcaagaggatggcctacgtctacaaggccaagaccaagagcaacggcacccactaccgctgcatctggggcaaggtctcccgcccccacggcaacaccggcgtcgtccgcgccaagttcacctccaacctgcccgccgaggccatggggaaaaaggtcagggtcttcatgtacccgagcagcatctaaaaggttattttgaagtgtggaggatttcgctcgtcccttaggtttcatttcagagtcttgtaagatggattcaggcccggatagcaagttgaactgctgtttcactgtgaagaactgtagtcttcatgttatctcgaatgtgtgggtcgcacattatatgatgttatatgtagttcgaacctgatgctgtttttcccactttctgcgttctatccctgcaattt

SEQ ID NO: 6796 - DNA, 656 bp, Glycine max
  misc_feature (656)..(656): n is a, c, g, or t
cattcttccctgccgccgcctcctcccttcttcagccgaagcgcccgcacgcctcgacccaagggatcccaatggcgccgacctccaagatggcgctgggcatcaagcgcgcgtcgcggtcgcacacctaccaccgccgcgggctgtgggccatcaaggccaagcacggcggagccttccccaaggccgagaagccagccgccgtcgccgagcccaagttctaccccgccgacgacgtcaagccccgcaccgccagcacccgcaagcctaagcccaccaagctcaggtcgaccatcacgcccggtacggtgctgatcctgctcgctgggaggtacatggggaagcgcgtggtgttcctgaagcagctcaagtctggcctgctcctcatctctggacctttcaagatcaatggcgtgccagttcgccgggtgaaccaggcttatgtgattgccacatccacaaaggttgacatctctggtgttaaggtggagaagttcgatgacaagtacttcgccagggacaagaagacccgggcaaagaagactgaaggggagctgttcgagactgagaaggagaccaccaagaatctgccatccttcaaaaaggatgaccagaaggccatcgatgctgagctgatcaaggctatcgaggctgtn

SEQ ID NO: 6797 - DNA, 640 bp, Glycine max
aacccctcgctctcgccgccgccgctgccttctctaccgcgccgccgcagccatggtgaagtactcgacggatcccgccaatcccaccaagtccgccaaggccatgggccgggacctgcgtgttcatttcaagaacactagggaaacagcgtttgccctgaggaagatgtcgctcaacaaggccaagaggtaccttgaggatgtgttggcacacaagcaagccatccccttccggaggtactgccgtggtgttggacgcacagcccaggtgaagaaccgtcagcccaatggtcagggacgctggcctgccaagtctgctaagttcgttctggatcttctaaagaacgctgagagcaatgctgaggtgaaaggtcttgatgttgatgctctctacatttcacacatccaagtgaaccaggcccagaagcagcggcgccggacctaccgtgcccatggacgcatcaacccctacatgtccaacccatgccacattgagctgatcttgtcggagaaggaagagccggtgaagaaggaggctgagtcccagatcgccaggaaggcctagagaaggaagctctacataacctatccgcctattcgttagagcagtttgtagcatctggtttggctgagtggaaat

SEQ ID NO: 6798 - DNA, 616 bp, Glycine max
  misc_feature (577)..(577): n is a, c, g, or t
aaaaaaaccctagacgcgaacgcacctcctcccttcctgcccccgaccgccccagccgccgccgccgtcgccgccgccgccgactgcagccatgtcgctgatcgcgggtgaggagttccagcacatcctgcgtgtgctcaacaccaacgtcgatggtaagcagaagatcatgttcgcgctgacctccatcaagggtgtgggccgccgcttctccaacatcgtctgcaagaaggccgacatcgacatgaacaagagggccggagagctttccgcggaggagatggaccgtctgatggcggtggtgcacaacccgcgccagttcaaggtgccggattggttcctcaacaggaagaaggattacaaggacgggaggttctcccaggtcgtgtccaacgccgtggacatgaagctcagggatgaccttgagaggctcaagaagatcaggaaccatcgtggtcttcgtcactactggggcgtgcgtgtccgtggtcagcacacaaagactacaggcaggagaggaaagactgttggtgtctccaagaagcgataagctgcttgacaaagatcctgcatagcnttgtattactgtgttggtccatttccagaatcttaagga

SEQ ID NO: 6799 - DNA, 613 bp, Glycine max
tccttcccgagccggaggtggacgaggtaagaagaagcagccgcagccgcagcgcgaccccgcgaggaaaccctaccgccgccgcagcaggagcagccatgggtatcgacctcgtcgccggcgggaggaacaagaggaccaagcgcgtcgcgcccaagtccgacgatgtctacctcaagctcctcgtcaagctctaccgtttcctggtgaggaggaccaagagcaagttcaacgccgtcatcctcaagaggctcttcatgagcaagactaaccgcccgccgctctccatgcgccgcctctccaacttcatgaagggaaaggaggagaagaacattgctgtggttgttggtacaatcacagatgacatgcggatccaagaggtcccagcaatgaaggttaccgctctgaggttcacagagacagcgagggcaaggattgtcaatgctggtggggagtgcctcacttttgaccagcttgcactccgtgctccaactggggagaacactatcctgttgaggggacccaagaatgcccgtgaggcggggaggcacttcggcaaggcgcctggtgtgccgcacagccacaccaagccctatgtgcgctccaagggtag

SEQ ID NO: 6800 - DNA, 517 bp, Glycine max
aaacttcccgagccggaggcggacgaggtaagaagcagcagccgcagcgcgaccccgcgaggaaaccctaccgccgccgccgcagaagcagccatgggtatcgacctcgtcgccggcgggaggaacaagaggaccaagcgcgtcgcgcccaagtccgacgatgtctacctcaagctcctcgtcaagctctaccgtttcctggtgaggaggaccaagagcaagttcaacgccgtcatcctcaagaggctcttcatgagcaagaccaaccgcccgccgctctccatgcgccgcctctccaacttcatgaagggaaaggaggagaagaacattgctgtggttgttggtacaatcacagatgacatgcggatccaagaggtcccagcaatgaaggttactgctctgaggttcacagagacagcgagggcaaggattgtcaatgctggtggggagtgcctcacttctgaccagcttgctctccgtgctccaactggggagaacacgatcctgttgaggggac

SEQ ID NO: 6801 - DNA, 627 bp, Glycine max
  misc_feature (623)..(623): n is a, c, g, or t
ctcaagccagagtgcctcctcctagcaagctatatacctacatagtacagccatggcccccaccgtgatggcctcgtcggccacctccgtcgctcctttccaggggctcaagtccaccgccggcctccccgtcagccgccgctccaacggcgctagcctcggcagcgtcagcaacggtggaaggatcaggtgcatgcaggtgtggcccatcgagggcatcaagaagttcgagaccctgtcctacctgccaccgctcagcacggaggccctcctcaagcaggtcgactacctgatccgctccaagtgggtgccttgcctcgagttcagcaaggttgggttcatcttccgtgagcacaacgcatcccctgggtactacgatggccggtactggacaatgtggaagctgcctatgttcgggtgcaccgacgccacacaggtgatcaacgaggtggaggaggtcaagaaggagtaccctgacgcgtatgtccgcatcatcggattcgacaacatgcgccaggtgcagtgcgtcagcttcatcgactttcagccacccggctgcgaggagtccgccaaggcctaaacagctcactcccgacaggccatatataaagggccattgcagntttg

SEQ ID NO: 6802 - DNA, 634 bp, Glycine max
  misc_feature (502)..(502): n is a, c, g, or t
  misc_feature (548)..(549): n is a, c, g, or t
  misc_feature (607)..(608): n is a, c, g, or t
  misc_feature (634)..(634): n is a, c, g, or t
aactagcgccacaaccagacggcaggtaagggaggaggagagagcggcggcgaagatggtgtcgctgaagctgcagaagcgcctggcctcgagcgtcctcaagtgcggcaagggcaaggtctggctcgaccccaatgaggtcaacgagatctccatggccaactcccggcagaacatccggaagctggtaaaggatggtttcatcatcaggaagcctcagaagatccactccaggtctcgtgcaaggagggcacatgaggccaagcagaagggccgtcactctggatatggtaagcgtaggggtaccagggaggctaggctccccaccaagatcctgtggatgcggaggatgcgcgtcctgaggcgccttctgcgcaagtaccgtgaggccaagaagatcgacaagcacatgtaccatgacatgtacctgaaggtcaagggtaacatgttcaagaacaagagggtcctcatggagagtatccacaagtccaaggctgagaanggcagagagaagaccctctctgatcagtttgaggccaagcgcgccnnagagcaggcagcaggaagaaaaacctttgccaggaagggaggagagattggctcaggnncccagagatcatgcaccagcaccagn

SEQ ID NO: 6803 - DNA, 1540 bp, Glycine max
tctcgagccgaagcggccttacggctgcgagaagacgcccccccgatgaaaaagggagtgcctgataacccataaccgaccgcaccaccgttttcctttgctttgcgttctacaatgtcgaaaacctcagagattattacatgcaaagctgctatttgctggggaataggaaaacctgtgactgtggaagagatacaagtagaccctcccaaagccaccgaagttcgagttaagatgctttgtgccagtatatgctccacagacatctctagcacaaaaggattcccacataccaattttcctatagcacttggacacgaaggagttggtattatagagagtgtcggtgatcaagtaacgaatctgaaagaaggggatgtggtaattccaacatacataggcgagtgccaagaatgtgagaattgtgtttcagaaaaaaccaatttgtgtatgacatacccagtaagatggactggtctaatgccagataacacttcaaggatgtccatccgaggagagaggatataccatattttcagttgtgctacatggtcagaatacatggttagtgatgccaactacgttctcaaagttgatccaaccattgatcgagctcatgccagtttcatctcatgtggcttttcaactggatttggagctgcttggaaggaagccaaggttgaaagtggatccactgtagctgtttttggtcttggggctgttggattaggggctgtaattggatccaaaatgcagggagcaagtaggataattggaattgacacaaacgagaacaagagagcaaaaggagaagcttttggaataactgactttataaatccgggtgattctaataaatctgcttcagaattggtcaaggaactaagtggtggaatgggtgccgactattcttttgagtgtactggagtttccactttactctctgaatccttggaagccacaaaaattggaacaggtaaagcaatagtaataggtgtaggaattgaaattactttgccattgggtctttttgccattctgcttggtagaactttgaaaggttctgtttttggaggactcagggccatttcagacctttccattttagctgacaaaggccacaaaaaggaattccctcttcaagaactcttcacccatgaggtcacattagcagacataaacaaagcatttgagctactaaaacaacccaattgtgtcaaagttgtcatcaacatgccatagtcatattagcgcaattgtaggtaatcttcggcaaagtttgaaaaagattcacgtttcactctttatcaattaccattgtctctctctttgtccttctctatgcatgtgtgtatgtggaacccagatcctctgccacgatcctaccacctacaatagtattttgtccgtttcattgatcctacgactatccaagtaaatctttcagtagttggattaattcaatgtctgagactaattttactgtataatacgtactgcatatgataagtttaaaaaaaaaaaaaaaaaagggcggccg

SEQ ID NO: 6804 - DNA, 1192 bp, Glycine max
tcggcgcctcgtccccgtctcatcgatgatttctcttacgtgctctatttgtctatttaggatcaccccttcaaagaaagtttctggcttttcttcgtagctcctaaaagttattaaagtaaaagcacaatattatatataatcttggtacgcgttaagccttgcccttttttttttctttcttcttttgtttcaatgaatggttttcgtttgaattgaaaacctgcaaagaaagcatcgattttgaatggaggaagggtaccccagaagcaagttcaagaccgtgtgtgtcttctgtggcagcaacagtggcaaccgacaagtcttcggtgacgctgcgattcaattgggcaatgaactggttaagaggaacatagacttggtgtatggtgggggcagtgttgggctgatgggcttaatatctcagagagtgtatgatggaggctgccatgtcctagggatcattccaaaagctctcatgcctctcgagatatctggtgaaacagtaggtgaagtgaggattgtttcagatatgcacgagcgtaaggctgcaatggcacaagaagctgatgcatttgttgctctccctggaggatatggaaccatggaagagctgttggagatgataacttgggcccaacttggaatccataaaaaaccggttggtctactgaatgttgacggttactataactgtttgcttgcattatttgacaatggtgttaaagaaggtttcattaagccttgtgcacggaatatagttgtctctgctacgtcagccaaagaacttatgatgaaaatggagcactacactccttcgcacgaacatgttgcccctcatcagagctggcagatgaaacaattaggtaatatccagatgcagagtgagactgttattgatggaaggtttttctccgaaaattgatttatgatgtgattcttcatcatttgagatgtatacaagagcctggatagatgggaccatatgttgtttgttaccgtgtactatgttgttttatgactggagtgcttatatattggctttgctgcttttcatcaaaaacttttctttatttttcctccccttcatttaatggtcaattgattccctgtgagatagtcatatctggttgttaccactcattaaaggcaaaagtacttggaaatggaaagagatgataagcatttcgtg

SEQ ID NO: 6805 - DNA, 1212 bp, Glycine max
  misc_feature (7)..(8): n is a, c, g, or t
tcgagtnnagctacgtaggccccccccccagcaaaccaacggacgcgtgcgccgactcgttcctaaggcgccgcacaaacatattcacaagaagatgaggaaaacactcttcgtcgcaccaacgtcagtgcttgtgtcacgtttaagtgttttccatttgcgtccagccccacccatcttcgaatttaacacgatttttgggtcccgtgtgaagatgaagcgtgaccttaatgctattacccttttcaagcacatgcatgttaaggggattgttggaattgttgaaccaggtcttggtattttcaagatcttggtcagctgttcctgccacctgggtcatatgaaatttgccttttttatgtgacaaaggtctctgtcttaatggtgaaaattgcatggttgttcgataaaactgttgtgataatgtacaacacaattatcgatagcttatgcaaaaataatgtttgtttctgaaatgaaatcttattttgattaaacaattgcattattcaaaagcaattgcattattcaagaaaattaaagattatgcaaaggtggaagacttgagaatgcacaaaagatttttcaagatctttttcatgaaatgatagcttggaagaatgtttggaagatttaaattagattttactataatatctcaataaattggaatgattcagcgaagtctccgatgatgacagatataatggagtccaaatgaattctctgatgatggtagatataatggagtccaaatgaatgaactttatcatatttataaatatgatgacttaagacaaataagtccaagttttttgaagtattaggatgtttataattgttgagtgacataattgctgagaaagatgaaagagaaatgattaagctgaaatgttcattacaacacaatcattgatagcttatgtaaagataaacttgtaactaagacatgttatttatttttattacttttctgtaaaaaaaaaaaaaaaaaaaaaaaaaaaaaaaaaaagaaaaggctattcccttttagtgggggttaattttagcttggcactggccgtcgttttacaacgtcgtgactgggaaaaccctggcgttacccaacttaatcgccttgcagcacatccccctttcgccagctggcgtaatagcgaagaggcccgcaccgatcgcccttcccaacagttgcgcagcctgaatggcgaatgg

SEQ ID NO: 6806 - DNA, 701 bp, Glycine max
  misc_feature (44)..(44): n is a, c, g, or t
atatatatatatatatatatatatatatatatatatataaatanaaatatataaaaaggtaaaactctttcaacaaaaaatcgaatcccattttaattctcagatccaagcttgggagacagagaaagagaaagagaatggacgccattgattctgtgttcgatccgctgagagaattcgcaaaggacagcgtgaggctcgtgaagcgctgccacaaacccgatcgcaaagaattctccaaggttgccgtccgtactgcaattggtttcgtcgtgatgggattcgtcggtttcttcgtgaagctcattttcattccaattaacaacatcatcgtcggatctggttaggatgaagggaactacaattgcctcagaattcaggttgtcaagcaaaaggaggtagacagagttcccacatcaatagatcattttatgcccccaatcttagttctgttttcatttttgttttttcttatatctggaagcgttactttagatgtaaaattttatttatcctttgttagaccttgacacattgttttgatttaggataaggaggaaaaaacaatggtcaaacctgaaacttgatttgattctatgttgactttgctttcgaatttattttgatggctgtttattggcctttgcagaataacgttttgtttcatttagcaagaatctgcagataaatttttcaaaaaa

SEQ ID NO: 6807 - DNA, 1564 bp, Glycine max
tttttttttaaaaaataaatataatataatcttgagccaagttggagaagaatcttttttttttttttcgggtcgatatgtaaatccagctagcaactttattacatataaatatttactgtaaaagtcacaacatacaaattgaatctaacatctttaaaactgaacatatttcaatcaaatttgactaaaaaaatcttccttccatattacaaaagatcttatcagcataagattaattatttttatctcaatcttctgaacggtggctgtctagtgtctaccaatcgacaactcagatggagagtgcagaaagtatacaaattgtcccaacgaacatacaaactataacgagcaatccgactaaaatatgaagacaacactgtcatgaactctggacttctgattctgagcaacacattctgaaatccacattaagttcctgatctcctgttcccttaacctcatatatgcgaagaacacagcataatgaaactgttgctcaaatgccaagcaaagccttttcacctcctcctcatagaatgccttgtcaagcatctggctctctccatatgatagcttagcaaaaatagattgataggggggatatttttccatgacagcacgaacctgatcaatgtcctcacagacagcaagttcctcatgaccatatgggtatagcaaaccaaaattagagtataattttctacggtcatctctggtaagctcagtaccaatgctatttatggtaatattcacagcccttctatcagcctcaaaagctagaaggtcagacattatctcagctgtggcaccaccaagtttctgacaaaatctgtagaagtcttcaaggtatgccttgtaaagagtgttcctcattatttcaatgttcatatcatccaagtcctctgatgtaatgcactcagagaagtatggagccagaggagtgtcaacaagaaccagcctgtaaagctcccgcatattctgagcaacagccagagtagcaatactgtcaaacatgccgagtggatggcacttttctaataattcttgaacatctctctcatgcaaggtgccagtaacaatcaaaacaacattgtctatcatgtgaccatatgtgatatactctaaaaaggttgacaacggttctgtggcttggcatagcatgttcttgtaatcatcaaccagcttaagagtacacttctccacaatcgtggtggtatgcaacggagaaggctcgttttggaggtaaggaccgtactcggtggcggagaggtgcatcttgatgtcgtcgagggtttcgcattggcagaggttgttgtaatcggcggtggtgaggaggccggcgcggtggccgcggacgatggcctcgaggaagccgccgtggatgttgaaggtgagagcttcgaatccgtacatttcgaatcggatctgatgccggtttcggatctcaaaattggttgaaggaagaaagggaaccagacaaaacaaaacaaagaagatcagaacctcttcctccttcgggaaatttctgcacgaagatgaatgaaataattaggatgtt

SEQ ID NO: 6808 - DNA, 597 bp, Glycine max
gacgacagagagagaaaaatggaagaagacctggacggcgtcgctccgtgctcctccctcgccgtcgaggctatgattcgtgtcggagcggccggtgcaatctggggcttgtgtgctggtccttacgacgctcgtcaacagggtcttagaggctctgctaaagcttcttttgtggcaaagtcggttggcaggtttgggactcgatgcgggtttgtagctggcgttttcagtattacgcgatgcggggttcagaggtaccgagggcggaatgattgggtcaatggtttgattgggggtgctgtagcaggtgcagctgctgctgctgctgctgggacacgaagttggtcacaggtgatagggatggccggtttggtttctgttttctgtgctgcagctgactattccagaacatcttaaaatacatctgtgtttagtgtaatcttaattttggttttatttgtactttgtccaatttaattcctccttgtactctgatagaaaattcgtgcagtttgaaaaattcaataaatttgttatttagatcaaaaaaaaaaaaaaaaaaaaaatatatgaaaaaaaccctcacatttttttgcc

SEQ ID NO: 6809 - DNA, 1402 bp, Glycine max
atgcaagaaaaacgacatattacgggttcgtggttcttcttatcctttctattacttgagttgagcagtgggtgtgatctgaaagtgaaggtgaagaaatgcttcttcaaacgaggcaatttggcacagcgtgtccatgggtcagactcacacccgcaagcaaaagaaatagctcagtctcattgagaaggagcaattgtggcccaaaatgttcggtgtcccaattggaattgaagagtgagagtgagagcaaaacgaagccgtatccagcagaggcatcgaggaccataatggagttggctaaggtgggcacgctgtgtacgttgacccaagagggtttgccccttggtactggggttcgattcgcggttgaccctgaacatggcactcccttgttctgcttcaattccactgacaacactaacatcccctcttctcttcatgttcagtttgaacaatttggattgcgcactcctcagtgcactattcaaggaacccttaccaaaccacaggatccaaagcgtcttgtttctgtgtggaggaaaaggtttggagaagaagttgatcgagattttatttacattattgccgtggatcgggtactccaattggaagacattcaggaggatggcatatgggtcacctcttcagattacaaaaatgctcaacccgatcctcttcgagactctgcacacaacttagtcactgaaatcaacaccaacaatatggaagacattactcgcttttgcaatgtctacgttgatttggatttcctggtctccgaggcaaagatgctatgggttgatcgcttgggctttgacatgcgtttgtcttcccctcacaaaggcgtgtttgacgtccgcattcctttccccagagaagtcaccgatgagaaaggtgccaagtcgacgtttaattgtatgtcacaactcgcttgggaggtagaaagaaacttccaacatccagacttttcaaaggttaaagagttgaagccagtcaagtccccttttctgtaaccaacatgccaattcttcagttgttatcaaacatccatccttggttgtttttcaaagaatatgaccatgtctatcgtggctttgtttagttttgactcatctagtgttgatgcaatgtttgatgtacttctaaggtgttttgtagccacatcaggaaaaatccaatacacgtttgtgtttcaaaactctggtattaggcaatgcattttgatatcaaatccgggttgaatggatgaacaggtgtttgcacaaaaaaaaaaaaaaaaaaaaaaaaactcgagactagttcctggtgccgaattcggcacgaggagagggctgtgtcagatgaaatttcaatgaagtgtaaggacctggaggaaaagctagaaagaaaatctgcaaag

SEQ ID NO: 6810 - DNA, 1708 bp, Glycine max
attttaaggacaactttttttaatgccaccaatattgttggctgaatgatatatttatgctcaatctggaagaaatgaagagaaataaaaatatcttcttcatgatagaaaaataggaggtacaagcagctgaatggatgaaattatgcttaatgttagccactattttctttctggaacttaccacaatcgtgagcttgcatgagagttgtaagaagaacttgtggaatacagaggatgtgaagagggtcataagcagctacgtaggccccccccccccccatagggctaaaatggaagttgtagaaatttctacaagcaaaggccatgtgtagttgttgcaattgtagggaagcaaaattggactatgatatggagagtggagaccaattccagaaattccattgagaaatatctacccccatggttgttaaaatcgcgctttaactcatgaaatcgtatgattttacgattccaccaagggtcggcgagttgaatcggaagtagaatcgaaaccggagtagactcgtccgatttagcgcagactcgggcgagtttaggtagactcgcgaatctgcgacgagtccgcaagttcatgaaattttcaaaacgacatcgttttgaagcagagctactcccttactcatgagtcgtgactccgtggccgtgctgtgctgaagctgctactcaccgctgttcactcgcatcgtcatcgctggccctcagtcgcggtcctccatcgtcatcggccgtcgctgcctcgctggtcctcacttgcgctccaagctttgcttcacgtcacaatgctaaggataactatgaatttctctctaaatgcataaaagaaaatttgggattcaaaaatggtaaacctattgcagctcgtattatatacaaatgtctacttcattggcattcatttgaatctgatcgcacaaccattttcgattccataatcaaaggcacaaatgaggttctaaagggaccaaaatctccattgaagtttattggatatgatgatggtgtagcgcatgtggaggcgaaatatcctgctatactttttaagcaacaactaactgcttgtgtagagaagatttttggtcttttacgtgacaatttgaaaaaggacctttctccacttctgggatcatgtattcaggctcccaaaacaggacgaggagtgcatgggggaaaatcatctagatttcctggtgggattccccaacaatcatcaagtggtcagtggagtaacattgtcaaatttttggattcactcatgagcaaacttcggcaaaatcatgaggcacaacactactggctttaggggtgaaaaactgaagaccataccatatcatgagtcacatgattcttagtatctcgggtccatcacaccatatgacagcaaatagagaatatgtaaaccatagggttcaagtaggttgctgtatgtagaattgtagattatagattaaatttctacttcttagtaaagtgagttaggggagtgggagttgggagcacattgtgatcaattaatatactacatattgacagagtagttacaactgtttgttcagttaaagctttggtgtgacataatttgacattggtgtaaaaaaattaatttacattcaggtgggaagtgaaattgtacacttatttgcaggctatggtatatgatgcattctacaaaaaaaaaaaaaaaaaa

SEQ ID NO: 6811 - DNA, 946 bp, Glycine max
  misc_feature (1)..(2): n is a, c, g, or t
nntccgtttgtttataaaaaaaacaaaaagaagagggaggagggaggaaggaggaaggagagagactttatatacgaggtaacagggcactgtggaattgcgcgtgtgggggtgttgtttgaggttgttgtcgttggttgtgttgtgttgtgttgtgtgggttttatgagagtgagtttcacatggggagggtttttgttcttgaattggatggcagatcttacggatgcaaattctgcaacacccctcttgccctcgctgatcacattctctctcggaatttcaactgcagtcaagggagagcctaccttttcagcaaagtggtgaacgtaatacttgggcctcaggtggagagaatgatgatatctggactgcacactgttgaagacatattttgttgcaactgtggaaaccttcttggatggaaatatgttctggcacatgaaaagaatgaaatatacaaagaagggaagtttgtgcttgagaggtggacgatagttgacaatgaagaggaggaattgaattctgatgcacaagctggctctcaaactggctctcaagctggctcaagtgacacagaaaacgcctagcaagtggcttctttttcatgaatttgaagtattgtagctagcaattaatatattatagtattattattatacctttagtattgtaggttgcaaatatattatacctttagtattcctcaagatacaatttcacatagaaacttcttagagcaacttaagcttagctcatttgcagcatatataagtcttaaatattgtcatagcgcaccgaatcttgcaatatatttatggagggcatataattcatcttatttatgagtcgaagatctccactttgcttgatctcagtggttctgatatatgtggagttactgctctagaaataagtttgcaattacaatttttctgtgaagtgt

SEQ ID NO: 6812 - DNA, 1080 bp, Glycine max
acggctgcgagaagacgacagaagggtacggctgcgagaagacgacagaagggtacggctgcgagaagacgacagaagggtacggctgcgagaagacgacagaagggtacggctgcgagaagacgacaaaaaaatcaaagtttgaggggagacggagagagagagagatggaggagaagacggagaaggtgaagtctgaggcagttcagataattgaagcgtttgaggttctgccaaagctcgtggttttcgatctcgattacactctctggcctttctactgtgagtgtcgatcgaagcgcgagattccttctctgtatccccacgccaaaggcatattgttagctctcaaagagaaaggcatcgacattgccatcgcttctcgctcgccaacggcagacatcgcaaccgctttcctcaacaaattgaacctcaccccaatgttcgtctcacaggaaatatattccagttggacacataaaaccgatcattttcagaggattcattcgaggaccagtgtccccttcaactccatgctctttttcgatgatgagaataggaacatccaagcggtgtctaaaatgggagtaactagcattttggttggagatggggtaaaccttgggtcgttaagggaaggccttacacaattctctcgaaactggaatgcgtcgcagaagaacaagcagaaatggctttccaagtactccaacaagtcagatacttccaaccccactgcatgaaatttaacatcccattgaattttctctatctggattctattcagaaccacagtattttgtatcagtcgtttcccttaatgaagcaaactgggagaacttgaatagaaacctggtatttccaacagctatatacttgaatattcaattggaattttctatggatttgattcagaaactatttaatgaacttaaatagaagtcacagctttcgtcctgttccctatttgtgagtgttgttatgcagcattaatgttattggatagtaaaattcactttaccggaaattttagatggtcagatttgttcagaagttagatgatcttctggaatgcagaaa

SEQ ID NO: 6813 - DNA, 2272 bp, Glycine max
tcgatcagctacgtaggccccccccccactaccacaaccgcaacctcaaaaactcaatattctcaacaacacactactttccttcttccaataatgtcttcttcattctctgttcgttttcttgctcctccatcatcatgcttccccagctctcggcccaagacatggctctgcgccgccaccaccccaacggtggctccggcaactgcctcctcggaggtggaggcttcaaggttggagcctagagtggaggagagagatgggttctgggttttgaaggaagagtacaggggaggcatcagccctcaggaaaaagtgaagcttgagaaagaccccatgaagctctttatggaaggtgggattgaggacttggctaagatgtcccttgaggaaattgagagctccaagcacaccaaggatgatattgatgttagactcaagtggcttggcctttttcataggagaaagcagcattatggtagatttatgatgaggctgaagcttccaaatggggtgacaacaagtgcccaaacacgatatttggctagtgtgatcaggaagtacggaaaagatgggtgtgctgatgtaacaacgaggcagaattggcaaattcgtggtgtggtgctacctgatgtgccagaaattctcaagggcctcgatgaggttggattgactagtcttcagagtggaatggacaatgtgagaaaccctgttggtaaccctcttgcaggcattgacccagatgagattgttgatacacgaccttacaacaacttgttatctcaattcatcactgccaattcacgcggcaacccagccatgtcaaacttgcctaggaagtggaatgtgtgcgtggttggatcccatgatctgtttgagcatccccacattaatgatctggcttacatgcctgcaaacaaggatgggcgttttggattcaacttacttgttggtggtttcttcagtgccaagagatgtgctgaagcaattccacttgatgcatgggtctccgcagatgatgtaatcccactatgtaaagctgtccttgaggcctatagggaccttggcttcagagggaacagacagaaaacaagaatgatgtggttgattgacgaattgcggggtctagttccccggtcagtgggggtatctgcttggcaagtaagtgataaaagtgtttggcaaatgaaggggatagaagtattcaggtcagaggtggaaaaaagaatgccagggaagcacctggagagagcatctgaggaagaactggttaagaaaaaatgggaaagaagagactacttaggtgttcatccacagaaacaagatggcctaagctatgtagggattcacattccagttggtagagttcaagcagatgatatggatgagttggcgcgattggtggacaaatatggaactggagagctcaggctcacagtggagcaaaacataataatcccaaatgtggatagcaacaaaattgatgccttgctcaatgagcctctcttgaaggagagattctcacctgaaccttctctattgatgaagacactggtggcatgcactggcaaccagttttgtgggcaagccataattgagacaaaggaaagagcattgaaagtgactgaggaagtggagaggcaagtggctgtgactaggcctgtgagaatgcattggactggctgccccaacacttgtggccaggtgcaagttgctgacattggtttcatggggtgcatggctagggatgagaatggtaaggccactgaaggtgtggatattttcctgggagggagaattggaagtgattcacatctagctgaggtgtataagaagggtgtgccttgcaagaacttggtgcctattgtggtagacatactagtaaagcattttggtgctgtccaaaggaatagagaggaaggggaagattaaactttatggccattggcaattttagtttctttactaaatctaccattgtccctgaacaaaagtatcagtgtcctctacataaaagaaaaagggatgatcatgagacatgcattatatcatatgcatgtacacttttggataagacatgtacattctttgctagtccctaagttacactttatttcttcaaagatgtatgctatatatttctcattttcttgtggcaaatgcttaagaattattttaacattataaactaattttagaggcaaaatggtttatatttaaattttttttatgtataacaaaatactaaggatttagatgaatcttccactcc

SEQ ID NO: 6814 - DNA, 2177 bp, Glycine max
cacgcgtccgctcttctcttaaaccgccacaacacatgtactcgttccttcttcttcttccaataatgtcttcttcattctctgttcgttttcttgctcctcttcctccatcatcatcatcatgcttccccaccagctctctgccgaagacatggctctgcgccgccgccaccccaacggtggctccgtcaaccaccacctcctcctcggaggtggaggcttccaggttggagcctagagtggaggagagagatgggttctgggttttaaaggaagagtacaggggaggcatcagccctcaggagaaagtgaagcttgagaaagatcccatgaagcttttcatggaaggtgggattgaggaattggctaagatgtcccttgaagaaattgagagctccaagcacaccaaggatgatattgatgttagactcaagtggcttggcctttttcataggagaaagcagcatcatggtagatttatgatgaggctgaagcttccaaatggggtgacaacaagtgcccaaacacgatacttggctagtgtgataaggaaatacggaaaagatgggtgtgctgatgtaacaacgaggcagaattggcaaattcgtggtgtggtgctacctgatgtgccagaaattctaaagggcctcgacgaggttggattgactagtcttcagagtggaatggacaatgtgagaaaccctgttggtaaccctcttgcaggcattgacccagatgagattgttgatacacgaccttacaacaacttgttatctcaattcatcactgccaattcacgcggcaacccagccatgtcaaacttgcctaggaagtggaatgtgtgcgtggttggatcccatgatctgtttgagcatccccacattaatgatctggcttacatgcctgcaaacaaggatgggcgttttggattcaacttacttgttggtggtttcttcagtgccaagagatgtgctgaagcaattccacttgatgcatgggtctccgcagatgatgtaatcccactatgtaaagctgtccttgaggcctatagggaccttggcttcagagggaacagacagaaaacaagaatgatgtggttgattgacgaattggggatagaagtattcaggtcagaggtggaaaaaagaatgccagggaagcagctggagagagcatctgaggaagaactggttaagaaacaatgggaaagaagagactacttaggtgttcatccacagaaacaagagggcctaagctatgttgggattcacattccagttggtagagtccaagcagatgacatggatgagttggctcgtttagccgacgaatacgccaccggtgagctcaggctcacagtggagcagaacattataatcccaaatgtggacaataacaaaattgatggcttgctcaatgagcctctcttgaaggggagattctcacccgaaccttctctattgatgaagactctggtggcatgcactggtaatcaattttgtggacaagctataattgagacaaaggaaagggcattgaaagtgactgaggaagtggagaggcaagtggctgtgactaggcctgtgagaatgcattggactggctgccctaacacttgtggacaggttcaagttgctgacattggtttcatggggtgcatggctagggatgacaatggtaaggccactgaaggtgtggatattttccttggagggagaattggaagtgattcacatctggctcaagtgtataagaagggtgtgccttgcaaggacttggtgcctgttgtggtagacatactagtaaaacactttggagctgtcctaaggaatagagaggaaggggaagattaagtgcatgtttggatagttattacaaacagacatttgcatcaaaatgagttttgcaaaaggatcctcaccctttcttttgcaaaatgagttttgaagatcattgatttgatctcggaatttgtgcataagttgaattaaaaaccaaatatgcattaaattttaatggccattggtaattttagtttctttattaaatccaccattgtcccttggacaaaattattagtgtcctctacatagaagaagggatgatatatgcatgtacacttttggtttagacgtgttcattctttgctagtccctaatttacactttatttcttta

SEQ ID NO: 6815 - DNA, 1241 bp, Glycine max
acatcctaatcgaagcatcactacctcagtatatactcactaattggacaacccttctcctacctccatggctaatttcataactttcttcattcccctagccctaaccctccttttctcctccctcgtcactgccagttaccatcaaagcatctctccaagccttctacgttctcgtgagaagctcacgcaccttcgcttctatttccatgaaatttttactagcgacaaaccctctaatctcgtgatcgacccccccaaggtggtagccgactctccccttccatttgggtcccaagtggtgatcgaggacccattaacaattgggcctgatgtcgagtccaaacagataggtaaggcccaagggttttacctatccgcaacccaaaggcccggtttggagttggagatagtcatggggatggccttgaccttcttagaaggcgaatttaacggtagcagtttaagtgtgttggggagaaacaaaatcttcaatgaggtgagggagttgcctattattggtggcacgggtgagtttcgcttcgcacgtggctatatcctagctaggagtgtcaaggtcgattaccataaaggggatgctaccgtggaatacaacgcttatgtgtatcattattcttccactagctcttcgtctcacgagatttttaacgatggagttcagttcatgacagaccctattcttagcaagatttagatttttaactaatttatgtgttggaggaagtttataaaaaactttaggaaatttgtatctaaactaactcgatacaattttctaagttttactcacataaataagttcggaaattagactgcggaaggtgggggaataaatccaaataccaagttgctaatttactcctttgaaaactatgcctcggttcagtactataaataaatttgttgtcttgtcgtacacaaaatgtaagtctttgttgtagtgcaagttgcgtgagctaaataacgtgccagtcttaaaaatttaagtctttgttgtagtacaagttgcgtgagctgaataatgtgccgcaccttttttttttgttggagatttagaccgttgattattatgtgtattctgcaattgaatagatatagagaaagagacccgggggttgaaaacttgatatccatgacaatcatgtaatatatatatatatacacacgaaaaataatactacctcctcgtttctttataattatattgttgaacttttgat

SEQ ID NO: 6816 - DNA, 1934 bp, Glycine max
tcgagtcagctacgtaggcccccccccgaactcaccaagcactatgctacaagcccaacaaacttggttttaattggtataggcgtgccaaggtcttgttaattttgagcgttaagtgctgcaactaatcagatcccaagaccttggcctaccttgccatacagaaaaaaaaaaagcaaaaaaaaagccaaggtttggagccaacaaaaataaacacaaagcacaagtcatggaaagaataatggttggaagtgcaacaaaggttgctttcaccctcttggccactttcgccattgtcattccatgccttgaggctggcattgctgagtttgacgattttctcaaagcccaagctgatgaagcccataaaattgctcttgattcctatgtcccagagccccacgatgtcgcccatgaactcaatttccatgttcatatggcactggaaaactccacaaggagggaactaaggcagaggaaacttagaggaggaggcaaatgtcaagcctccaaccccattgacgcttgctggagatgcaataaagactgggccaatgaccggttcaggctagccaagtgcggcaaagggttcggaagacgggccaccggcgggctcggtggtcccatctatgtcgtcaccgataattccgatgacgacatggtgaaccctaagccgggaactatccgtcacgctgtcacccaaaaaggccccttgtggatcatcttcggacacagcatgatcatcagtttgaggcaagagctgatgatttcctccgacaagaccatcgatggtcgtggcgcaaacgtgcaatttaggggcggtgctggcctcaccattcagttcgtgaacaacgttattatccacggagttcgcatcaaggacatcgtacctaaggatggtggcatgattagggactccgccgaccattatggattgagaacaaggagtgatggtgatgccatctccatttttggatccaccaacatttggatcgatcatgtttccctctctaactgtgccgatggtcttatcgatatcatccaaggctccactgccatcaccatctcaaattgccacatgaccaaacataatgatgtgtttctctttggtgctagtgactcatacaacggagacaagatcatgcagatcacagtggcattcaaccacttcgggcaaggactggtccagaggatgccaaggtgcagatggggtttcgtgcacgtcctcaacaacgactacacccactggttgatgtatgcaatcggtgggagctcagggccaacaattctgagccaaggaaaccgtttcattgctccgaacaacgacaacgccaaggagatcactcacagggactacgccggacccgatgtgtggaagaattggcagtggcaatcagaaatggaccttttcatgaatggtgcaaagttcgtcacttcaggctcacccatcaagatgacatacaaaaagggtctcatcatgaagccaagagatggaactcatgtcagcaggttgacacgacatgctggtgccctaaactgcttcgttggcaagccttgttagagaacaacaaacattaatgttgttgttgttgttcgctttttctttttttttttggaaagaaaaaaaaaaccacattgcacagaagatttaagctactcctcttgctaggatgagtttgcgtcttctgcaaaacaagcttgttgttggccttgtaagagctagaaaaagagagaatttgttgcttgggttcaaatgagaagaaataaagttccaacttgtttgtaactttttttttgggggggtttaagttgtttgtaactttgtccccttttgtttttctttaatataatttgtgcctgttgaaaggcatgtttcgaaacctgttcaggaggggccgccaatgtgaaaccaaatactctaatttggtttatgg

SEQ ID NO: 6817 - DNA, 2093 bp, Glycine max
tcagctacgtaggcccccccccccgaactcaccaagcactatgcaacaagccaaacaaacttggttttaattggtataggcttgccaaggtcttgttgattgagcgttaagtgctttaactaatcaatcccaagaccttggtttaccttgccacacaaaaaaatatataaaaaggcaaaataataataaaaaaaagagaaggcttggagccaagaaaataaacacaaagcacaagtcatggaaagaataatggttggaagtgcaacaaaggttgctttcaacctcttggtcactttcgccattgtcattccatgccttgaggctggcattgctgagtttgatgactttctcaaagcccaagctgatgaagcacaaaaaattgctcttgaggcctatgtcccagtgccagaagatgtcaccgacgaactcaatttccatgttcatttgtcattagaaaactccacaaggagggaactaaggcaaaggaagggtagatcaggaaaaaaatgtgttgccagcaaccctattgacacttgctggagatgcaacaaaaactgggccaatgaccggtacaggttagccaagtgcggcaaagggttcggaagacgggccaccggtggtctcggtggccccatctatgtcgtcaccgataattccgatgacgacatggtgaaccctaagccaggaaccatccgtcacgccgtgacccaacggggccccttgtggatcatcttccaacgcagcatgatgatcaaattgaatcaagagctgatgatttcctccgacaagaccatcgacggtcgcggcgccaacgtggtgtttagggacggcgctggcctcaccattcagttcgtgaacaacgttatcatccacggagttcgcatcaagaacatcgtacctaaggagggtggcatgattagagactcttacaaccatgttggcctgagaacaaagagtgatggtgatgccatctccattcggagccagcaacgtttggatcgatcatgtttccctctctaactgtgctgatggtcttatcgacgtcatccagggctccactgccatcaccatctcaaattgccacatgaccaaacataacgatgtcatgctgtttggtgctagtgactcatacagcggagacaagataatgcagataacagtggcattcaaccacttcgggcaaggactggttcagaggatgccaaggtgcagatggggtttcgtgcatgtcctcaacaatgactacacccactggatgatgtacgcaattggtggaagctcagggccaacaattctgagccaaggaaaccgtttcatagctccgaacaacaacgccgcgaagctgatcacacacagggactatgctgaattccaagtgtggaagaattggcagtgacaatcagaaatggacttgttcataaacggtgcacagttcatcccttcaggctcacccatcaagacgacctacaaaaagggtctcctcatgaagccaagagatggaactcatgctagtagattgacacgaaattccggtgccctaaactgcatagttggtaggccttgttagacaaattagttaacattaattgttgttgctgttggttttttttttcttcctccatttttttaaaatgttagaaagcatgcacccatgcatgcatgcacagaagattcatgtcagctaggatgaatttgtttcttctgcaaaactagcattgttggccttgtaagagcgagaaaaagagagaatttgttgcttgggttcaattgagaagaaataaagttccaacttatttgtaaaaaaaaaaaaaaaaagaattcctgcagccccgggggatcccctagttctaaaagcggccgcacccgggggggagctccagctttttgtccctttaagggaggggtaatttccaggctggcggaaacatgggccatagctggttcctgggggaaaattgtatcccgctcaaaattccccccaactaaacaacccgaaaactataaggggaaagccgtgggggggcctaatgagggggcttacccccccttaatttggggtggggcccctgggccccttttctcaagagggaaaa

SEQ ID NO: 6818 - DNA, 752 bp, Glycine max
  misc_feature (705)..(706): n is a, c, g, or t
  misc_feature (715)..(724): n is a, c, g, or t
  misc_feature (736)..(737): n is a, c, g, or t
  misc_feature (749)..(751): n is a, c, g, or t
tttataacttataagagagtaaaaacatattattctaatctttattttctgcatatcattccaaattctaaatggaaagaaaaatcactactttacattgatataatcagtcaacgcttgatctttacacatgaaatttagtccaatgcatggaaaaaacaagtaacaaccatgtttgcaaccatacttttaaaatgtttacacatttcaacaaagaactaatgcggctcaaatcaccatcaatcatcatcatccatatttttaagatatggtcaaaactttttatgtaggcaatgacttagcaatctatagaaatgcaggtctgggaaatgcttgcactgtcaggtctgctgataaaagggttaatcttgacccaaaccagagagaaaacagaagccaacagcactgaccacagaataacaatggttggagtgcggttttggcgacccatgagacccttgaggaatgggtagagatggaaaatgacccagaaggcaaagaagacctttccaaaaagtggtccccatgattcatatcctccattgagtgcatcagaaaatccagcaacaacaccaactatattaataatgataaggggttgttggaggaattaagagtgtggtccacttgattatatatagttcaccaaactcagtgtcatcagcagctttagcagtgacagtgaagttagtgtcaacaccagcnnacatcttcnnnnnnnnnnggaacacagcanntagatgggctgnnnc

SEQ ID NO: 6819 - DNA, 937 bp, Glycine max
cgcgtccgacggctgcgaagacgacagaaggagacaaccaattccattattaaagggataagcctcaaccttgcaacccaacacaaccaaaattcgctacttgttaagggctgcactataccagaatgtctcagggaagaggcagtgcatctttgcctattgtggtcactgtggtttcactactgtgccttttggaacgtgctaacgcagcaacttactccgttggaggacctgggggatggaccttcaacactaatgcttggcccaatggaaaaagattcagagctggtgatatcctaatcttcaactatgactcaacgacccacaatgtggttgctgtggacagaagtggatacaacagctgcaagacaccagggggtgctaaagtgttcagttcagggaaggaccaaatcaaactagcaagagggcagaactacttcatatgtaactaccctggtcactgcgaatctgggatgaaagttgccattaatgcgctgtgatatactagtagtgctcaatacttcttgaaatgaagtaactgttaagttaatggtcaattaactagcattagtaaatgttagtgtgtgatattgtatgtagtcttttttttatatgaagctgttatatatattaattactatagtttgtgaagcaagtgggagtgagctggcttggtagatcaattgttcctgtatttggtatgtgttgtgtggtgggagtatgataatggtccattagtcacgggctcttcttattagacattggatctgcatattttgaaattattcaagtctgagccaattatctgtatctagtgtctcggtgtcacagtgtgtggttgtattactgaatttgttgccttcaataaattaaattttctacaaaaaaaaaaaaaaaaaaaaacgagaagaagggcagcacaattgaaacaagtaat

SEQ ID NO: 6820 - DNA, 905 bp, Glycine max
tacggctgcgagaagacgacagaagggggacacaatcaatcccattattaaagggataagccttcaaccttgcaacacaacactacaacctaaggtctgcactacgagaatgtctcagggaagaggcagtgcatctttacctattgtggtcactgtggtttcactactgtgccttttggttcttttggaacgtgctgatgcagcaacttacaccgttggaggacctgggggatggaccttcaacactaatgcttggcccaaaggaaaaagattcagagctggtgatatcctaatcttcaattatgattcaacgacccacaatgtggttgctgtggacagaagtggatacaacagctgcaaaacgccagggggtgctaaagtgttcagttcagggaaggaccaaatcaaactagcaagagggcagaactacttcatatgcaactaccctggtcactgcgaatctgggatgaaagttgccattaatgcagtgtgatggtgcttaatacttcttgagttgaagtgaaaattaagttaatggtcaattagctagcattagtaaatgttagtgtgtgctcatgtatgtactttttttatatgaagctgttatatatatttattaatcactatagttttgtgaagcaaagtgggagtgagctggcttggtagatcaattgttcctatgtttggtatgtgttgtgtagtgggagtataaaaatggtccattagtcacgggctcttcttattagacattggatctacatattttgaagttattgaaagtctcagagccaattatctgtatctgtgtgtcggtgtcacagtgtatggttctattactgattttgtttgcttcaataaattaaatttcctaaaaaaaaaaaaaaaaaaaaaaaaaaaaataaaaa

SEQ ID NO: 6821 - DNA, 2374 bp, Glycine max
aagttaaatttttttttttttttttttgttattataatctttattttctgcatatcattcgaatttctaaatggaaagaaaaatcactattttacattgatataatgagtcaacggttgatctttacacaggaaatttcatccaatgcatggaaaagaagtaacaaccatgtttgcaaccttacatttaaagtgcttacacatttcaactgcggctcaaatcacaatcaatcatcatcatcatccatatttttaacatatggtcaaaactttttatataggcagatgacttagcaatctatagaaatgcaggtctgggaaatgcttgcactgtcaggtctgctgataaaagggttaatcttgacccaaaccagagagaaaacagaagccaacaacactgaccacagaataacaatggttggggtgcggttttggcgacccatgagacccttgaggaatggatagagatggaaaatgacccagaaggcaaagaaaacctttccaaaaagtggtccccaagactcatatcctccattgagtgcatcagaaaatccagcaacaacaccaaccatattaataatgataagggttgttggaggaattaagagtgtggtccacttgattatgtatagatcaccaaactcggtgtcatcagcagctttggcagtgacagtgaagttggtgtcaacacctgccaacatcttcaggaatccttggaacacggcaaatagatgcgctgaaactcctccaataacccagaattgttcattacgccacaaagcttcaatggtcacaccactccaccgcagctcgagcacactagtgactataatggacaggaaaagtccaagaaagagggcacttgcaaggtttgaaagcgttggtatgatgaattttcctgtgagaaggcaaattgcaggcaaagtacaatatgcaacaagaggaagggatgtaaaggggtagacaatggtgtttatgtaagcaagtctctgcagccatttgaggcgacctcccgcaaaaccataccagagggggcaatgtctgctgaagaaaatttcaactgatccaagggcccatcgaagaacttggtgcaaacgatcagaaagattgattggtgctgatcctttgaatgcaggccttaagggcatgcagtaaactgatctccatccccggcattgcatcttgaaccccgttaagatatcctcagtaactgaaccatagatccaaccaatctcttttccccatgcagttttctcttcatatccacagctaataacatgaatggcctctttgatcagcattgagggatcagcagattcaggaagccctccattctccattagtgtagattcaatgaaaacagtggacaaaccaaatgttttctcaaagctcatttgtgaaatcagcattgacctctcgtattcatcatagttgtcaatctccctgagattaaaaatggcggcatcaagttcttccctctttgcatctctataaagctctgagacgtctttggtttgcttctttgaggggcagcaacagcaggatgatgattttggtaatttgggcatagatggtggactgtagccataaagtgcttgtctattgaaaacacatccagttcccacatacataggtccttgaatgccatcaagtcctttcatgttaacatcaaagaaaactgtgtttcgattggcatatcgatcactacgatctataccatcaaatctctggggaaactgcacataacacaaatctctgccaactactggatccatcagaaaacacattgcttcccgtacagccttgctattgttcacataatgatcacagtcaagattgagaatgaagggagcatttgtgagaactgcagacaccctcaccagtgcattttcagcaccagcctttttgtggtgttggtagcctggccttttctctctagaaacatacaccaacctgggaagttcatttccctctatgtcatgggcaccactgtgtccaaggaaaacctgaatcatgccagggtgatcacgtgagttgtttcctggccatgaagttccatcttgcatagtccatccttcatctggtgttttctgagcctttgctaccaaagcattaactcgcactttaaactcttcatactccctcttcattgctctacgttccttcacaaaagaaggttgtactttgtccttcaggtagtcaatcttctgagagaagtagaactcaggtgcgcgtggttcaattgaaaactttttgcaaaatggaacccactttcttgcaaagtcagctgtctccacaagggactcaaatgacagcattgcagcaccatcatctgacacataacaggatacgggggggggggcctacgtagctga

SEQ ID NO: 6822 - DNA, 1322 bp, Glycine max
tcgagtcagctacgtaggccccccccccccgaataagacatatattaaaaattatacctttgttgactatttgagacactgttagattttcaagacccattctttacatagaaacaaacaaaccaataaaaaaattgctaaatttctcccatcagatcactgcataatcataatgctgttcttcttatatcatctttattgattcattttttttctctctctttctctcaaaggtcgtgtgtcagggactcagaagagagagatcacaaatatcacgtacctactactcctagcaaaaaaatcacacaactcgtgctggggttcagaaagactgaaactttctccttaaaaacttggtgggtattaatgatctttgcctccctgagtcattacatgaagattctctacttgggtgttcaaaatgttggttactgaggacaagtctcatgtcgttgttgccatagacaatgatggctgttgtcaccggagctctgccggcggcgagggtttcgccgacgccggcgaacggtcagatgaggagcaaaggtcctctcatgattctggcaccgagattgtgggagtgtgtgagaaggagagaggatcagagtgttctgtggaggtggatctggttcctgaggttaaggtgcatttggccaatgtggagagggattgtaggatttgccatctcagcatggatatgaccaaccatgaatctgggacttccattgaattgggatgctcttgcaaggatgatttggctgctgctcacaagcagtgtgctgaggtttggttcaagatcaagggaaacaaaacttgtgaaatctgtggatcggttgcacgcaatgtagctggagctattgaaattcaaatgacagaacagtggaatgaggcaaatgatgcttccacggccccaccatctggaccagcaccacccacagaaactcgaaatttctggcagggtcaccgttttttgaatttcctgctagcctgtatggtctttgcctttgtcatatcctggctttttcactttaatgtgccctcttgaattcctgtgtaacttgaggatgaagcagattaagatgatggggggttattagaccaatctatggctcttaacacaggtatcaaactcaatacctgtgcttgcttagttgattgggatctgtgtctttctttccacatgatgttcatatgtgtatttttatttgttgtatttttgttggtcttattttgctcaacttagaatagcaccatggatgtttatcgctattttcttaattaaatttatatatcattctcgctggaaaaaaaaaaaaaaaaaa

SEQ ID NO: 6823 - DNA, 1459 bp, Glycine max
gcgggggcgcccacgcgtacacgacagaaaattgatgaggactttgacttcagtacaagatgttgtctttgtgttctccaactacaatctaatgaacccaaccacctacggcacacggaaagaatttcgttgtagtgttcattacacccaacaaccaagtgcagcaatcaccaaaaaagaagaaggcaaatcaaagttttgaaccttggttcaatatctagagtccctgcaagctcaacacatcagagataatcaaaatgcatcctgcgcagatcgttttgtatggatcaactttatgtgtcatgataacagtgcacttctccatgaagctactcgctgaacatgttttgaactggaagaaaccaaaggagcaaaaggccatagtaattataatccttatggccccattgtacgctgtggactcctatgttggtttgataaatttctttggaagtgaagcatttttcacattcttggactcaattaaagagtgctatgaagctctggtgattgctaagtttttgggcttgatgtacaattatctaaacatctccttaagtaagaacatagtgccggatgaaatcaagggaagagaaattcatcattcattcccaatgactctttttcagcctcacactactcgtctggaccataaaacactgaagcttctcaaaaactggacttggcaatttgttgtgatacgtccagtgtgctcaatcttgatgataactctacagtatcttgatgtttatcccacttgggtcagctggataaacacagtcattctgaacatttcagtgtcactggcattgtattctcttgttgttttctaccatgtgttttctaaagagctggagccacataagcctcttgccaagtttttatgcataaaggggattgtctttttctgcttttggcagggaattgtgcttgatctcctggcagcactaggaataatccgatcccgttattcctggctagctgtggaacgcattgaggaaggctaccaaaaccttttggtttgtgttgaaatggttttcttctcaatatatcagcaatatgcatacagtgctgctccatacaaagttaacagtgcaccttcagataaaaagtcaaagtgattccaggacatggattacttggctgttaaagaacatcaatgtatgtactttcaatatgagtgttgcttctctcccacttctcttccatgagacaattagtaaacaaatgtgtggcagagtcttttgaataagatccagatacattgatgcctattctaatgatctagaaagttttatccaacatttctgcttggattttctgctttaattatttgtatttgtcttgactcattgcagacctaattacatttgtggtcttacaccaacagaaaccctaaaccccgagttacaagctatttactattacatacatgattacaacctttttttgtgtgctt

SEQ ID NO: 6824 - DNA, 1625 bp, Glycine max
taaaggtagaaacaagaagaaagggataagaacaaacaaaatccaagagagagagaatgaaaatggtggtgttagtctatgaacagtcaccctgacctgagtaaaatttccatttccagaacctcaaatcaaactcttctattcctttctctcatcaatcaattcagttctctcccactcagataggaatgggaatatatctcagcagtccaaaaactgaaaagttttctgaagatggtgaaaatgactgtcttagatatggtttatcgtccatgcaagggtggcgtgcaacaatggaagatgctcatgctgcatatactgatctggatgagtccacttcattttttggtgtctatgatggtcatggaggtaaggtggttgcaaagttttgtgccaagtttcttcatcaacaggtgctcaaaagtgagacatacttaactggagatataggaacctcccttcagaaagcctttttaagaatggatgaaatgatgcgtggtcaaaagggatggagggaattatcaatattgggggataagataaacaagtttactgggatgatagaagggttgatttggtctccacgaagcagtgatggtaattgccaagttgatgattggggtcttgaggaggggcctcattctgattttgctggaccaacttcgggaagcactgcctgtgttgccgttattagaaacaaccaacttgttgttgcaaatgctggtgattcgcgttgtgtgatatctcggaagggccaggcatacaatttgtctagagaccacaaacctgatcttgagattgagaaggacagaatcttaaaagctggtggttttattcatgcaggacgagttaatggaagtttaaatcttgcaagagctattggtgacatggaatttaaacagaataagtttcttcctgctgaaaaacaaattgtaactgccaatccagacataaacactgttgagctttgtgacgaagatgaatttgtggtgttagcttgtgatggcatatgggattgcatgtcaagtcaacaactggtagattttgttcgtgaacaattgcacttgaaaacgaaactttctgcagtgtgcgaaagcgtacttgaccggtgtttggcaccatcaactgctggtggtgaaggatgtgacaatatgaccatgatcgtggtgcagttcaaaagacctgctcagtccagtgcaccagcagaagagcaatcctcttcttcaaacggacaagctgaacctgaaacaaaactagagagaagtgaaagttagtattattcctcagtgacagttcaaatattgatcatatgtatgtagtgtgcaacagtgattagaatgcgtccgcatggtcattttcctttcatcccacattatacaccactgctatattccaattaccataaagaataccagtttttctcccgtttcttctcaaaaaaaaaaaaaaaagactcttaaaaagtctgttttgcatattcaacatgcggctccaaaaatcagtaattgtagttataatcaaccatctgcaagaatgctactagctcagtaaagagtgtttatgctaaagaggaacataacctaaaatgggtgatgtcttcttttcatagacaaatatttgtagcc

SEQ ID NO: 6825 - DNA, 1625 bp, Glycine max
tacggctgcgagaagacgacagaaggggagagaaacaacaagaaagagatgagaacaaacaagaatcaagagagagaggtgttactacgttagtctatgaacagtcaccccgagagactgaaatttccagaccctcaaatcaaactcttctattctctcatcaatcaatcaatccagttccctctcggataggaatgggaatatatctcagcactccaaaaactgaaaagttttctgaagatggtgaaaatgactgtcttagatatggtttatcatccatgcaagggtggcgtgcaacaatggaagatgctcatgctgcatatactgatctggatgagtccacttcattttttggtgtctatgatggccatggaggtaaggtggttgcaaagttttgtgccaagtttcttcatcaacagttgttcaaaagtgagacatacttaactggagatataggagcctcccttcagaaagcctttttgagaatggatgaaatgatgcgtggtcaaaggggatggagggaattatcaatattgggggataagataaacaagtttactgggatgatagaagggttgatttggtctccacgaagcagtgatgggaattgccatgttgatgattgggcttttgaggaggggcctcattctgattttgctggaccaacttcaggaagcactgcctgtgttgcagttattagaaacaaccaacttgttgttgcaaatgctggtgattcgcgttgtgtgatatccaggaagggccaggcatacaatttgtctagagaccacaaacctgatcttgagattgagaaggaaagaatcttaaaagctggtggtttcattcacgtaggacgagtcaatggaagtttaaatcttgcaagagctattggtgacatggaatttaaacagaataagtttctttctgctgaaaaacaaattgtaactgccaatccagacatcaacactgttgagctttgtgacgaagatgagtttgtggtgttagcttgtgatggcatatgggattgcatgtcaagtcaacaactggttgattttgttcatgaacaattgcactcggaaacaaaactttctgccgtgtgtgaaagagtacttgatcggtgtttggcaccatcaactgccagtggtgaaggatgtgacaacatgaccatgattgtggtgcagttcaaaagacctgctcagtccagtgtaccagcagaagagtcctcttcaaactgacaagctgaacctgaaacaaaactagagagaagtgagagttagcattattcctcagtgacagttcaaatattgtatcatatatatatatataatatatatgtgtgtgtttagtgtgcaacagtgattagaatgcgtccgcatggtcatcttcctttcatcccacattatacacaactgctattccaattaccgtaaagaatagtaccagtttttctcccgtttcttctctctcgtgtctacttttcactctaaaaagtctgttctgtatattcaatgcggctccaaatatcagtaattgtagttataatcaacaatatgcaagaatgctactagctcgggtttaagctaaagagaaacataacctaaaatgggtgatgtcttcttgacatagac

SEQ ID NO: 6826 - DNA, 771 bp, Glycine max
tcagctacgtaggcccccccccccccccatattcttctcattttgcttctttgctttcataactttagtgcccaattggacttctttgtttgctttcaacttacaatttctgtggaggagtttgtaacatggctgctctaccaacggcggagcttagtgacgcaaatgcaacacatgtagcaagttgtgatgtgagggtgttgcatccagtgttcaaggtttacggtggggccaccgcgttctccggccccgttgtcaccgtgaaggtgtttgaagacaacgtgttggtgagggagcttcttgagacgaaaggcgaaggaagagtattggttgttgatggaggaggaagcttgaggtgtgcattggtgggagggaatttggcactgattgcacataacatgggttgggctgggattgtggtgaatggctgcatcagagatgtggatgagatcaatgcaagtgatattggcgtcagagccttggcttctcatccactcagatccaacaaaaagcgcactggtgaaaagaatgtccctgtttatgttggtggaacatttattcgagaaggagaatggttgtatgctgataatgatggcatcctcgtatcaaaatttgagttgtcaaactaaaatagtttgccttcagttcaatattattgccattgggatgccattttagatttttaggtcaggctctttctggttggtttagtttgtggggaagtgaataaaattttaagaatttcttgtgtgccaaaaaaaaaaaaaaaaa

SEQ ID NO: 6827 - DNA, 483 bp, Glycine max
gcgtccggttctagatcgcgatctagaactagccaattcactctttttcttctcgccctctgccgtgggaggagtttgtaacatggctgctctaccaacggcggagcttagtgacgcaaatgcaacacatgtagcaagttgtgatgtgagggtgttgcatccagtgttcaaggtttacggtggggccaccgcgttctccggccccgttgtcaccgtgaaggtgtttgaagacaacgtgttggtgagggagcttcttgagacgaaaggcgaaggaagagtattggttgttgatggaggaggaagcttgaggtgtgcattggtgggagggaatttggcactgattgcacataacatgggttgggctgggattgtggtgaatggctgcatcagagatgtggatgagatcaatgcaagtgatattggcgtcagagccttggcttctcatccactcagatccaacaaaaagcgcactggtgaaaagaa

SEQ ID NO: 6828 - DNA, 1373 bp, Glycine max
aaaactaaaatatctggacataatagtcgagttgctgcgagaagacgacagcagggggaagaaaaataaagttattattaaaactgaaatatccaaaagtcagaagatggcattgcgaggattgagtgcggtggcggtgacggcgtcaatacgccctcccggtcctcgattcagagtagacagcggcacatcaaggattccctcttccggatgcagaatctcggtgcggtgtaaagctgtcggagaaagccgacaaggttccttggaggaaaccgttgtttatgagggtatttatggcccctggaccattgacgactccgatgttcgagaggtaattttgtacagatcaggattggtaacagctgctgcatcatttgtggtcgctggttctgctgccttttttcccgatactctgaagcagaatgttgatttattgtatgtccttgggtctggtgggttgggtttatcgttgctcttgattcacatatatgtgtctgagatcaagcgcgccctacaagcactatgggggcttggtgttgttggatcggccacaacctacttttgccttgctcaaccagctaataagaatctaatacaatatgttgttgacaacccatcagctgtctggcttgtcggtcctctttttgctgccttgacaggacttgtcttcaaggaaggactctgctatgccaagcttgaagctggacttctcacctttgttattcccatacttcttcttggccatctgactggtttgatggatgatggagttaagcttactttacttgcttcgtggatgactctttttgtgatatttgctggaaggaaattcacccagcccatcaaggatgacatcggtgacaagtctgttttcatgttcaattctcttcctggtgacgagaggaaagccttgcttgagaaattagaacagcaaaaaattcagaattaagatggattgctttaactggatgtgggaaaattttgaaaggaccatctcacgctctgtgagcaattatcccatgtaaaaggaaatattttcagcccctcccctagaaattaaagatgataccacagttactaaaccactttcccatgtcttccttgatctctgcaaaagttacactacatggtctatactatacacatatatttagggtcgttgtcctgtgcaaatgataatgcatgcttgactcagaacctgcagaatgacaatttagtgaaggttggtttgtgtagaagtgtttcatttagttcgtttattaattaaacaagtattatattatcagtacatgaactaaacaaaaagtctctatgataattaataattatgcatgcttgcagtccaataaaaaaaaataaatatattataaata

SEQ ID NO: 6829 - DNA, 584 bp, Glycine max
atcacccactcactcacactccctcggccttcactcacacaccaactaagcccacggagcaagcacactagctagtttctgccatggcagctcgccgtgcccacgccgccgcgaccttggccctgctggtggcggcgcttgtgctgtctgcggcaccggcgccggcggagggtgcggttgcgaactgcggccaggtggtgagctacctggccccgtgcatcagttacgccatgggcagggtgagtgcgcctggcggtggctgctgcagcggcgtgcgtggccttaacgcggcggctgccacccccgccgaccgcaagaccacctgcacctgcctcaagcagcaggcgagcggcataggcggcatcaagcccaacctcgtcgctggcatccccggcaagtgcggcgtcaacatcccctacgccatcagccaaggaaccgattgctccaaggtgcgttaagcgtgagatcagaaccatttcagatgcatggtgagagcgaaataaatcgtggaagccggccgtccttgctgcatggctcccccgcgtttaaattactgctttacctagtctactggttccctaaaa

SEQ ID NO: 6830 - DNA, 1317 bp, Glycine max
acctaaactaaactaaacaaaagagaaataaataataaaaaggcgccgctgagagaacaaccggagggggaagagaagaggatgaataagagtgggggaggagagatgagtaagtggccgttcacaatgtctcagtggcaggaactggaacatcaagctttgatttacaaatacatggtggctggtcttcctgtccctcctgatctagtccttcccattcagaacagcttccactccatttcccaaaccttcttgcaccatccctctaccaccatgagttattgttccttctatgggaagaaggtggacccggagccaggacgatgcaggaggactgatgggaaaaagtggaggtgctccaaggaagcctacccagactccaagtactgtgagcgacacatgcaccgtggccgcaaccgttcaagaaagcctgtggaatcacaaactatgactcagtcatcatctaatgtgtcatcattgactgtaactgctggcagcagcagcagtgcaactggaaatttccataaccttaccaccacaaatgcatatggtaatccccaagggactggttctggatcagaccaaacccactatcacatggattccattccctatgggatcccaagtaaagaatacaggtattttcaaggacctaaatctgagggaggtgaacatagtttcttgtccaaaactttaggaagcaacaaggttcttcacatggagtcacagatggataacactttgatgccaaccagtggagttgcctcattctctacattgagatcaaataataattccatgttgcagggtgattatctgcagccttctttcttatctagtgagtatgcctcagcagaaactgtgaagcaagagggtcagttccttcgacctttctttgatgaatggcctaaaaggagggactcatggtctggtctggaagatgagggatccaaccacactcaactctcaatatccattcctatgtcagcatcaaatttctctacaactagctctcattccccacatggtgagatttaaattaggccatgttgaatgaaaccacctgaatcctgtaattatattgctgcagacaactaagaaccgcccctttgggttctgaaaggaccaaagagcccctttagtttcgactctagctcccgtgttttgtgcactttctgttgagcaagttgtctaccactgtggaacttcatctggtgggtggattttaatagaatccatcaactttcttgttttccgtctaatgaacaaactacagtattttgtcctgatttaatggatgccaaaaaaaaaaaaaaa

SEQ ID NO: 6831 - DNA, 2520 bp, Glycine max
ccacgcgtccgaaaaattgtccagattttttccaacaaagcaaaggcggtgagacatgtatgtggaagaaagtagcacctcttctgcttagctaaacccccgaacgcagctgcgccactcgtttcatgcctcagcctctcgcctcggcgtgattgctaccaccttgttcgattcattcgtgtgatgttgtatgggttgaacaagggacagagattgcttcgggaatggagtgggacagcaattccgatctgagcggggacgaagaggaggaagggttcgtcttcaacgacggcgacgacgctggccctctcccgttccccttccccgtcgtcgaaaacctcctccaaacggctccctgcggcttcgtcgtcaccgacgcgcacgagcctgacaaccctatcatttacgtcaacaccgtcttcgagatcgtcaccggataccgcgccgaggacgttctcggccggaattgccgtttcttgcagtgtcgaggtccatttgctaagagaaggcatccgttggtggactcaacagtagtttcagaaattagaagatgccttgaagaggggattgaattccaaggtgagttgctgaactttaggaaagatggatctcctctgatgaacagattgcggctgacacctatatatggagatgatgagactataacacatgtcattggaatccagttcttcacagaggcaaacattgatcttggtcctgttccgggttctacaattaaggaatctgctaaatcgtctgatcgatttcgttccgtgctttcctcgttgcagactcttccagtggggggcaggaatgtatctcgtggagtttgtgggatttttcaactgagtgatgaggtactgtctctcaagatacttgctcaattaactcctagagatattgcatcagttagctctgtctgtagacgattatatgagctgacaaaaaacgaagacctctggagaatggtttgccaaaatgcatggggcagtgagactacacatgttttagagactgtgcctggtgcaaggagacttggatggggtcggctggcaagggaattgaccactcttgaagcagcagcatggaggaagttgactgttggaggtgctgttgaaccctcacgctgtaattttagtgcttgtgcagttggtaatagagttgtgcttgctgcgagaagacgacagaaggggcaacccatgaatgacacctttgtattggatctcaattctagtaatcctgagtggcaacacgtccaggtaagctctcctcctcctggtcgttggggccacacgctttcttgtgttaatggttctcatttggttgtatttggaggctgtggaaggcagggcttgctcaatgatgtgtttgtcctggacctggatgcaaagcctccaacttggcgtgaaatttctggattggcacctccacttcccagatcatggcacagctcctgtactcttgatggtactaagttgatagtttctgggggatgtgcagactctggagttctcttgagtgacactttcctccttgatttgtcaatggagaagcctgtctggagagagataccagtggcatggaccccaccatctcgtctgggccacacattgtctgtttatggtggtaggaaaatactgatgtttgggggtctggccaagagtggccccttgcgttttcgttccagtgatgtattcacaatggatttaagtgaggaagaaccttgttggagatgtgtgacagggagtggcatgcctggtgctggaaatcctgggggcatagctcctcctcctagacttgatcatgttgctgttagtcttccaggtgggagaattctaatatttggtgggtctgttgctggtcttcactctgcctctcagctttacattcttgatccaactgatgagaagcctacatggagaatcctaaatgtacctgggtgccctccaagatttgcttggggacacagtacatgtgttgttggaggaacaagagctatcgtactgggtggtcaaaccggggaggaatggatgctaagcgagctccatgaactttccttggctagctctgccatctaaatccagtgaataaacactgttgtattgaagggaatactacacggctctgcttgatgtcgtgaatttgaacataagttagcgggaaaggttgcattagcgggaatggatgctaagcattgctctggtcagaatgtgtatatcaagttgttacgacaatgcatttgcttgaatggttggttctggctcgagaataacttctcgttgagtgacatgagacgaagttttttttgaggtttgtgagactttgcccttcagtacgcataatgaattattcttcctgaacagaatattagtggtaatatattagggtagtttctcacttgattttccatgtgttgtcttgttcaaattctgtaatttgaatcacgataaagagaaaagaagaagaagaaaaaaaaattgtatgttttttaccgtaattagatctattatatttgatggg

SEQ ID NO: 6832 - DNA, 1286 bp, Glycine max
ttctccgtgggaatgatccgaagaggctcagaaaaaagggcaacttcgcaactcgtgaatcgattactgtagaaattgtcgtcgattctatataaaacatattaggcactggctaccattttgaattctggttgagggattgaagtgtgattataggtggaggaggatggcttgtaggggatgctgggaatgccttttgaagcttttgaacttcatattgactcttgctggtctggccatggtgggctacgggatttatctgtttgttgaatacaataaagcttgggataatactctcaatttcagtgaggataaaacggaagttcaatttggcagacccatgctagtggttgtgtctctgtccaacagttttttagatgagttgcccaaggcttggtttatttacttatttattggaattggtgcggtcctctttgtcatttcttgtttcggttgtattgcagctctgacacggaatggatgctgcctgagcttttattcagttttagtgttgttgttgatcttagtggagctgggatgtgcagcctttatattttttgacaaaagctggaaagaagaaattcctaaggacaaaactggagattttgatatgatatatgaatttctgagagagaactggaatgttgtgagatgggttgctcttggaattgtcatctttgaggctcttctttttgtattagcccttattgtcagggctgcaaacaggccaccagagtatgatagtgatgaagagtacattaatccaaggcagcaagttcgtcagcctttgctaaacagaccagcaggccctgcatcaggtgcgccagcaactggcacacttgataagcgtccaagcagaaatgatgcatggagtgcacggatgagggagaagtacgggctggatacttcagaatttacttacaacccatcagaatcacataggtaccagcaagtaaaccctcagccaactgaagaaagaagccgctgtgccatcatgtgatcactttgcattgctccaaaattgcagcaaattgaatttcaatgattgtttttgtgggaaatggtgctgaggctaagtttgtcagaaaacactattttgcatagtttgtgtatcattcacactttactggatctccttcactttttttttcatgacatggcagcaacatcttcattctgttgtgcgtaacattctgccgagtgaacaagagtttattgtgtctttgttatgttcatagtttattggagtaaatgaagttttttgttacgaaaaaaaaaaaaaaaaa

SEQ ID NO: 6833 - DNA, 624 bp, Glycine max
  misc_feature (59)..(59): n is a, c, g, or t
caggagcaaataagaaatttgaattcccggtgaaatggggtagtgatcttcagagtgancatgagcgttatataactgaagaggcattcagtggatgcccagtgataattagagactatccaaaggatattaaagcattctatatgcgacagaatgatgatggacggacagttgcagccatggacatgttggttccagggattggtgaacttattggtggaagccaaagagaagaaaggcttgagtatctagaagctcttttagatgatttaaagctgaataaggatgcatattggtggtatcttgatttgcgtcgatatggttcagtacctcatgcaggctttggtttggggtttgaaagacttgtccaatttgcaacaggaatggacaatataagggacgttattccttttcctcgaacacctggctcggctgagttttagaccttgcagatataagcacttcacttcacattcatttgtacgattcaaactgtattttaggcaataaagtatcttgagtctttccttttcttctttttgttttgaaaaagaaaactgcttgcttctaaatgaagtatttatacattatgaatttagtagaatggaattttgaggcaaataa

SEQ ID NO: 6834 - DNA, 2000 bp, Glycine max
gtgaaatcgatcagccgcgggggcccccccccctgtcggagagtgagtagggtgtggtcggcgaggcaccaccaccaccaacaagcaaatggctgctaccattggcgttggcgccgcaaaagccatatcaatcgcaatagcagttaggcacctccgaacaaaaccttacgcagcagcaacaacaacagcacttgctcttctttcactccacaaacctctcttcctccctcattcctctcccttctcctctcgccgcgctttttgcgccgcgacgcttcgcacctccgacaacagagtgcaacagttccgcaggaagcttagggtttccgaaatcaaagaaggcgacggcgccgacgtgctcggccgcaacctagtcgtgcagggctgggtccgcacgcttcgcattcagagtagcgtcaccttcctcgagattaacgatggttcttgcctttctaacatgcaatgtgtgttgaattcggaggctgaaggttacgatcaggtagaatctggcttggttaccactggtgcttcagtgtgggtgcaaggagttgtggtgaagagtcaaggatcgaaacagaaagttgaattgaaggtcaacaaaatagtactgattggcaaaagcgatccctcctttcccatccaaaagaaaagagccagcagagaatttctaagaacaaaagcacatcttcgtgcgaggacaaatacttttggtgcagttgcaagggttaggaatgcattggcatatgctacacataagttcttccaagaaaatgggtttgtatgggtctccagtcctatcatcacggcatcagattgcgagggtgcgggtgaacagttctgcgttactaccttgataccaagttctcatgaaactactgattctcctgttgatgctattccaaaaacaaatgatggattaattgactggtcacaagacttctttggaaaaccagcattcttgactgtttcaggtcaactcaatggtgaaacttatgccactgctctctctgatgtgtatacatttggtcctacattccgagcagaaaattctaacacttctaggcacttggctgaattttggatgattgaaccggagcttgcatttgctgatctaaatgatgacatggcttgtgcaactgcttatctccagtttgtaataagacatgttctcgataactgcaaggaagacatggagtttttcgatgcatggattaataaaggaatcattgatcgcttgagtgatgtagcagataaagatgttgtgcaaataacctacactgaagcgatagatctgctgtcaggagcaaataagaaatttgaattcccggtgaaatggggtagtgatcttcagagtgaacatgagcgttatataactgaagaggtattcagtggatgccctgtgataattagagactatccaaaggatattaaagcattctatatgcgacagaatgatgatggaaggacagttgcagccatggacatgttggttccagggattggtgaacttattggtggaagccaaagagaagaaaggcttgagtatctagaagctcgtttagatgatttaaagctgaacaaggatgcatattggtggtatcttgatttgcgtcgatatggttcagtacctcatgcaggctttggtttggggtttgaaagacttgtccaatttgcaactggaatggacaatataagggatgttattccttttcctcgaactcctggctcggctgagttttagaccttgcagatataagggacttcacaattcatttgtacgattcaaactgtattttaggcgataaagtatcttgcgtcttttttttcttttattttgaaaaagaaaatttcttgcttctaaatgaagtatttatacattctgaactgagtagaatgcaattttgaggcaatataatggtgtcttccacattgagcttatacattatcaaattgtattggaaaaaaaaaaaaaaaaaaaattggatcctttcctgcagctt

SEQ ID NO: 6835 - DNA, 778 bp, Glycine max
tcagctacgtaggccccccccccccctgattttgagacaatggctgaatttctcattagagctgcacaaattgcaagcatactgcagagggagcatggcgaaattgcagaagacaacattgaagggacttgagagccatagggacattgttgagctccgggcacgggttgaagcttttgcaactcagtttgccatgccgggttttgacatttgaacatgaagtggctggtgaattgccattattgattatttacatattcaacaatggtgggttgttgtccctgctttttacaaaagcacatattgtgcatatattttgtggagcttctctcctctctgcattgtatgcagctgtcaggttttcacatgttgcagagttgcaatctggtacaagacagtacgaaagtaggtacttccgtactgctgttgaggtttcttatggtgatcaagtatcttgttcctaccttggaggctgcaccatcccagctgaatgcatcaagtcaagccattataggtgttggaacagggattcttgatcaaccaacccgagtacagaattcttctggtgaatctgcagaaaataattactctgataaaggttagacactttgaattcttttagctgatgtttgatgctgaaagctatgctattaatcctattttttgctatatatttccccctttttgggatcatatctgtactcattttcgtcagtaccttgccgtgttaattattaaatatatatagttttgatgtggtaaaaaaaaaaaaaaaaaa

SEQ ID NO: 6836 - DNA, 1908 bp, Glycine max
acgccattttctttgagagcttgccctacaaggtgaaccctcaaactggttacattgattacgataagctcgaggaaagggcgcttgattttcgccccaagatacttatttgtggtggcagctcctaccctcgagagtgggattatgccaggtttaggcacattgcggataagtgtggagctgtgttgttgtgtgacatggcgcagattagtggcataattgcagccaaggaatgtgtgaatccttttgattattgtgacattgttacttcaacaactcacaagagtcttcgaggtccaaggggaggcataattttttatcggaaaggtacaaagccaaggaacagagggattcttctaagtcagggacatgaaagtgatcaatatgactttgaagaaaagataaattttgctgtttttccatcgatgcaaggggggccacacaataaccacattgctgcgcttgctatagctttaaaacaagtggctactcctgagtataaggcatacatgcagcaggtgaagaagaatgcccaagctttagcatgtgctttactgagaagaaaatgccgtctagtaactgggggtacagacaaccatctaatactttgggatttaaggcccctgggattgacaggtaaattttatgagaaggtctgtgaaacatgtcatattactttgaataaaattgctatttttggcgacaatggaactataattcctggaggtgtaagagtaggtacccctgccatgacgtcaagaggatgtctggaagctcattttgagacaatggctgaatttctcattagagctgcacaaattgcaagcatactgcagagggagcatgggaaattgcagaagacaacattgaagggacttgagagcaatagagacgtcgttgagctccgggcacgggttgaagcttttgcaactcagtttgccatgccgggttttgacatttgaacatgaagtggccggtgaattgccattattgattatttacatatgcgacaatggtgtgtcgttgtgcccgctttttacaaaagcacatcttgttcttatattttgtggagcttctctcttctctgcattgtatgcagttgtcagattttcacatcttgcagtgagttgcaatctggtacaagacagtatgtaagtaggtacttccgtactgctgttgaggttttgtctggtgatcaagtatcttgttcctaccttggaggctgcaccatcccagcggaatgcatcaagttaagccattataggggttggaacagggattcttgatcaaccaacctgagtacagaattcttctggtgaatctgcagaaaataattactctgataaaaaggttaggcactttgaattcttttagctgatgtttgatgctgaaagctatgttattaatcctattttttgctatattttccccctttttgggatcatattcgataccttaccgtgttaattgttaaatatatagtttgatgtggtaaatatgtgattgctttgtacccttgtattattttgcaaaacaatttttttctcaaaaagaaaggttgattattctttgcgagttgggaatgaaacatactactatttcagaagcgcttgagttcatccgcaagttcttgtcagtgcggtttgtttgatgtactcggcgcaagggaattaaattgttgcaggtcaattgagatttgaggggcagtcacaaggtcttttctcttaccattaaagcttggtttggatcgtggcatcattttggggattaaaccttttatctcacttgttaatgtaaaaaggtcgcgtattttgtgatcggtattatatgcatatgttatgcaacagatttttttattactctttccaaaatacattatccaatttagttttttttcaattattggtt

SEQ ID NO: 6837 - DNA, 1124 bp, Glycine max
acggctgcgagaagaccgcaggcgggggggcgtcgaaaagacgccataagaaagagcaagtcgaaaagttcatctctccctctctctcacacatcccagccatgagcctcttcggtataggcagaaaccagagaacattccgcccgaaaaaaagtactccttctggaagtaagggagctcaacttagaaaacatattgatgccacgttgggtagtggaaatctgagggaagcagtaaagctacctcctggggaggatttaaatgagtggctagctgtcaacactgttgatttcttcaaccaggtgaatctgctttatggtacccttacagagttctgtactcctgagaattgtcggacgatgtctgcaggacccaagtatgaatatagatgggcagatggtgtacaaattaagaaacctattgaggtttctgctccaaaatatgtagaatacctaatggactggattgaagcacagcttgatgatgaatccatattcccacagaagcttggttcaccatttcctcccaactttaaggaagttgtgaagacaatattcaagcggttgttccgtgtatatgctcacatataccattctcactttcagaaaattgtgagcctcaaagaagaggcgcacttaaacacttgcttcaagcattttatactcttcacctgtgagttcgggctgattgacaaaaaggagcttgcgccccttcaagagcttatagaaaccattatcccatattaaatgaattgggacctaccttctgtgaaaaatctcatcctaggaagcagcataactaatgtattactactctaaatagaaactgctttttagtactatttgacttcagaaagccgccttgtatttattgtgtggatgtgcttgggaacaacaggatctaagttatccttctaaatagcttacacaaagcatcatatatatgcaatggggcatcataggttaaaaaaaagttaatttgtaatggttcatatatgccaaatgttatccttctacgctggaaggttgttgctgaaacaatgttcattattaataattaacgtgtgttgtattatgcggaaaaaaaaaaaaaaaaaatttccatccgattgttcatacattttt

SEQ ID NO: 6838 - DNA, 1653 bp, Glycine max
ctcacaaataaaaggtactgatatgtttgagggattctgcattgatgtatttcttgctgcagtgaacctgttgtcttatgctgtcccctataagtttgtcgcatacggggatggtaagagcaatcctcctcgcgcccggcttgtccgtctgatcacaacgggtgaatttgatggtgcagtaggtgacattgcaattactacagaaagaacaaggatggtggattttactcagccatatattgagtctgggctggtgggagtagcaccagttaggaaggccgaagccaaggtcagcgccgtggggcccccccccaccccaaacatgtggtgtgtcacagctatctttttcatattagtgggagctgttgtttggattttggagcatagggtgaatgatgaatttaggggaccacccaaaaaacaagtagttactgttttatggtttagtttttcaacaatgttcttttcccacagggaaaatacagtgagcacacttggccgctttgtgttgattatatggttatttgtagttcttataattaactcgagttacacggcaagtctaacctcaatcctcacagtgcaacaactttattcgcccattaaaggcattgaaagtttagtaattggcaaagagcctattgggtacacacagggttcttttgctagaaattatttagttcaggaattgaatattgatgagtccaggcttgttcctctaacaacaccagaagaagctgctaaagcactgagaaagggtccagaaaatgggggtgtagctgcttacattgatgagcgtgcctacactgacatcttcctctccagccgttgtgatttaactgttataggtcaagagttcaccagaaatggttggggatttgcctttccacgggactcgccattagcagttgacctgtcaactgccatattgcaaatgatagatagtggagatttgcaaaggatccatgacaaatggcttttgagtagcgcttgcttatcacaaggtgcaaagtttgaagtggaaagactccaacttaaaagcttttggggcctctatatgatctgtgggcttgcctgcttgcttgcactcttcatatatcttatacagatttggaggcaataccataagcactacgtctcagaggaacttcattctactgacggccaaaacataggatcaaaatcttcacatctcaagactttcctttcatttgtagatgaaaaagaagagacctttaagagccggtccaagagaaggaaaatggagaggatctcatacagaaacagtgaaggaagcttatccatcagctccaaccagggatatgcttcacgcagaagtgaatgtgctagcgaagtatgatcaatatttctacatcattttctagcctcttatgctagctacaacaccaacgctcttcattcatgctgcaactactgggctactagtacttccttcttttcaagtaaatatatatgttggatactttagaacttttgttagctatatgtaacacttatttttaacacggtctttatacaaaaaatgaaaagttttttattcagtttatgcgtgtaaaatcatttttcattttcaaaacagtgtcatttattatgtggccaatggattataacatagcatcaccttatgttaaa

SEQ ID NO: 6839 - DNA, 889 bp, Glycine max
gacaccaagccacaattccaattcatcctctctctcccatagataacaacaaaaaagtcccagtcacgaattagtcaccaccatcagtacatacacttcctcaaaaaatggaaatggaagcaagcccaagcccaagcccaagcccgaagcaagtagtggcaaggaagctatggaacatagtacgcatcgtgttcctgatgttgagaaagggcatatcaaagagcaaactcgccgctgacttcaacttgaacttgtcgttcaaacgtggcaagctggcagccacaaaggccatagccaacactatcctccaccgctcccaaaacgacgacgccgtttacccgcgcgactacgagttcagctgcagcaacagccccgcgctcttccacgtcatcaagcgcagcaccaataagcaccgtcaccaccaccaccgctgcaccaccaccaccaagttcccccaccacgacgacgtttcgaccgtacagaaagtgctcgaaatactcaacaataacaaggttgaggcttctccgttacccgggttcggaaaaagtccaattgggagaaaactgatcagaatcacagactcgccctttcctttgaaggacgaagaaggtggagacgataaccaagttgacgtggcggctgaggagttcattaaaaggttctataaggacctcaacttgcagcagaagatggctgctattgactcaccctaccattataacttgtgggacagatgaaaaatattattatcacgttcctttcttatccagaaattattattctatgctttccaactatcacgtgtttatgatctcggttgatttttacatgctatatagtcagtttttttagtttgcaagaaaataattaataatactcgactacatgt

SEQ ID NO: 6840 - DNA, 1772 bp, Glycine max
actccttccattccatcatcttctacccacaccaaaaatcctaaatgaacccaagacaactcctcctgctgctcctcttcttcttcttttggcgtggagagcccacaatcactttctccttagacgaaagattcgaagcctgcgtgcccaagacatgtgggaatgggccgaacataagctacccgttttacatccaaggcaagcaaaaacccttttgcgggcagccaggcttcgagctaacgcgtcgtctcagcaggccccccccccccactcttcaaattaaaccagcaaaatcttatcttagctaccccatcacaacaaccacgatactatttctcatactctattaggcaaaaacaccaccaaatgggagaggaaaaggagcagcctaagaatgacaccgagaaaaagcccgaggaggtagcccccaagaaagacgacggacccatccctgtcgtttacaaactcgacttgcattgcgagggatgcgtcaagaagatcaaacgcacctgtcgccacttcgaaggtgtggaaaccgttaaggcggatctatcgtcgaacaaggtgactgttaccggtaaaatggacgccgagaagctgcgagataagattgccgagagaacaaagaagaaggttgatatcatatcagctccgccgaaaaaagaagccgccgttgcggaaaaaccgccggagaagaaggcagaagacaagaagcctgaggagaaaaaaccagaagaaaaacctaaagagagtacggtggttttgaagatcaaactacactgtgacggttgcattgcgaaaattcgaagaatcattcttaggttcaaaggtgttcaattggtgagcctcgacggaagcaaggacttggtgacggtgaagggaacgatggacgtgaaggagatgttgccgtacctgaacgagaagctgaagcgaaacgtggaagtggtgcctcctccgaagaaagacgacgataagaaagagaaagaaggcggcggcggcggcggcggcggcgagaagaaagaaggcggtggtgagaagaaagagaaagaaggcgacggcgagaagaaagagaaagacggtgcggcggcagcggctgcggaggttattaacaaaatggagtatatgcaccggatggcacctccttcgttctggtacgacggaggacactttcccggtcaaacaagttacgctatggaggttcatccagggtatggtgctagtgctaataatcattacgtggagccagggtacgtgaaccagggttatcctctgcagccacctctaccgtactacatgcacccgcacgctcctcctccgcagatgttcagcgatgaaaaccccaatgcatgttcaatcatgtgatgatcggtgattaattttcggtgtacacttacacacgtacgggatacggatacggaatacgcatggtgtaatttgtaaataaaaaaaaattgacgtgcgtgtaaaaattgaggggtggataatattccgtgttattaaaatttaattaatatagagagtttttataatatggtaggattttgatataataatatatcatatgtgtaggttgttgttttagagaatagagatagagaatggccggctggctggagaatcctgtccagaactcacatcacatgagctgttctttgttttgtttatttttcagaataaatggtttactattatttcaatgaaatttgttgatcttattaaaaaatgtttcgcccccggggtctgaattggcgaagcagtaacaagtacgtgtg

SEQ ID NO: 6841 - DNA, 1697 bp, Glycine max
tcagctacgtaggcccccccccccgttagtgacttatactctctgccttcgttctttctttatatataaccctcttcctttgctctccttccactcttcaaattaaaccagcaaaatcttatcttagcaatagctacccctatcacaacaatactctattaggcaaaaacaccaaatgggagaggaaaaagagcagcctaagaatgaaaccgagaagaagcccgaggaggccgccgcagcccccaagaaagacgacggacccatccctgtcgtttacaaactcgacttgcattgcgagggatgcgtcaagaagatcaaacgcacatgtcgccacttccaaggtgtggaaaccgttaaggcagatctatcgtcgaacaaagtgactgttaccggcaaattggatgccgagaagctgcgagataagatcgccgagagaaccaagaagaaggttgacatcatctcagctccgcccaaaaaagaagccgccgccacggaaaatccaccggagaagaaggttgaagagaagaaacctgaagagaaaaaaccagaagaaaaacctaaagagagtatggtggttttgaagatcaaactgcactgtgacggttgcattgcgaaaattcgaagaatcattatgaggttcaaaggtgtacaatcggtgagccttgacggaagcaaggacttggtgacagtgaagggaacaatggacgtgaaggagatggtgtcgtacctgaacgagaagctgaagcgaaacgtggaagtggtgcctcctccgaagaaagacgacgataagaaagagaaagaaggtgacggtggcgaaaagaaagagaaagagaaagacggtgccggtgagaagaaagagaaagacgttgctgcagcggcggaggttattaacaaaatggaatatatgcaccagatggcacctccgtcgttctggtacgacggaggacactttccaggtcaaacaaattacgctatggaggttcacccaggatatggtgctagtgctaataatcattacgtggagccagggtacgtgaaccagggttatcctctgcagccacctctaccgtactacatgcacccgcacgcacctccgccacagatgttcagcgatgagaaccccaatgcttgttccatcatgtgataatcagtgattaattttcgttttcggtgtactcttacacacggacggaatacgggatacggaatatgcacgcacgttgtaatttgtaaataaaaaaactggaaaaaaaaatcgacctgcgtgtaaaaaatgaggggtggataatatatcaatattccgtgttattgaaaattaatatagagaaattttatgatatggtagaattttgatataatataatgttttagagaatagagatagaggatggccggctggctggagaatcctgtccagaactcacatcacatgagttgttatttgttttgtttatttttttaatatcagaataaatggttactattgtttcaatgaatgtttcgggactggttctgaattgccgaggcattatgtgtgaaaagtgattggtttggttacttttttgtctcatttgagatttttttttctttctcgtttctgtttttgcttttggcaattttcatatgtggattgttaacctaacaattctgttattgtttttctttttcttttttcaaatatagttcattacgcgttg

SEQ ID NO: 6842 - DNA, 488 bp, Glycine max
cctccacacactccctcccgccccagaaccctagccgccgccgccccaggtaagggagagagcccaccccccgccgccgccatgaagcgcaacccccgcgtcacgagctcccgccggaagtgccgcaaggcgcacttcacggcgccgtcctccgtccgccgcgtgctcatgtccgcggccctctcctccgagctccgccacaaatacaatgtccgctccatccccatccgcaaggatgacgaggtgcaggtcgtgcgcggcacctacaagggccgcgagggaaaggtggtgcaggtctaccgccgccgctgggtcatccacgtggagcggatcaccagggagaaggtcaatggatccacggtgaacgtcggcatccaccccagcaaggtgatcgtcaccaagctcaagctcgacaaggaccgcaaggccctcctcgaccgcaaggctcgcggccgcgctgctgacaaggccaagggcaagttcacggc

SEQ ID NO: 6843 - DNA, 780 bp, Glycine max
acggctgcgagaagacgacagaaggggaggaccaagaagaagaaacaacctcaaaatccctttcttgtgtcgattagattactttcacaccagagtcgttcgagtacttcaccttctttctctctaagcgcaaaacctcgtactgtttttggcggttaaggatgtcggggaaaggagcgaaggggttgatcacaggcaaaacctccgccgccaacaaagacaaggacaagaagaaacccatctcgcgttcttctcgtgccggccttcagttcccagttggtcgtatccaccggcttttgaagtcaaggacaaccgctaatggtagagttggggccacagctgctgtctactctgctgctatcttggagtatctcactgctgaagtattggagctggcagggaatgctagcaaggatctcaaggtcaaacgtattactccccggcatttacaactagcaatccgcggggatgaagagttggataccctgataaaaggaacaattgctggaggaggagtgattcctcacattcacaagtctcttatcaacaagtcttccaaggagtagattactagtgaataatagcttgcttgatggaaaatttctctctactaattgtgtaatttttgcatggcacttgaaaaacaaagtagggccttttatttatgactttgttgcctgttgttgatcatggatataatatttagtctttctctttgttaattaaaaaaaaaaaaaacactgaaaatcttaattgaggatagttcaatctaaaaaaaaa

SEQ ID NO: 6844 - DNA, 580 bp, Glycine max
ctcaaccgccgccactcccattcgctcgcctcctccaaccctaagcgatgacgaagggtaccggcagtttcggcaagcgccggaacaagacccacacgctctgcatccgctgcggccgccgcagcttccacctccagaagagcacctgctcctcctgcggctaccccgccgcccgcatccgcaagtacaactggagtgtgaaggccatcaggcgcaagaccaccggcactggaaggatgaggtacatgcgccacgtgcctcgcaggttcaagagcaacttcagagaaggtaccgaggctgcgcccaggaacagggccgcggccaactagttctggattttgccccatcaggaataccctgaagctagaatttaaagactttttgcttgggttgtaccccgcctaaactattgttgctatagaattgagtatggatctgatatgttttgttgcatgggtttggaaattgacctctgaatctaagtccaaatttgtctgaatgttactattgtttgtgggtttaaagggcatctgctttccaatctagtgaattttggagggctaaaaaaaaaaaaaaaaaa

SEQ ID NO: 6845 - DNA, 2332 bp, Glycine max
actcgagccgaatcggctcgagagaagacgacagaagggggcggaaacgacgtcattcgtagttgggaagaagatgagttcgcagcaaatgcagatgcaaatgcaaaacagcggtggcagcagcagtatcagcagcaacatcccagtgagcgaggttttctggactctcgtcgacaaagccgacaagaagttctccaaaatcagagaccttcccttctaccaacgcagcaggcatgatacttacttttataaggtgttcaaggtctacacacaattatggaagtttcagcaggagaatcggcagaagctgattgaggctgggctcaggagatgggagattggtgagattgcatctcgcattgggcaactgtattttgggcagtacatgcgcacaagtgatgcaaattatctatcagagtcgtatatattctacgaggccatattgactcgggagtattttaagggggggttgtttcaagatgttaatattgcaaacaaacaattgaggttcctagctagattcataatggtgtgtttggtgttgaaccgaagggaaatggtgcagcaattggttaatcagcttaaagtattagttgatgaatgcaagagaacattccaggaaagtgactttaaagaatggaagctggtggttcaggaaattgtcagatttttaaaagcggacactgcttttataaatatcaggcccttgagatacagtctagttttggactctcatcctgatactttaccccatgtagctgcagccatcacaaagagacatttgaaactacaagatgctgtattaagtagcttccatccaaatgaggtaaagtattcagagctcaccattgacacttttaggatgcttcaatgtctggagtgggaacctagtggctcatttttccagtctagtagttcaaaacttagtcaaaatggggctactggaactagtcgtatcagttacatccaagacattgctgatcctaccttacctgcaaacccacggaaagctgtgctatatcgtccttcactgacacattttatagctgttcttgccacaatatgtgaggagcttccttccgatggtattctccttgtgtatttgtcggcttcaggatattgtggttctgcccagaatgaatctggttgcatacactttggtcctcgtggagatagaggatcaaactgcatatatccatctgactttctaccgtttactagaagaccacttcttttagtcattgataacgacaacagcaaagcttttaaggacatagcagaagcggaaaagggagagtcagttgctatgctcctttctccaagctgttcgcctgctttgtctgattgctcacataattcaaatgggagcctattcaccatgtttcttacagctccgctgcaagctttctgtatgctgttaggactttcaggcactgatattgatttggacccattcaacaaagcggaaatgctgctctcatcttcattaaataactggggactagcattggcaacatcagacacacttaatcctgtttggggacagattttcggtgatcccttcataaggaggcttcttttgagattcatattttgccaggctgtgttgaccctatatgcaccagtttacaatgacaacaaattccttccaacatgtgtcccttctcttccaacgcctgtcctgcccccaagttactcgtatcagagtgtcattctgaatctagccagcatgtttggtgcaactaagcattttatcttctcagaggatgttcttcctgaaaatatacaaaccaacatcatgaatcagttaactctatgaagataaccaaaagcttcacttcagtagaatgataatgtatacagcttgtttgtatagcaagaaaacatgaattctatcaacatttctgtttgttcctggtggatttcctagaatttaagttcagcctttagtgtgaacatggttttttgttatcgaactttttttttggatcttaggttttgtgcctttgacaagagaacttctaacgtggattgaatttcaatatgttcgttacataacaagtttcatggtcgagaagaatggaatagagcaaggggaaggaagttttgcatagaaaccttattttttttctttcgctacgaccattgtcgtcatgctttaatgtttcttcacttaaatgcttcgttaatgttttgtaatgaatgcaatcatggcattttctctgcatcttgatcaatctttttgtttatttattaattaccttggaaactaaaatcacatttgtattttaaatatttttatttgtggttctgctcaagaactttggacatt

SEQ ID NO: 6846 - DNA, 1449 bp, Glycine max
ctcgagccgaaagagttgacgttagagagagtgggggtttcacttttcagcggcgaaatgggaaaacgagagaagcagaagcagaggcacgagaagggacaccgtggaagagggtctttcaactatcttcaagaggaccatgattttgatgacactccaagaccctcaccctctgaagaagaatgtgctgatgacagcaatgaggaaaaagaagaagaagaagaagaagaaggtcatgaaaaccaatctcatgatatgccttccaagttcctcctttaccaacaatctgtgcagtcacccaaaggagatataagttatttgcaaaagttctttctcatgtacgtgggtggaaggatgcccctccatcttcaagaagatttctgtggcacggcgcttcttagtacagaatggctccgcagtgattcaagaagaacagtagtaggattagatttggatcttgaggcactcaattggtgcatggaaagcaacatacctaaagttggggctgatggattttcaagaatgtctctctttcatgggaatgtcctacaacctcttcagtctaaacttgtaaaaatagatcctcagcagctggtaagtgacatttcactgtcacagaatgaagaaaatcttcagactgatgtgccagaatctgatgctccaacaggctctgttgctcaagatgacaagtatactaagagaaacataatactgcctggaagagatatcgtgtgtgcttttaactacagctgctgttgtctacataaacgagcagaactggttctgtatttcaagcatgctcgtgaggccttgtcaactaaaggtggaatttttgtgatggatttatatgggggtacgtcatcagagcacaagttgaggcttcagagaagatttcccaattttacgtatgtatgggagcaagctgaatttgatattattcaacggaagacaaggattagcctccattttcatatgaagaaggaacaaagaaaacttcgccatgcattttcatacagctggcggttgtggacattgcctgaaattagggattgcctagaagaggctggatttcggtctgttcacttttgggttcgagagatgccagacaccacagaaattatgagaacagaggggtttggtgcgggaaagaatgtaaaatatgaagaggctacaagttttcagcaacaagattcttggaatgcttacatagttggtgttgcgtaacttcatcttagaaagtgtatttctgttgcattaattttgtcataagactcataactggacaagcatcactgttaatcagctccattgcttggaacttgcctttcttttatatgaaaattgaattggatttggcttgagattatcaagtgtaacaaacaaaattttaaaggtacattctgctcaagtttggtgtgaaatttcatcaagagatctcttaccttcagg

SEQ ID NO: 6847 - DNA, 790 bp, Glycine max
ctcaatgaatgcctatgtcagaactgctaaatacatgatgggtgtacataatgaattataagtattgatattttctcatgtttgatagagcatatgcagcaagcacatctaggaaatatggctgagaatccgattcgtgtaacgatgattccatggtctgcctttggccacttgataccatttttcaaactttccatagccttagccaaagctggtgttcatgtctccttcatatccactcccaaaaacattcaaaggcttcccaaaattccttcgactttatctcatttggttcattttgtggaacttcctttaccatcattggacaatgatatcttgccagaaggtgctgaggccaccgtggacattccatttgaaaaacatgagtacttaaaggcagcattagataagctccaagatgctgtgaagcaatttgtggccaatcagttaccagattggataatctgtgatttcaatcctcactgggttgtagacattgcccaagagtttcaggtaaagttaatcttattttctattttatctgctactggaacaacattcatagtaccaccaggtacaagggcacgtcacttatctccagaaagtctaacagctccaccagaacgggtgacatttccatcttcagtggcttttcgaatacacgaggcaatacatttctgtgctggtttcgacaaggtaaattcttccggggtaagtgattttggaagggttataaagatacatgatgcctctaaagctgtgatatttcgtagctgctacgagattgaag

SEQ ID NO: 6848 - DNA, 1758 bp, Glycine max
tcagctacgtaggccccccccccaaggcaaagcatagaaagtagaaaagaaagactcagttcttctccttgactttgtttgtgagttgaaatctgaagctgaatcgtatcgttgagtttagggtttgaaattggatctgacagcatagcatagaatggcgggggttcgtagagacgcattgctgacgagagataaaggccaatcatcggtccgatttcgaatcgtcgtcgccgtcgtgatcggcgttctcctcggctgcgtctttgccttcttctcctccgctcccactcctcttcacattccctaccctattaagatggtttcatctgcatgtgaatcgccagaacaagttaatgcgcttaaagttgatattctatcagcgaaagtgaaaaattctgagctgaagaaacgggtcaaggatcttatggagaagctgcgtctggccgagcaaggaaagggtcatgctcaggaacagtttgttgtgcttggtgagagccacaaggctgggccttttggaactgtcaagggtctcagaaccaatccacctgtcattcctgatgaatctgtgaaccccagatggaccaagatcttgggggaagttgctatttataaagaacttattgttgctctcgctaactctaatgtgaaggagatgttgcagctatggttcaccaacatcaagagggttggcatacctaattatttggttgttgccttagatgataacattgaagagttctgcaaatccaatgatgttcctgtgtatagaagggatcctgatcaaggtgttgatgtggtcggtaagagtggtggtaaccatgctgtttcgggattgaaatttcgtattttgagagaatttctgcaactgggttacagtgttcttctctcggatgttgatattgtgtacttgcagaacccctttgattatctctatagggattcagatgtggagtcaatgtctgatggtcacaataataagacagcttacgggtataatgatgtctttgatgaaccctcgatgggttgggctcggtatgctcataccatgagaatatgggtttataactctggtttcttttatataaggcctactcttccttcaattgagctcttggatcgtgttgcaactcggctttccaatgacccaaaatcatgggatcaggcagtttttaatgaggagctctttttcccttcacatcctggttatgatggacttcacgctgcaaaaaggacgatggatatgtacctttttatgaacagtaaggttctctttaagactgtaagaaaagatgctaaactcaagaagctgaagccagtgatcgtacatgttaattaccatcctgataagtttgcaaggatgaaggcaatagttgagttttatgccaatgggaaacaggatgcgctggatcatttcccagatggttctgactgataggaacattagaacaaatatgtttctaacacaggaaggatttgtatgctcaaattgatgtgatacagagccaatcatttcagttcacctcccaggataagttttatgccaatgtactttctgttgagttttagaatttgttgtgtttgactattaaacatgttttctgtaactttgtatatatttcttctctgtaatgagttgaaattcaatatctctgcaatgaacttggccatgtcgaggtcgtttttttttatgtaaagaaattaactgtttgttttacagtttttgggatatgaaataacatgaagaccacgtggctagtt

SEQ ID NO: 6849 - DNA, 1405 bp, Glycine max
aaaaatccatttgttttcttaatgtaaaacttgacaagaaccggattcattgtcattctttagtactattctttctttttcctagcaagacgagacgattcttctcttgttgtccccttcatacatccttctccgtgtcctactaaactctctttaacattttgtgcattttctacttcatcatttgtcaactactaaggcaattgttattttgataatttaaaagccacgagccagctcatgccaacaaagtctcaacctaacacacacacacgctaaccaaataaacccccccccccctccactcccacacacaccactacaacaataatctcaaacatggcctccaaatccttcaccctcattctcctcatcctcaccacattcctcatggcccaaacccaagcccaagctcccgcaccggccccctcaggcgcggtgaacctcaccgcgatcctggaaaagggtggccagtacaccaccctaatcaaactcctaaaggacacacaacaactcactcagatcgagtcccagctcaaatcaaactcacaaggcttcactctcttcgcacccactgacaatgccttccagagcctcaaacccggtgccctaaacgacctgagcgatgacaagaaggtgaagctcattctcttccacgtcacgcccaagtactacaccatctccgatctgttaactgttagcaaccccgtgaggacgcaggccaccgaggaggaagggacttgggggctgaactttaccggccaaggcggtaaccaggtgaacatctccacgggcgtggtgcagacgcagctcaacaacgcgctgagggagaagtttcctctggcggtgtaccaggtggacaaggtgctgttgccgttggagctctttggaaccaccaagaccactcattcttctgaggctccttctcctaagggttctaagagtactcctgagattcccagcgtgggtaaggctggtggcgctccttctcctcatggtgataagaaggatactaatgctgccaatgggaggaatgtggcttttggacttgtcgttggacttgccttgatttgcatagaagctctccattgatcatcagataacttgtgtctcgtgtttttcatctttttcttttactctccatcacttcatttgtgaatttttatcttttttttcttcttcttcttctacggacaaaaggaattgtgttgggtttgattgagcctcattctttgtatttaaggctttttttttttacgtgtatttaatggctctcttgtatttaatttggatcacatgagtttggctatgagaaaaagaccacctactttagcttttttctttcccctcatccgaaaacctaaataaatggaatgctcaaccatttacaaaaaaaaaaaaaaaa

SEQ ID NO: 6850 - DNA, 1291 bp, Glycine max
aaaaagccattgaagaattccgcggaattcttgatttgcagcccaaaaagtaaaacggctcacgctccgcgaggcccgccggagccggcccgcagataaaccaaatggcaagtcacacatacacgatatgataccccgtcctccctctcttcacttttgactattgacttcctcaaccgatccactcttctctctatctgcagatggcaagtgggtttggggaatcaacagggagatcacccccaagcccttcctacttcaacaacaataataacaatgatgctgccaattttgaatgcaacatttgctttgaattagcgcaagacccgataattactttgtgtggtcatcttttctgctggccctgtctttacaaatggcttcactttcactcacaatcacgagaatgcccggtgtgcaaggccctcgtggaggaggagaagctggttcccttgtatgggagaggaaagtcgtcgactgatccaagatcaaaatctattccgggcgataacatcccgcatcgtccggctggtcagaggcctgaaactgctcctccacctgaaacaaatcattttcatcaacatgggtttggatttatgggtggcttggggggatttgcgccaccgccgatggcaacaacaagatttgggaattttgcattgtccgcagcttttggtggttttataccatccttattcaactttcagttgcatgggtttcatgatgctgccatgtatgggggaggggctggttttcctcatggatttgccaatacatttcatggtgtccatgcccatggattccctctgcgcacccatcaagggcaacaagattattatttgaagaagcttcttctatttgttgttttgtgtgttgttcttgcttttatatggcaataggttggatacaatctctagcagtatctgacttctgctctgataggtcttctgatgtgctctttgttttgtaactaaggagtaaggatgttgttcatatgataatactgtcttattaatcttgtagttcttttctttgtgatagctttgtggttcccatggtatccatgtgcaaaagatataaagcatgaaagcaatgcacccattgttaggaataaggatctgggtaccggtccgtagatattaatttcttagttattatactgagtttgaaactacaagatagctgaaatagtgaagttatgcccttggtttccttttgtgttctcatatttgcaattacatgttggcatgctattgctaatgttatatctaatattattttggtgcctcgc

SEQ ID NO: 6851 - DNA, 997 bp, Glycine max
ggctcgagtttgttcaagattgtttccgacaaggaggatgaaggcataatgagggagcttctacttgatttctatacaagttctggaaatagaaagcccgataatataatcatattcagggatggtgttagtgagtcccagttcaatcaagttttgaacattgaacttgatcaaattatcgaggcttgcaagtttttagatgaaaagtggaatcccaagtttttggtgattgttgctcaaaagaaccatcatactaaattctttcaaacctggagctcctgacaatgttcctcctggaacggtaattgataacaaaatttgtcatcctcggaattatgatttctacatgtgtgcacatgctggaatgattggtactagcaggcctacacactaccatgttctgttagacgagattggcttttcacctgatgatctacaggagcttgtgcattcattatcatatgtgtatcagaggagcacaactgccatttctgtcgttgctccaatatgctatgctcatctggctgcaactcagatgggtcaatttatgaaatttgaggacaaatctgagacatcttcaagtcatggtggttctggtatacctgctcctcccgtccctcagttgccaagattgcaggacaaagtttcgagctcaatgttcttttgttgaaggatctgtttctagggataggcgatgactgataacagtgctgtttataagaccttcataggatagtttttttgtggaaacagttgaactatgggcgccaatggtgtaggtaaggattattatacatgtaagcaggcattttgctcatgcctttacatgtgtttagtcttttactattttgaatattgttgcgaagtctttcgctattttgaagattgttaaggtttatgtgattcctatggcgttcctattatgcactcttgatcattatctaatctagtggtttgcatgaatcaaaaaggtgaaatgggtatcactgtttttgtt

SEQ ID NO: 6852 - DNA, 1934 bp, Glycine max
  misc_feature (1837)..(1837): n is a, c, g, or t
caactgtactgaagttgagggtcgggttttacaattgcgtagcttttatggttctgagccaatgctacgcgattgtggaatctctataagccccaactttactgaagttgagggtcgggttttacaagctccgcggttgaaatttggtaatggggaggacttcaatcctagaaatgggaggtggaacttcaataacaagaaaattgtcaagccaactaaaatagaaagatgggctgtggttaacttctctgcacgctgtgatatacgagggcttgtgagggatctcattaagtgtggtggaatgaaaggcattgtgatagatcagccgtttgatgtgtttgaagaaaatggtcagtttaggcgtgcaccgcctgtggttcgagttgagaagatgtttgagttggtccagtcaaaacttcctggggctcctcagtttcttctttgtctccgccccgtgggccccccccccgatttttatggtccatggaagaagaagaatcttgctgagtttggaatcgtgactcagtgtatagctccgaccagggtcaatgaccaatatttgactaatgttctgttgaaaatcaatgctaagcttggtggcctgaactcaatactaggtgttgagcattctccttctattcctattgtttctagagcaccaaccattattattggcatggatgtgtctcatggttcgccagggcaaacagatattccttcaattgccgcggtggtcagctcccgagaatggccactaatatcaaagtatagggctagcgtccgtacccagtctccaaagatggaaatgattgataatttgttcaagaaggtttctgacaaggaggatgaaggcataatgagggagcttctacttgatttctatacaagttctgggaatagaaagcccgataatataatcatattcagggacggtgttagtgagtcccagttcaatcaagttttgaacattgaacttgatcaaattatcgaggcttgcaagtttttagatgaaaagtggaatcccaagtttttggtgattgttgctcaaaagaaccatcatactaaattctttcaacctggagctcctgacaatgttcctcctggaactgtaattgataacaaaatttgccatcctcggaattatgatttctatatgtgtgcacatgctggaatgattggtactagcaggcccacacactaccatgttctgttagacgagattggcttttcacctgatgatctacaagagcttgtacattcattatcatatgtgtatcagaggagcaccactgccatttctgtcgttgctccaatttgctatgctcatctggctgctactcagatgggtcagtttatgaaatttgaagacaaatctgagacatcttcgagtcatggtggttctggtatgcctgctcctcccgtccctcagttgccaagattgcaggaaaatgtttcgagctcaatgttcttttgttgaaggatctgttgcagttctagggatagtgataactgataacagtgctgtttataagacttcataggatagtttttttgtttgaaccgttgactatgggcgccattggtagtaggaaaggattattatacatgtaaaaaggcattttgcttatgcctttacatgtgtttagtctttaactattttgatactgttgcgagcgaagtctttcgctattttgaagattgttaaggtttatgtgattcctatggcgctcttgatcattttctattttagttgtggtttgcatgaatcaaaagattaaatgggtatattactgttctctgttccggtttaaatccatattatagactcctgattgcnaaaaaaaaaataataaaaaaaaaaaaaaaaaaaaaaaaaaaaaaaaaaaaaaaaaaaaaaaaaaaaaaaaaaaaaaaaaaaaaaaaaaaaaaaaaaa

SEQ ID NO: 6853 - DNA, 843 bp, Glycine max
ttcggctcgagcggccgcgagaagacgacagaaggggatcacaactacatttgcaaaacaaaagccatagtttgttacttctcttcgccttttgctttgcaattgtcaccaaacaattcttgcttagctctcacaagcaagcattatcaacaatgaagaaaattgtgttaaaggtggacttacatgatgacaggatcaagcgaaaagctatgaagacagcatctggcctttcgggggttcaatcagtttctgttgacattaatgacaagaaaatgaccttattgggggatgttgatccagtgagtgcagtgtcaaagctacgaaagtggtgtcacactgaaatagtctcagttggaccagcaaaagaggaaaaggagaaagagaaagtggagccagcaaaagaacctgttcctctcaagctctatgatgcctatcccttttattatcatatgacaccaccactgtatctgtatagttaaaattaataggttagatgttttgaagagaatcttatatagtggctgtgtcatctactaaattttagaatattattaggattattattcgcagagggtggtgtaacttttttgataaattcagacaagtttctagctacttgggtttttgatatatagtataatgtatacctttgtaatttcattggcttttccagcaacacacatcttgttagtatagtttgttggaagtaagagcatattaaggaatgtgaatgagtatgacacaagtttaatccaaaaaaaaaaaaaaacacgttttataatacttttttttcctgttaaatactacaataatataattatcgtagtcttaggaactagttta

SEQ ID NO: 6854 - DNA, 1057 bp, Glycine max
tacggctgcgagaagacgacagaaggggatcagctacgtaggccccccccccccacaactacatttgcaaaacaaaagccatagtttgttacttctcttcgccttttcctttgcaattgtcaccaaacaattcttgcttagctctcacaagcaagcattatcaacaatgaaggtcagaactagactcatatattttcctctccttcccctaagcaatgcatgaatcacattcttgagttttctgagctttgtattaactgttttctttcatgttttagatgtagaagtaattaattgttggatcttaacagttctttgatgtttgttgtgtaacagaaaattgtgttaaagatggacttacatgatgacaggatcaagcgaaaagctatgaagacagcatctggcctttcgggtaaatcaaaattttcaaccctactacaactttgctttgtttcaagaagccaaatacatatcatgctgcagcatcaaggaatcaatgatttcataacaaaattgtgtttgtaattatcttgcaggggttcaatcagtttctgttgacattaatgacaagaaaatgaccttattgggggatgttgatccagtgagtgcagtgtcaaagctacgaaagtggtgtcacactgaaatagtctcagttggaccagcaaaagaggaaaaggagaaagagaaagtggagccagcaaaagaacctgttcctctcaagctctatgatgcctatcccttttattatcatatgacaccaccactgtatctgtatagttaaaattaataggttagatgtttagaagagaatcttatatagtggctgtgtcatctactaaattttagaatattattaggattattatttgcagagggtggtgtaactttttttataaattcagacaagtttctagctacttgggtttttgatatatagtataatgtatacctttgtaatttcattggcttttccagcaacacacatcttgttagtatagtttgttggaagtaagagcatattaaggaatgtgaatgagtatgacacaagtttaatccg

SEQ ID NO: 6855 - DNA, 1614 bp, Glycine max
caataataactgctcagctacgtaggccccccccccccatcaaaacaaaacattgcttcaattcagcgtttctgcaaattccaattttccaaaataaaaaacaaaaacgggcgtttgaaaaaaagctgttattaattcgggagcgatatggaggtcgtactcaaagagttgcacgccgatcttcaatctctgagccaatcgcttcccgatccatctcaccatgatttgctccgcaagattcaattgcgtgttgaggaccttgcgaagcttgcagaggctgcacctgttcgtcgctctaaagttgaggatatgagtgctgaggttgtagatagcaatccttatagtcggcttatggcacttcagagaatgggtattgtggacaactatgaaagaatacgcgatttctccgttgccatagttggagtaggtggtgtaggaagtgtttcggctgagatgctaactagatgtggtataggtagacttttgttgtatgattatgacaaagtggagctagcaaacatgaataggttgttctttcgtccagatcaggttggcatgacaaagactgatgcagctgtacagactctgtcagacataaaccctgatgttgtacttgagagctatacactgaatatcaccaccgtcacaggttttgaaacctttatgtcgagtttgaaaaataagtcacttcgcccaaataaacaagggagtggcgtggatctggttttaagttgtgtggataattatgaagcaagaatggctgttaaccaggcttgtaatgaattgagccaaacatggatggaatcaggtgtttctgaggatgctgtttctggccatattcaattacttattcctggagaaactgcctgttttgcgtgtgcacctcctcttgttgttgcatctggggtagatgaacgtacgctcaagcgggaaggggtttgtgctgcatctttacccaccactatgggggttgttgctggccttctagtccaaaacactctaaaattattgctaggctttggacaagtctccccgtatttgggatataattctcttaaggattttttcccaactatgcaaatgaagccaaaccctcaatgttcaaatgtagcttgtttggaaagacaggaagagtacatgcttgcaaaaccagcaagagatgctgcagccaaagcaaaaatggaagctgaagcaccatcaactgaggaagtgccacttcatgaagaaaatgaatggaatataagtgttgttgatgatattgagctggatagtccggataccagaagttcagatgttctgccggaaggtctcacacatgaacttcctactgctgacgagtttcataaggcaactcttgacgctccattagttgacaatgacgaccttgaagatcttcgtaggcaacttgaagccattaattctgcatagtgtcagcaaagtttttgtttttatttttatttttagaaaaaaaaacttttgaaatttcaaagttcaaactgtcatcattgttcaagtaagccagttcaacttagcatcagtttgttttaaaattgaggaaaactaatttcaaattattgaccataaaaaaaaaaaaaaaaaattagggccgcccat

SEQ ID NO: 6856 - DNA, 724 bp, Glycine max
gactaaacaaataaatgtaacggcggccacggggaggcttgaacttagaacctttgctgaccctcgtggagtgatccggtggacgcaataactgcaggcagctctgacttcagtgcaagcaagcatcaaaacattgctttaaaagcatcaattcagcgtttctgcaagttccaattttccaactatccacagaaacggtcgtttgaaaaaaagctgttaattcgggagcgatatggaggtcgaactcaaagagctgcacgccgatcttcaatctctgagccaatcgcttcccgatccatctcaccatgatttgctccgcaagattcaattgcgtgttggggaccttgcgaagcttgcagaggcagcacctgttcgacgctctaaagttgaggatatgagtgctgaggttgtagatagcaatccttatagtcggcttatggcacttcagagaatgggtattgtggacaactatgaaagaatacgcgatttctccgttgccatagttggagtaggtggtgtaggaagtgttgcagctgagatgctaactagatgtggtataggtagacttttgttgtatgattatgacaaagtggagctagcaaacatgaataggttgttctttcgtccagatcaggttggtatgacaaagacggatgcagctgtacagactctttcagacataaaccctgatgttgcacttgagagctatacactgaatatcacc

SEQ ID NO: 6857 - DNA, 476 bp, Glycine max
  misc_feature (446)..(446): n is a, c, g, or t
aacaatctacggagatcgggatcgtccacacccttccgccgccgccgccgcgaaaaggagagcgaggccgactccgccgccgcgatgagggccaagtggaagaagaagaggatgaggaggctcaagaggaagcgccgaaagatgaggcagcgatccaagtaggcgccttggagcaggggaagcatcatcctacatccaggctgccaggcatcgagggaggacggcatggtctagtgattcctggcgtgtttgctgctatggctgtggaagctgtcttacctgtgttctgtccaatttagctgtttaatgctagtctggttttgttccaagactgagttttatgtaatgtgggattatatgtgtttgtgactgaattttatgcagctattaattttgcagtactcttgataaatgaaaaaaaaaaaaaaaaaaaactttttttttgnaggtgatgctgttctatttctttctcacaa

SEQ ID NO: 6858 - DNA, 1179 bp, Glycine max
aattcggctgcgagcggactgacgagaaggcgaccgaactggtgacagtatagagcgagagagagagagaaacaaagcagcacccatttggatcctctcttctcttctttgatctccgttaccctttttgttttctcaacagagagagagagagagaatctttcgaagttcgtttgcgtgtgttgtgtggtcagtcaccgatggcagcaccacctgcgagggcacgtgccgattacgattacctcatcaagcttcttcttattggcgatagcggtgtgggaaagagttgtctgcttttgcgattttctgatggttccttcacaaccagttttatcaccaccattggcattgattttaagataagaaccattgaacttgatggcaaacgcattaagttacaaatctgggatacagctggtcaggagcgatttcgaactattaccacagcttattaccgtggagccatgggtatcttgctcgtttatgatgttactgatgaagcatctttcaacaatattagaaattggattcgcaacattgaacaacatgcttctgacaatgtaaacaagatacttgtgggtaacaaggctgatatggatgaaagtaaaagggctgtgcctacctccaaaggtcaagcccttgctgatgagtatggtatcaagtttttcgaaaccagtgcaaagacaaacatgaatgtggaggaggttttcttttcaatagcaagagatatcaagcaaaggcttgctgacacagattctaaggctgaacctcagactatcaagattaaccaacccgaccagacagctacagggggtcttgcggctcaaaaatcggcttgctgtggttcatgaaataaataacaagtcagaatctgcagttagagggtgcagattcaacactcgccctcatatgggtgctatagttattttgatgacatttaaaagtgggagcatgtatttgtccttgtatttcccaactgcaaagattatgttttgaagatagtgttttaaatttttcgtttacttagctgtcggatttgttgtgattagttcgtttgctccactctctcctctttcatttgtacaccgactcttgaaagaaaatctttcgattggattcagattgattattagaaaagcttttatctgttgcaaataatattccagacgatcttacgtt

SEQ ID NO: 6859 - DNA, 1160 bp, Glycine max
tacggctgcgagaagacgacagaagggggaagtgtggtgtggcaaaacgtaacgcgattgcaatgatatgataggcgcagagcagagagagagaaaacgcaaaggcattatttggtcttggatccctttcgatccgacgacttcgttcgttccttctccttccaagttctaaccatttcccactgtcttcgattttagggcattaaatctgccatggcagcagcacccgctagagctcgtgccgattacgattacctcatcaagcttcttcttatcggcgacagcggtgtggggaagagttgtctacttttgaggttttctgatggctcattcacaaccagttttatcaccaccattggtatcgattttaagataagaaccattgaactagacagcaaacggattaagttacaaatctgggatactgctggtcaggagcggttccgaactattaccacagcttattaccgtggagccatgggtatcttgctggtttatgatgttactgatgaagcatctttcaataatattaggaattggatccgcaatattgaacaacatgcttctgacaatgtaaacaagatacttgttggcaacaaggctgatatggatgaaagtaaaagggctgtacctacctccaaagggcaagcacttgctgatgagtatggtatcaagttctttgaaactagtgcaaaaaccaacatgaacgtggaagaggtcttcttttcaatagcaagagatattaagcaaaggcttgcagacacagattcaagagctgagcctcagactatcaagattaaccaacctgaccaggcaaccagtggtggtcaacctgcgcaaaagtcggcttgctgtggttcatgaaaagaatcagtatctgtagaaagaggtgcacaggtttctgcaatagcactcatctgggtgctaatgttattctgatgacattataagtgggagcatgtatttgtccctctgtatctcccaactgcagatgtcttattttaaagttaatattttaaattctttgctcactgacttggtggaatttgttgtgactagtaatttgcttcaatttcctattttcatttgtagtgtgactcttaaaaggtatcttgattagatgcggatagattatcacaacagcttgatcatttgcaggg

SEQ ID NO: 6860 - DNA, 1314 bp, Glycine max
gctcgagcggctcgagtcggctgcagaagacgacagacggggacagttagtttatctctacattatttgttttggtgcattcaaatggctgggattgtagtgatatttgactttgactcaacaatcattgagtgtgatagtgataattgggtgcttgatgagaccggtttaactgaaaagttctatcagcttcttcctagcatggcttggaaccctctaatggataagatgatgaatgaacttcattcacaagggaaaaccattcaagacattgtagaaattctgaataggacaccaatgcatcctaggactgtccctgctattgaggcagcttattctcttgggtgtcacctgaagattgtgagtgacgcaaacattttctttattgaaacaatcctgaagcatcatggagtgtggaactgtttctcagaggtcattgccaaccccatccatgtcaatgaagggaggctcaatatttgtccataccatgattatcttaaatcttctcatggatgcaatctttgtccaccaaacatgtgcaagggattggtgatagaaaggatccaaaactccctcgctgcagcaggaaagaagaaactaatctatcttggagatggaaatggagatttttgcccaagtttgaggctcaaagatggtgactatgtgatgcctagaaaggactttccattgtgtgatttagtttctaaaaattctaataagataaaggcagaagtacatggttggagagatgggaaagagcttgaacatgttctgctccatgttatcaacaaagaaattggggaaggaaacaacattaataattctactcagaaagtctcagttgattgcaagatggggccaattgcaattgacactcgtcaacctttgcctaaagccctatcagttcctcaataactagtcagctacaattgcaaggaagaaattattagatagttatgtgccaccacatatctatactccagattaatctctttataacacatgttcaagtatataagttacgtaaaatataataatacttaattatgtgtcatgtgaaaattggtctagattataatctcggatcacgtaattaatgatttgtcaaatgctaattttttactaaagctgttatagtcttttgtagccctcaaaataaaaaataagggccattattgtgtcttgtcaacttctgaattattttaagtgctgtttcattctcaggcaatgtatgagaccgtgctttggtccttcacgataattaaatatattatgttgaataaaagtacgaaaggctaaagtaatttgtggtgc

SEQ ID NO: 6861 - DNA, 2047 bp, Glycine max
tcacggctgcgagaagacgacagaaggggacgcaaatgattaaccatggcttcttctacatcacatccatccttttggtccctcctgaacctgtctgcatccattcccatttcttcttccgtatgcatgttcccaccgtctaaaaaacctagcaaagcaacaaaacggcgtcatgcttgggaagtagcatgcaatggtaaccctagaaataggagggacattctgatcggccttggaggactctatggtgctacaacaagtctcacaagtaacaacactggttctgcatttggtgcttcattgtcgcctccagatccaactaactgcgttcaaccggacccagaaaaagaccctttttgcccaccaccccccttcaaagactacgagctccctccacacgatgacaagacattaccccttcgaattagaccagctgctcatttggtcactgatgattacatagccaagtacgaggaagccgtgaggcgcatgcaagaccttccacctgatgatcctcgcagtttcatgcaacaggccaatgtccaccgtgcctactgcgatggtcgcggctatactcaaaagggcttcgctgactacaagcttgacgttcacggctcctggatattctttccttggcaccgctggtatctctatttctatgagaaaatcttggggaagatgatcgatgaccccactttcgctcttccgttttggaactgggacaatcccgccggcatgagaatccctcccattttcacagacaaaagttcgcctctctacgacgaacacaggaatagcgatcatgtaaatgctttcatcgacctagactacaagaaggaccattctcctgtgaaacctcctcaaacaattatatggccgccagtggggagacggaataactcgatcgtcgacaacttgatcgtcaacaacttgataaaagtttatacggcagttgcaagcaaaaccaactctagcccagactccttcctcgggccagcattcgaagttggttctgatcctaagaaacactttggatctctggaatctttgcacaatactgtccacagctggaccggtgaattagaaaaacctaaccacgacatggggttgttggctacggctgcaagagatcccattttctttgctcaccattcaaacgtcgataggatgtggaacatatggaagacagaattgctggatggaagaagatttgatcacaaaagtgacgaatggttggaatccagtttcttcttctacgacgagaacagtaactatgtgcgtgtgaaggtcaaagactgcctcgactccaagaagatggggtatgattaccaacgtgttgaccttccatggctgttggctggggaactcatcaaaccaaagaaggagattattccccttcgttcaaaaccagaagcttcaacattcaagacattacagctccctctccttctggaatccattgagcgtacaaacgtgaagaggccgaagccgcgatccaggaacgagaatgaagaagaagaaggcgtagaagaggtgttagtgatagatgttgagtacgatagcactgatggtgtgaggtttgatgtgttcatcaacgaccaaggcgataatgagattggaccccaggattcagagtttgcgggaagctttgtgactttgcctcactcgccgcatgtcaaccataacaacatcaccagagcttctttcaaattgccattaacgtatcagttgaaagacttgggagtaacaaaagacgatgatagtatttctgtcacactggctcccatatatggagacaagcctgttacaattaaggacgtaaggataaagcgtgtttatcctgaggtagacgatgaataaatctaaattatgtgtgtgctactgctagggtttgtttctccggggatactctatttgtcatttgttgtttcttaattagtgtgttgtagttatttgccttggaacttaatagatccctttcatctttgagggatactatgatattgttataataaatgtttgttaaattgtttgttttattggtaaa

SEQ ID NO: 6862 - DNA, 668 bp, Glycine max
  misc_feature (668)..(668): n is a, c, g, or t
gtttaatttctagatcttgcttcaaggcgaatccaggataccaatggctcaactcaatcacagaaagctactactcttctatgttcttttattcctttctctttctgtttgcttcggtgccagctcgttggaacctcaacatagtagaagaatgttgggtgcccaaaaacaagagcaagagaagcctttgaaaaacaaaaccaccgccaaaaaccaaaccaagccaatcaagcccactaatagtatttcctcaacgaaccacaccaaaaccacaaaatcaccccacaacatttcctccaaaaaccaaaccaagccactcaagcctagctccaccaattcagcttccaccgacactgccctcgccaagaagctcaatagtaagatcaagaagctcaacgtcacatccaaaacctcaccctcaaaacccggtaccagcgtttccatttccagcaacaagaaaacattggatctcgccaaaccaactaacaaaacagcaaaagacaacaagcaacccagaacagcaaaagtagatcaaactcacgacgcaacaacaaacaagaaacaaaagactcccccgaaccaactacttacaacaaacggagaagaaacccgctccgaaacaagcaccaccgagttggatcctgcaggaggatgaggaccaatttgan

SEQ ID NO: 6863 - DNA, 5360 bp, Glycine max
cagagttgttcccaacttcacaccgctccgcgatctctcacaatccctctctccttggattccgcgcactccatttcagatcgataatcgcgatagcaccagcagaaatcagtctcgcgtttcctcaaaagcgcgaacaggatctgaatgcggtgaagttgttgtttaagaacgcgattcatggagtggacgacgctgcagcaccttgatctgcgccacgtggggcgcggcgtgagacctctgcagcctcacgctgcttccttccatcctcaccaagctctcgtcgccgtcgcaatcggaacctacatcgtcgaatttgatgcattaacaggaagcaagatttctgctcttgacattggagcacctgctgtgcgaatgtcttacagtcctacaagtgggcatactgtgattgcaatcctccaggattgtacaatacggtcttgtgattttgacttagagcaaacatgtgtattgcattcaccagagaagaagacagagcaaattttttctgatacagaagttcatatggctttgaccccactacaacctgttgtgttttttgggtttcataaacgaatgagtgtgacagttgttggaactgttgaaggcggtagaacacccacgaaaatcaagacagacttgaagaagcctattgttaaccttgcttgtcatcctcgcctccctgtactgtatgttgcttatgcagaaggtttgattcgagcatataatattcatacctatgctgttcattacacactacaacttgacaatactataaagcttcttggtgctggtgcatttgcatttcatccaactctggaatggatttttgttggggatcgacgaggtacactgctggtatgggatgtatcaactgagagacctagtatgattggaataaaacaagttggctcacaaccgataacatcagttgcttggctccccatgttgcgtttacttataactctatctaaggatggaaatcttcatgtttgggaaacgcgtgttacagtgaatcctaatggacctcccacacaggctaatttttttgagcctgcagcaattgaatcaattgatatccctcgcatcctttctcaacagggtggagaagcagtttatccattgccgcgaatcaaagctttagagtttcatccaaaatctaatttggcagcactagtgtttgcaaatgcgacaattgcggacaattcaaaaaataaggccagatacagtacagatgggagaaagcaactttttgcagttttacaaagtgcacgaggatcttcagcatctgttttaaaggaaaaactttctgccttgggttcgtctggagtgttggcggaccatcagcttcaagctcaactacaagagcatcatcttaaaggccatgggcatcttacaatatcagacattgcaaggaaagcttttctttatagtcattttatggaaggccatgcaaaaatttctcctatatcacgcttgcctctcatcactgttctagataacaagcatcatctgaaggactttccagtttgccagccatttcatttggagctaaatttctttaataaagcaaaccgagttcttcattatccagtcagggcatactatatggatggactgaaccttatggcacacaatctttcatctggatctgacagtatctacaggaagctatataattcgattcctggaaatgtggagtaccgtgcaaaatacttgatacacagtaaaaaacagcgcttatttcttgtagtgtatgaatttagtggtgctacaaatgaagttgtgctttactgggaaaatagtgatgcacaggtagcaaacagtaaaagcagcacagtaaaaggtcgagatgcagcatttattggccccaatgaaaatcagtttgctatacttgatgatgacaaaacaggattgggtgtgtatactctaccaggaggggcctctcaagaagctaaggacaatgataaagtttttgaagaaaatccaactgcaactgctgagactagtgctggttcaattcggggcccgacaccatttatgtttgaaactgaagttgatcgcatcttttctactccattagattcatctttgatgtttgcttctcatgggaaccaaattggaatagcaaagctcatacaagggtaccgcctatcaacttcaactgccaatggccattacatatcaaccaatagtgaggggaaaaagtcaattaagttgaaaagaaatgagatcgtacttcaggtgcactggcaagaaactcttaggggacatgttgctggaattttaacaacacagcgagtccttattgtttcggcagcccttgatatactccctcgcgcccgtgcaaattttgacaagggacttccttcatttagatctctattgtgggttgggccagccctcctttttttctactgctgctgcaatcagtatacttggttgggatggaaaagttaggtctatcctctcaatcagtatgccttatgcagtcttggttggttctttgaatgatcgattgttgcttgctaatccaacggaaataaatcccagacagaagaagagggttgagatcaaaagctgtcttgttggtcttcttgaaccaattcttattggatttgccacaatgcagctaagttttgaacagaagcttgacttgtcagaaatattataccaaataacatcgaggtttgacagcttgcgcataacaccaaggtctctggatattcttgctagaggatctcctgtttgtggagatttagctgtggctttatcacaatcaggtccacagttcactcaagtgatgcgaggtgtttatgctgtgaaagctcttcgtttttccactgctttaaatattttgaaagatgaatttctgcgttccagagattatccaaaatgtcctccaacatctcatttatttcatcgattcaggcagttgggttatgcctgtatcaggtttggtcaatttgatagtgcaaaggaaacatttgaagttatagcagattatgaaagtatgcttgatctgtttatatgccaccttaatcccagtgccatgcggcgtcttgctcaaaaattggaagaagaaggtcttgactcggaattgaggagatattgtgataggatattacgtgctcgatctacaggatggacacaaggtatatttgccaacttttctgctgagagtatggttccaaaaggacctgaatggggtggtggaaactgggaaattaaaacacctactgctgtgaaggatatacctcagtgggagcttgctgcagaggtgacaccatacatgaaaactgatgatggtacaattccatccattatagtagatcatattggtgtgtatttaggctcaatcaaaggaaggggcaatattgtagaggtgagggaagatagtttggttaaggttttcatgcctacgggtaatgagaataaagtaaatggtcttgaagcatcttcagttaaatccatatctaatcagtcgaatgtggtcggtaataccaaaggtgattcattgatgggtctggaaagccttaaccaacaccttgccagttcctctgctgatgaacaggccaaagcagaagaagaatttaagaaatccatgtatggagctgctgctgatggaagcagtagtgatgaagaaggagtatccaagataaaaaaattacgcataaaaatacgagacaagccaattgcctcttctactgtggatgtgaataagattaaggaagccactagacagtttaaacttggtgaagggttagctccaccaatgagaagcaggtcctcatctggtggaagccaggatcttggtcagatattatcccttccaccaccaactacaggatcggcttcttccactgtttcaactcctggtgacctttttggtacagatgcgttgactcaatcagaacccatttcacagccaactactggggctgtgggtgggggacttaaggcaggacctattcccgaggatttctttcagaatacaattccatcccttcaagtggctcaatcattacctcctgcaggaacttttctctccaaatacactccaggggtggaaattagcaagacaactcctaatcaggttagtgcttctgaagctaacgttggtcttcaaggtggtgtttcacctcaaaccattcagcaacctgctgttccaattgagtccataggacttcctgatggtggtgtcccaccgcaatcctcagctcaggctgtggtcatgccccagtctcagttacaagcttctcaggctcaaatttctagccaacctctagatcttagcatacttggagtacctaattctgccgattcaggaaagccgcctcaaactggttctcaacagattgctgtgcatcctggacaggttccccgtggagctgctgcttcagtatgtttcaagactggacttgctcaccttgagcaaaataatctttcagatgcattgtcttgctttgatgaagcttttcttgccttggctaaggaacaatctcgtggaattgatataaaagctcaagcaacaatctgtgctcaatacaagattgcagtcactcttcttcgggaaattggacgtctgcaaaaagtccatggtccaagtgcaataagtgcaaaagatgagatggcaagactgtcacgtcatctcggttcgttgcctcttctagctaagcatagaataaattgcattcgaactgccatcaaaagaaacatggatgtccaaaattatgcctattcaaagcaaatgctggaactactgttgtctaaagcacccccaagcaagcaggatgaatttagaagcctgattgacctgtgtgttcagaggggtttgactaacaagtccattgatcctttggaagatccctcgcaattctgttctgccaccttaagcaggctgtcaaccatcggatatgatgtttgtgatctctgtggagccaaattttcagccgtgactgcgcctggatgcatcgtctgtggaatgggaagcatcaagagatcagatgcactagcaggagcaggaccagttccttctccgttcggttgagtctcaaagatgggtcttaatccttgctatatataacctttgttaccctaatgttgtaaagagagagacaactttgtagagaaagtaaacaagccattatagggtaacaaatattgcaccacaactggagagattatagggtttcacttactgcttgaattttgatgattgtgatggttgtttctcggctctcattttttttccctccccgatgatgcattgtctgtgattacagaatgtgttgctctcctgtatgtttttccatgatataaacacgaaattgcagtatatagttgttttgcgtcatcat

SEQ ID NO: 6864 - DNA, 1575 bp, Glycine max
tcagctacgtaggccccccccccgtctgacagcaactcttctaacttttgacacctcactcactcgtcgattccatttgttacctcagactcagacacaacacaacattctatgttcatgtgagatgtgagtgacggtgatacctttcgtgcgtttacttttcttttcttttctctcttcacatcaaaatcacttatctctctctctagagaaaatggcagcttgcatattcacggtggcacaggacggaaccgcagatttccaaacggtgcaggaggcgatcgacgccgtgccgctcggcaacattcggcggacggtgattcgggtgtcgccgggaatctaccggcaaccggtgtatgtccccaagaccaagaatttcatcactctcgccgctctcagccccgaggacactgtgcttacctggaacaacactgccaccggaatcgatcaccaccaacctgcgagggtgatagggactgggacgtttggttgtggaagtaccattgtggaaggggaggactttattgctgagaatattacatttgagaattctgcgcctgagggttcagggcaagcagttgcaattagagtaacggcagatcgatgtgctttctacaattgcaggttccttggatggcaggacacactatacttacattatggtaaacaatatttgaaagattgctacattgaaggaagtgtggacttcatctttggcaacagcactgctcttttggagcactgtcatatccactgcaagtctgcaggcttcataaccgcacagagcagaaaatcatcacaggaaacaactggttatgtattcttaagatgtgttatcacaggcaatggaggaaattcatatgcatatcttggacgaccgtggggcccttttggaagggtggtctttgcatacacttacatggatcaatgtataaggcatgttggctgggataactgggggaaaatggagaatgaaagaagtgcttgcttttatgaatacaggtgttttggacctggttgctgtccatcaaaacgagtaacgtggtgtagagaattgttggatgaagaagctgagcagttcctcacgcatcctttcattgatccagaactggagaaaccttggcttgctcaaaggatggccctcaggattccatattctgcttgaaaatcacttagggcagggattgatgagaatgttccaaacagacaatcacagtgtttctacgcttaatatcttgtttgtttggcactttggcttaagaaaatatgccatgtttgcatccgtgtgaagtgctagatgatgtgttttgtatgaaatctcccaagaggctatatttccttcattgaagagttttgtgtgtgtgtaataaatagagtaagagcttcatatccaaaatatagatgagttaatggttaacattgtaggaattcgttcttgagactcaggtttcatactcgtatcgatggagttgatgtttatatactgcaaaatcaattatggccaaaaatgagcatcagatcagagtcaattcaaatcatcagttcttgagtttggacaaaaaaaaaaaaaaaaaa

SEQ ID NO: 6865 - DNA, 644 bp, Glycine max
  misc_feature (470)..(470): n is a, c, g, or t
  misc_feature (508)..(508): n is a, c, g, or t
  misc_feature (524)..(524): n is a, c, g, or t
  misc_feature (539)..(539): n is a, c, g, or t
  misc_feature (562)..(562): n is a, c, g, or t
caaaaacgtgtctgacagcaactctgttaactgtgacaccccactcactcgaccattccatttgttaactcagtctcagacacaacacaatccaaaaaacacaacattctggagatgtgagtgacggtgatacctttcgtgcgttttcttttctgtcttcaccccaaaatcacactctctctctctagaaaatggcagcttgcatattcacggtggcacaggacgggaccgcagatttccaaacggtgcaggaggctatcgacgccgtgccgctgggcaacattcgccggacggtgattcgggtctcgccgggaacctaccggcagccggtgttcgtccccaagaccaagaatttcatcactctcgccgctctcagccccgaggacaccgtgcttacctggaacaacactgccaccggaatcgatcaccaccaacctgcgagggtgatggggactgggacgtttggttgngggatgtccattgtggaaggggaggactttattgctgngaattttacatgtggngaattctgcgcctgngggttcagggcaagctgttgcgnttggggtggcggcgggtcggtgggcttgctgcatttgctggttgctggggtggcggggcccactgtgctggcgtggtggggg

SEQ ID NO: 6866 - DNA, 452 bp, Glycine max
agatctgtgtgccttctcagctgaatgatggcaacagaatactattatctcttgtttcttctttggttcctctctagcttaaccttcttattggacaaccacgttgtgtttctacgcgtgaaaatactactcctattgggtgacattcactcctttgcctacagcacaaatgcttgggcttttcattcctagttggtaccatatgatacaaaaggttgataatctattttacttttttggtacattctgttgcttagtttgtatttcgggttgaatgccatccataccaattgtaagaaaaaataatagtgtgtaaatgacaaaacttcctctcaatatgagagagaccaaagattgatcacactttccattcattatcacattttatatattatatacccaatgattttaagcggaaatgcagtgtgcagctggcgcattttatttctggc

SEQ ID NO: 6867 - DNA, 1404 bp, Glycine max
cccacgcgtcaggtacctctttgctttttcccattgcttctaacgtgagatctcagattgcaattgcctcttctcttctcccagaatcggtgtaggttacaggtttaagggttttgttttcatttaggtcactaatccgatatcatgaagctcgatacgactagtctcgaatcgtttcccacactgattgcacctcaaaacgacgtcgccggagaactctccgccgctccgttctttgaccttccgaattccaatgacttcgatgggttcttgaaagacgctattcagatggtgaagcccgcgaagggtactacaactcttgcttttatatttaaagagggtgttatggtagctgctgattctcgagctagcatgggaggatatatatcgtcgcagtctgtgaagaaaattatcgaaatcaatccgtatatgcttgggacaatggctggtggtgctgctgattgccagttttggcacaggaatctcgggattaagtgtcgtttgcatgagttggcaaataaaaggagaatttcagtgacaggagcctcaaagctacttgccaatattttatactcttatcgtggaatgggtttatctgttggtaccatgattgccggatgggatgagacgggccctggtctatattatgttgatagtgaaggaggaagacttaaaggcactagattctcggttggatctggttcaccatatgcttatggtgtattggatagcgggtaccggtatgacctgtcagttgaggaagctgctgaacttgctcgacgagcaatttatcatgcaacatttcgtgatggggccagtggtggagttgctagcgtttactatgtgggaccaaatggatggaagaaactgtctggtgatgatgttggggaacttcattaccattactacccagttaccccaagcaccgtggaacaagaaatggttgaggctactggtgcttgatgaagtaactcgtggatgtctttttaagtttcctttgcttgccagcgtattttgaacccattgcatgaaactgattactttataattggaaattgacaatagtttgataaatacaagtgctgtcctatcctgttgtgttttagatcaagccatatttatcatccaaaatgatagattagagccatatataatgtggagtggtttaaattggtaaagcaggtcagacgtgtattgctagctattgctaatgtaatccatcttgcgattaatggttttcgtggcaacttctgaaagttgtacaagaaacttcctagggagaattgtggttcaatgtcttcgactgattgtagtagttagtaagcatacttttggtacgtcatggttttaatttaaagcttcgtcaaattgagactcaaaaaaaaaaaaaaaaaaagggcggcc

SEQ ID NO: 6868 - DNA, 2514 bp, Glycine max
  misc_feature (32)..(32): n is a, c, g, or t
gtacgaccctgacaggttacctcggtcccggnaatctcccgggtccgacccaccgcgtccccgcaattgttcactcttccttcgcgaagaagaggtaacagcatccgacaccagcgccagttaccgttttccgcgcgcttccttccttctcgaaacgccgtcgttttgctaccacacctatatttagcatactccttcgaacctcctttttctcaccgacgcagcttccggtttttgcttagggttttaagagagcatgggaagggttcaggtgaataacaaggaagaattttctcaaatggagaacgatgatttcagtgattcacagttagttcgtcacttcagaggcgtgcttgttgcagtaacaactggtgatcgagagaattacgacgagctcgtcggttatttgcacccgaagaagaatcttaatcctgatgaggttgctatacttgtgacgactttgaaggcgctttctggagcagtgtcctatatagattctgttcatcatgaatccctgctctttgctgtttcgagaatgagcctctggaattatggaattgatattatggatgcgctgctggaactcataatatctttggctgcttccaatggaaaatacatcgattggtgtttggagatgcttgtgaaacattatgtgccgcctggctgcctcttggcgtcagaagggcaggagaacggaattgaaagaaaaaataaagttctgtcacgggtacatgcagcattgaaagaaatagctgatttggtgcctcttgcacccttgcgactatctccaatagttatccagaaaatgccgagtgtcttcagtaaggaaactgagattgtcatgtatgtcgagaatatgttgaggctggagagtggtgcacttggagaaactgttggttctaccatgctgcctgctcttgtggataggttgctagagttggatgtggaaattggatgggatggaatcctgcaagaagatgctaaaggcatatttgaaatggagttagaagatgttactgaatttactgatgaggatgagaattgtgatagtatgctttcgtcagagttgttaaataggaaaaatttgcaaggcaacttggtggttgagaaattagatagcctaatggtgctggcatttttgcaccttgaatcctgtcaaagcaggggccgtttgactggggtattcgatactctactagcttcatttcagagaaccgtattgaatgcgtacaagtcagcttcgtccccccccccccccccccatgcatgtgcactggaccctgaaggatgtggtgtgaaatttgccatggttcttgctgatatgtttggatgtgatgttaatccccctattactaggatgagtgctgctgcttatcttgctagttatttgactcgtgcaaagttcctttcagctgcattggtcactaacatcatacaaagcttggttgattggtgttatgcatattgcaagttacgtgattttgatatgaacccacgagcacatcaagttttttattctgggtgccaggccattatgtatattctgtgttttcgcatgagatctttgatggatattcctaggcttaaattgcagctgcttaatatgcccatggaggcaatcttgaaacataaattgagtcccttgaaggtgtgtttgcctactgtagtagtggaatttcttagacaggcaaaggctgctcaacttttcatggcgtcagagtcatttgtttttgatgatatgcttgagtctgatctttccaaggcttttggcgggattgatagacttgacatgtttttcccatttgatccatgtttgttgaagaaaagtgaaagctacataaggccacattttgttcgctggtcaaaagtcagaactacatatgatgatgatgacaatgacgaactcagtgatagtggcagtgaagtatcagatgatgattttatcgacaggaacacaaaggatatgattgatgatgatatgatggtgagcgttgaaggttttgattttaaccctgccttgaacaaaatgtctataacccccagaaaatcttttaaacatgggtttgagccccagttgaatcaatgtaagcgaatgccagctagaatcagcccctcccctagtccggagtttctgtgatacctatctgcttgtgatcccttttacgtaaaataggaaatctgtcgattttgcagtgttccttccaggaactaatcagcatagtggtgtcctaaaaaatagggcattgatattttttgggccgttgtaattttggatgagtcctatccaactccttaaaagtaaagtgtgaaattatacccgttgatttaagtaattttgccccttagagaagcagagccaaattcgtaatgttcatccagtattccttttttcctgtgttaaagtgagtaggagcccccaactttaagattcgttccctgctatattgtaagtataatttatgttttgaggatccgctccatgaaaaccagtatttgttgagttgggggccc

SEQ ID NO: 6869 - DNA, 1783 bp, Glycine max
cagctacgtaggcccccccccccatgactaattaactgttatgtatatagggttagtgtttatctctatgtttattcattatgcaatgctagttattcggggagtttaagttatcttctttgctgatcatgaatatttatatattaaattatatgctgtatattttgagttttctgcttatatttcccatgactaatgaataatgatcattgtatttttctaataattatcatgatttttggtggttttacagctttcgtcagagttgttatatagctgcgagttgccggccgacggggtggttgagaaattagatagcctaatggtgctggcatttttgcatcttgaatcctgtcaaaacagtggccgtttggctgaggtattcaataccctactggcttcatttcagagaactgtattaaatgcgtacaagtcaaaatttacccagtttgtgatgttctatgcatgtgcactggaccctgaaggatgtggtgtgaaatttgcgatggttcttgcagatatgtttggaggtgatgctaatccccctattactaggatgagtgctgttgcttatctggctagttatttgactcgtgcaaagttcctttcagctgcattggtcactagcatcatacaaagcttggttgattggtgttatgcttattgcaagttccgtgattttgacatgaacccacgagcacatcaagttttttattctggctgccaggccatcatgtatattatgtgttttcgcatgagatctttgatggatgttcctaggcttaagttgcagctgcttaatatgcccatggaggcaatcttgaaacataaattgagtcccttgaaggtgtgtttgcccactgtagtagtggaatttcttagacaggcaaaggctgctcaacttttcatggcatcagagtcatttgttttcgatgatatgcttgagtctgatctttccaaggcttttggcgggatggatagacttgacatgtttttcccatttgatccatgtttgttgaagagaagtgaaagctacataaggccacattttgttcgctggtcaaaagtcagaactacatatgatgacgatgacgacaatgatgaagtcagtgatagtggcagtgaattatcagatgatgattttattgacaggaacgccaaggatatgattgacgatgatatgatggtgagcgttgaaggcgctgattttaaccctgacttgaacaaaatgtctattactcccagaaaatcttttaaacatgggtttgagacaccgttgaatcaatgtacgcgaatgccagcaagaatcagaccgtccactagtccggagtctctgtgatacctatctgcttgtgatgatctctttacataaaataggaaatctgtcgatctttcagtgttcatgccaggaactaatcagcatagtggtgtcctataaaatagggcattgatatttttgggatttgagtcctatacaacgaggggagttacttaaaaggaaagtgtggaattatagccgttaatttaagtggttctgcacattggaggagcagagtcaaattcgtaatgttcatatagtatcatttttttattcacaccttgtactgtgttagtgagtaggagccgcaaaccctaagattcgttccctgctatattgtaagtataatttatgttgaggatacgctacattagataaaatacagtattttgttgagttggaggacaaaaaaaacaaaaaaaaacaaaaaaaactgacgggccccccacgcggttggactccccc

SEQ ID NO: 6870 - DNA, 1826 bp, Glycine max
tcagctacgtaggccccccccccccccgttgctgttccctcttcgtagccgcaattgctcttccttcgcgaagaagaggtaacagcatctgacaccagcgccagttaccgttttccacgcgctttcttccttctcgaaacgccgtcgtttggctaccacacatatatttagcatcactgcttcgaaccttctttttctcaccgacgcagtttccggttttaaggaagcatgggaaaggttcaggtgagtgacaaggaagaattctctcaaatggagaacaacgatttcagtgattcgcagttagttcatcacttcagaggtgtgcttgttgcagtgacaacgggtgatcgagagaattacgatgagctcgttggttatttgcacccgaagaagcatcttaatcctgatgaggttgctatacttgtgacaactttgaaggcgctttctggagcagtgtcctatatagattctgttcatcatgaatccctgctctttgctgtttcgagaatgagcctctggaattgtggaattgatattatggatgcactgctggaactcatcatatctttggctgtttccaatggaaaatatatcgattggtgtttggagatgcttgtgaaaaattttgtgccgcctttttacctcttagattctctgagacaggagaacggaattgacagaaaaaataaagttctgtcacgggtacatgcagcattgaaagaaatagctgatttggtgcctcttgcacccttgcgactatctccaatagttatccagaaaatgccgagtgtcttcagtaaggaaactgagattgtcatgtatgtcgagaatatgttgaggctggagagtggtgcacttggagaaactgttggttctaccatgctgcctgctcttgtggataggttgctagagttggatgtggaaattggatgggatggaatcctgcaagaagatgctaaaggcatatttgaaatggagttagaagatgttactgaatttactgatgaggatgagaattgtgatagtatggctagcttgccaagctaagttgtacttaggcttggcttaatctggccatggttgaggttgagcagctttatgaagtggaaaaacttcgtacattgagttcagggagtgtggcagaatttttcaattgagttcagttggtaaatatttccttgtgacctcgtgtcggtccatcaattgaactgggtatgtttcctaagttaattctggtgactggtgcgtgttctccatctgtagtcataggtgcctgcattaggttgctaagtgtatctagtttgcctttgactatattgcattaggttgccaagtgaatctagtttgcctttgaggtgagccaacctatggcattgagtatttgttggctgttatccatccgtttacattcaagaataaaattcttgtaacaaattcaatggctgaaagtgtccatgcattgtgctttcattggcatggttgatgtggcaaacaaatagtgactgaaattgtctgggtcattggggtatcatacatgaaaattgacaagatcaaattaagggactgtagcatgtcatggtagaagttatatggtaaaagcaaatgtgacaaccaagccagaataatggacaatcaaaataacagtacatttagttttttcagtcaaaaccacagaaccaaaccaaaacagaaagattctaacttaactatgaaattggccgaaacaaaaaaagaagataacagaaattaataagcaagtagacgatactatattatagcacaggagaaagtgtacagaaaaccaaaataaaaaaaaaaaaaaaaaa

SEQ ID NO: 6871 - DNA, 1210 bp, Glycine max
cattcagaagaagaaaaacttgctctattctgtatattatctctgaacgttctgtttccttcaattcgtggcctctctcagtagaatcaccactttctgccaccgtcaggtttctgacttggttttagtaaggattcaccttttcttatatcagttggtggaaactataaattgtggctggagttggataggaacggagcagaacagaactatagtatctcatctctcttgatagtagaagtggtgctgactttcttgtgatcagtgatgctggtgaaatctctctcacttcattctcatgccttctcaagttgcagtttttctgcaagtgaaattggaacaaacccaagttgggttcccttaaagtccttaaatagcctctgctgttcctccaagcctagaaatttatgcagatttttgtgtctgagcactcaaaatggtggcttcagagaaaactctggtgaagttggacttggagatgcagtgataattgtggatcatggctcgcgtcgcaaagagtcaaatctcatgcttaatgaatttgtggagatgtttaagcataaaactgggtatgagattgtggaacctgctcatatggaattagcagaaccatcaataagagatgcttttcaatcttgcgttgaacaaggtgctcatcgcattattgttagtcccttttttctctctcctggaaggcattggactcaggatattccttccttaagtgcagaggcagcaaaggaacatccagatgtgtcatacattgtaactgcaccccttggattacatgaactacttgtggatgttgtgaatgatagaatcaaacattgcttaaagcatgtggctggagatgcagatgagtgttcagtttgttctgggactggtaaatgcaggctctattaatttgtgaaactagattgttttggatgctattaaatgaggctggaagtcgaggaatctgtaaattgggttgcaactgttctgaagttgttattacgacgcacttgaactttgcttcatgtttggttcgacgtgacttcttgaggagcttcgtttatgtttcttactccaagttgtatcagtatttaacattaatgttgaggtttcgcttacccatttgcaaatcatcaagaaactacccatctttctctctcaaaaaaaaaaaaaaaaaaaaaaacggcacgagaagcgcttctcgtgccggcttctc

SEQ ID NO: 6872 - DNA, 734 bp, Glycine max
ctaactctgtatatataaactgattttctgcactgggtgcatcagaggctggatcatttggggcgggctgtttttgtacccatgaaaagcaagttccctaatgatatgctaagtagctgcaagagatccatgtattggatgcgactgaagaaatcccttcttggatttgttcttgttgcatcagctacgtaggcccccccccctaatatttctgatattttgtttcatatttcctcaaaccactgcattgggcttcttggatttctcttacaagagtgatgataacttggttcacaccaccttaaaaagtgctgagaaaacccctatgctacatcatgaccagggaaagagtaagctctctatatctagtgagatgaatcatctaatggaggcctctagtggcaaatattcctatggtcaaggcaatccatctgaacgggaaatatctcagcatttgacacaaaaatctgaaaatcatgaacagactaatcatgcatgggatattcaaagtgaaagaaaattgtcatcctcagcagttcagtgctctgacccaatgaaagcatctcagttgggttatctcacggtcaaaactggtaaagaaaagggtagaagaaaaaagaggaagagtcttggtgccaaattagcggcactgtctgaagtttcaagcagtcaaagtgggaattctacaccctcatctcctttatcccctactccctctgctacacctaaatgta

SEQ ID NO: 6873 - DNA, 1165 bp, Glycine max
  misc_feature (40)..(40): n is a, c, g, or t
  misc_feature (65)..(65): n is a, c, g, or t
  misc_feature (124)..(124): n is a, c, g, or t
  misc_feature (214)..(214): n is a, c, g, or t
tcagctacgtaggccccccccccccccccccatcttgaanatggggcggtgctatttggatgganaagattgcaagaggattgagcagtatatgagtgcttcgctcctgtccaagtcatgcctntcctcacttgcatttctgatcacaagcactttcttggggatttcttatgatctcttggcacccattccttggatcaaaagaaacattcanaagtttaggaagaatgacatgcttcaattggtgcccgaacaaagtgacgaataccctttagaacatcaggccattgataatcataatagtcttcagaggccactgatgcatgacaatgcttatgacattgccaatggggataatgttgagggacaagatctttttgtttatccaatcactggaagctcgcctgctcccaagcagacatttgattttgcacagtattacgcctttaatttgacaatttttgccctgactctagtatactgttcatttaatccccttgtggttcctgttggtgccatttattttgggtatagatatgtggttgacaagtacaattttctgtttgtgtatcgagttcgtggcttccccgcaggcaacgatgggaggttaatagacactgtaatatgcatcatgcgtttctgtgtggatctgttcctacttgccatgctcctattcttctcagttcaaggggactctacgaagctgcaagctatattcactcttggattattagtcgtgtataaattactgccttcaagtaatgatagttttcaaccaactcttttggagggcattcaaacagttgataacgttgttgatactaggccaattgattatgaggtcttttcacagcccaggtttgattgggatacccctcaaatgtgactcaagctttgatatgcatagcttgctatcctataacgatgtatctgttcccaatcacgtatgtaacagaaaaaaaaattagtggtgagggatagggatggggacaggggtcacgctgggccagggaagagggttcctcttgtaactgatgttcaaaatttgttatacacgcatttatgacatgccaattcttctcttccttttcttgagtaattccaaagcttggccaggatgttaataaatgtaccatatcattttttgtaaaaaaaaaaaaaaaaa

SEQ ID NO: 6874 - DNA, 1869 bp, Glycine max
ttccttagttctcctctcttctttctggagttctcgccattcatcacccccaccaatctcctcctcctccgtacacatggccacgcttgccgattcttttctcgccgacctcgatgaactctctgataacgaggctgaaattcccgaggataacgatgtggatgccgcagacatggaagaggatgtcgatggcgaccttgccgacctagaaaacctaaactatgatgacttggacagtgtttccaagttgcagaaaacccagaggtacactgatgttatccagaaagtggaagaggcacttaataaaaaggagtctgaggtcttgtttcaggtagtggatatagaagatgatcctgaataccaactgattgtggattgcaatgcactgtcagttgatattgaaaatgaaattgttattattcacaactttattcgtgataagtatcggttgaaatttccggagcttgagtcactggtgcatcacccgattgattatgctcgtgttgttaagaagataggactcgagccgatgaaatggatctcactcttgtggatttagaagggcttttaccctcggctattattatggttgtctctgttacagcatcaactacaactggcaagcctcttccagaagaagtgcttagcaagacagttgaggcctgcgatcgagctcttgatcttgactcagcaaagaagaaagttcttgatttcgttgagagtaggatgggctacattgcacccaatctttctgctatagttgggagtgctgttgcagccaaactcatggggacagctggtggtctagcatctcttgcaaagatgcctgcttgtaatgttcagcttcttggtgccaagaaaaagaatcttgctgggttctccacagcaacatctcaatttcgtgtaggttaccttgagcaaacagaaatatttcagactactcctccttctctaaggatgcgagcatgccgactcctggctgcaaagtctacacttgcagcacgagtagattctatacgcggggatccatctggaaagactggaagggctttcaaggatgagattcacaaaaaaattgagaagtggcaggagccccctcctgctaagcaaccaaaaccgcttccagttccagattctgagcctaaaaagaagagaggtggtcgtcgtcttaggaagatgaaggaaaggtatgcaataacagacatgaggaagttagccaataggatgcaatttggagtcccagaagagagttcattaggagatggtctgggtgagggctatggaatgcttggtcaggctggcagtggcaagcttcgtgtgtctgttggtcaaagcaaacttgcagcaaaagttgctaaaaaattcaaggaaaagaattatggtagcagtggtgctacctctggtttgacatcaagtcttgcattcacaccagtgcaggggattgagctgtcaaatccacaggctcatgcacaccaacttggtagtggaactcaaagcacgtatttctctgaaactggaacattttcaaagatcaagaggacatgaaaccatacatgaatgcaaattcttgttcagtcccctggattattcttggtggacatgcctagaaattgttgatgctgatggatattacttgatagttttatggtagatttttgaagagtagccatgtttgttgttgattatgatgttgataccttccattgtatatgacttctgcagtgccttattccagtttcctttccgtagtaacaaagaaatgttgatcaatatagtggcaattttcatggcctagcttgagaacaaattgtcaatgtagaattgtagaccaagctcgtgtcaattgagaccaagtttttttgcgagccc

SEQ ID NO: 6875 - DNA, 2849 bp, Glycine max
cggacccacgggatgagttattgatcatttttgtatatacattttcgatttttctctcggttgttcctttggctctcgtcaaaagcaacaactgcattcaaagggagggctaaaaaacaatgttgccatcattaacacacatggtttcgctctccattttgaatctcctccacactcaaaaatcatagtacatagatagatagctcctttattatacacaaacaatcacacaccgtatcccttgttttgagtttccgaggtcagaacatggcctgcgccgaaaacagacaaccgaaggttcctgttttcctctgtttcttctcatttacgtttgttgccagcgttttgctgaattgcaaccgggtttcggggcagacatccgctgtttttgcctgcgatgttgcgaagaacccggctttggcgggttatgggttctgtgacaagtcactctcggtggaggacagggtggctgatttggtgaagaggctcacattgcaagagaaaatcggaagcttggtgaattccgcgaccagtgtaagtagacttggcattcccaagtatgaatggtggtctgaggcacttcatggagtctccaacgttggacctgggacccacttttccagtctggtgcctggcgccaccagttttcccatgcccattctcactgcggcgtcattcaacgcttcgctctttgaggccattggaagagtggtttcaacggaagccagagcaatgtacaatgtggggttggccggtttgacttattggtcaccaaacataaacatattcagagatcccagatggggaagaggacaggagacaccaggggaagaccctttgctaagtagcaaatacgcaacaggatacgtgaaaggtttgcaacaaactgatgatggagactcaaacaagctcaaggttgctgcttgttgcaaacattatacagcctatgatttggataactggaaaggcattcagcgttacaccttcaatgctgtggtgacacaacaagatatggatgatacattccaaccaccgtttaagagctgtgtgattgatgggaatgttgccagtgtcatgtgttcctacaaccaggttaatggaaaaccaacctgcgcagaccctgacctccttaaggggattatccgaggagaatggaaattaaatggatatatagtttctgactgtgactcggtagaagtgcttttcaaagatcagcactacaccaagactcctgaagaagctgcagccgaaaccattctggcagggttggatttgaactgtggaaattatcttggccaatacacagaaggggcagtgaagcaagggctattggatgaagcatccattaacaatgctgtctcgaacaattttgccacattgatgcgtcttggtttctttgatggcgatccaagcaagcaaccttatggtaaccttggtccaaatgatgtatgcacttcagagaaccgggagctcgcccgtgaagcagcaagacaagggattgtgttgcttaaaaatagtctgggatcattgcctctcaatgccaaagccattaaatcattggcagttatagggcccaatgctaatgctaccagggtcatgattggaaactacgaaggcattccttgcaactatatatcacccttgcaagcactaacagccttagttcctacgagctatgctgccggctgccccaatgtgcaatgtgcgaatgcagagttagatgatgccacacagatagcagcatctgcagatgcaacggtgattatagttggtgcaagtctagctatagaggcagaaagtcttgacagaattaacattcttcttccaggacaacagcaacttctagtgagtgaagttgctaatgcatccaagggacctgtgattcttgtcataatgtctggtgggggcatggacgtgtcctttgctaaatctaatgataaaatcacaagcatcctttgggttggctaccccggtgaagctggtggagctgccatagctgatgttatttttgggttttataatccaagtggaaggctacccatgacatggtatccacaagcatacgtaaacaaggtaccaatgacaaacatgaacatgagggcagatcctgctacaggttaccctggtagaacatatagattttataaaggggaaactgttttctcctttggagatggaataagcttctcaagtattgagcacaaaattgttaaagcaccacaattggtgtctgttcctctagcagaagatcatgaatgccgttcctcagaatgcatgtcacttgatattgctgatgagcattgccaaaacttggcctttgatattcacctcggggtcaagaacacggggaaaatgagcactagccatgtagtgttactgttctttactcctcctgatgtgcataatgctcctcagaaacacttgttgggttttgagaaagtgcacttgccaggaaaatcagaagcacaggttaggttcaaggtagatgtttgcaaggatttgagtgtggtcgatgagcttggcaacaggaaagttccactgggacaacatctgcttcatgtgggaaacttgaagcatccattgagtctgagggtttgaaacaagtcttcaaatcctcggcactgatttcttttttttgccttcttttatttttgcctttttcctcgctggtttccttaaaagaattcttctaggggaccagaaataagtcagaggtaactgtaacaaaattctctgattggcattatcgtattcaaatcacaaatttggaaccaaaaaaaaggacgccagtctgagaggctctcacagccataccgtaggtgagcatcgcgcgcaatagctgttcatag

SEQ ID NO: 6876 - DNA, 2512 bp, Glycine max
gcaacattttgctctcaaggccacagcaatggccaacaaagtccatgttttgttgtgtgtccttgtgacaacgttgttgagttgtgatgttgttgtcgttgtttggggccagacattcgcttgtgatgttgggaagagccctgcagtggcaggttatggtttctgtgacaagtctttgggagtggaagcaagggtgaaagaccttgttgggaggttgacattgcaagagaagatagggaacttggtgaactctgctgtggatgtgagtaggcttgggattccaaagtatgaatggtggtccgaagcacttcatggagtgtccaacgttggccccgggacgcgattctccaacgtgattcctggtgcaaccagctttcccatgcctattctcactgctgcttctttcaacacttcgttgtttgaagtcattggaagggtggtgtcaacggaagcaagagcaatgtacaatgttggccttgctggtttgacatattggtcaccaaacattaacatattcagagatccaagatgggggagaggtcttgaaacgccaggggaagaccctgtgctcactagcaaatatgcagcaggctatgtcaaaggtcttcaacaaactgatggtggagaccccaacaagctcaaggttgcagcttgttgcaaacactatacagcctatgatgtggataattggaaaggaattcagcgttacaccttcaatgccgtggtgactaagcaagatatggaggacacattccaaccaccattcaagagctgtgtgattgatggcaatgttgccagtgtcatgtgttcctacaacaaggttaatggaaagccaacttgtgcagaccctgacctcctaaagggtgttgtccgtggtgaatggaaactaaatggatatatagtttctgactgtgactcggtagaagtgctttacaaagatcagcactacaccaagactcctgaagaagctgcagccatatccattctggcagggttggatttgaactgtggaagatttcttggccaatacacagaaggtgctgtcaagcaagggcttatagatgaagcatccattaacaatgctgtcaccaacaacttcgccacgttgatgcgtctaggattctttgatggtgatccaagaaagcaaccttatggaaaccttggtccaaaagatgtctgcactcaagaaaaccaggaacttgcccgagaagctgcaaggcaagggattgtgttgctgaaaaatagtccagcatcactgcctctcaatgccaaagccattaaatcgttggcagttattggacccaatgctaatgctactagggtcatgattggaaactatgaaggcatcccatgtaagtatatatcacccttgcaaggcctaacagcctttgctccaacaagttatgctgctggctgtcttgatgtgcgctgccccaatccagtactagatgatgccaaaaagattgctgcctctgctgatgccacggtgattgtagtcggtgcaagtctagcaattgaggcagaaagtctagacagagtcaacattcttcttccaggacagcaacaacttctagtctctgaagttgcaaatgcatccaagggacctgtgattcttgtcataatgtctggaggaggcatggatgtgtcctttgctaaaaataacaataaaatcacaagcattttgtgggttggctaccccggagaagctggtggagctgccatagctgatgtgatctttgggtttcacaatccaagtggaaggctacctatgacatggtatccacaatcatatgtagacaaagtgccaatgaccaacatgaacatgaggccagatcctgccacaggttaccctggtagaacatacaggttttacaaaggggaaactgttttcgcatttggagatggattaagctactccagtatcgtgcataagttagttaaagcgcctcaattggtgtcagttcaactagctgaggatcatgtgtgccgttcctcagaatgcaagtcaattgatgttgttggtgaacattgtcaaaacttggtgtttgatattcaccttaggatcaagaacaaggggaaaatgagcagtgctcatacagtgtttttgttctctactcctcctgcagtgcacaatgcaccacagaaacacttgctgggttttgaggaagttcacctgataggaaaatcagaagcactggttagtttcaaagtagatgtttgtaaagatttgagtatagttgacgaacttggcaacagaaaagttgccttaggacagcatctgcttcatgtgggggacttgaagcatcctttgagtgtgatgatttgaaacaagccgtcaaatcttcagcattcagtcttttcttttttttcctagttcgtttccttgttaaaaaaaattaaaggggacaagaaataattctgaggtaattgtaacaaattttttgatttctttttcaaataagaaaatgaaatcaaaaacaagtttttaagtaaggccacaaaagtttttttt

SEQ ID NO: 6877 - DNA, 1816 bp, Glycine max
tatacggctgcgagaagacgacagaaggggaaaacaagtagggaataacgtgtaggaaactacattggttttacgacacgacttgaatcacaaactaattttatctgaaatatctctttcatagaacggagaaagacacgatgcaggaagcgacgaaggtgataataatcggtgccggaacttctggtatcgccaccgccggttgcttaacgaagcaatcaataccttacataatgctcgagagagaagactgtttcgcttcgctgtggcagaaatacacctacgatcgtctccaccttcatttgaggaagcaagtttgcgagttaccgcacttaccgtttcccaagtcttaccctcactacgtgcctcggaagcagttcatagactacttgggaaactacgttaaccactttgagatcaagcctctgtaccagcgtgcagtggagttggtggagtatgatggatggaaagggatttggagagtgaaggctcagaatagaagatctggtgagcttgaggaatacgctggaaagtacctggtcgtggccagtggcgaaaccgccgagcctcgtctgcctcagattcaaggcttggagagtttcaatggaaaagtgattcactcaactgcctacaaaaacgggaacgagtttaagaataaacatgttctggttgtcggatctggcaattccggcatggagattgcgctagacttgtccaattttggtgccaaaccttccatcattgttcgcagcccggttcattttctttcgagggatatgatgtattatgcgtcgcttatgctgaattacttgtcgctgagtacggtggagaaggtgttggtgatggttagcaaggttgtgtatggagatctgagtgagtatgggataccgtatccgagtgaggggcctttcaccatgaagatgaagtatgccaagttcccaatcatcgatgtaggaactgtcaagaaaattaaatctcgagagatacaggtgttgccagctgaaataaagagtataagaggtaatgaagttttgttccaggatggcaaatcgtacacattcgactcaattgttttctgtacaggcttcaagagatcaactcaaaagtggcttaaggggggtgatgatcttctaaatgaggatggctttccaaaaaacagtttcccaaatcattggaaaggtcgaaatggtttgtattgtgttgggctgtcaagaaggggtttctttggagctaacatggatgcccaattagtagcaaatgatattgcctcgttaattcctcaagaagaaagagaaggaatttgtgtcatgtaatgatctattatctattattggttgcagaaacagtatgtacatgacactttcttcttttggggatatgaattaggtatgttgttttaaattacttgttgtgattctcgtaatgtgatattattatggtaagaaattcatatataattttgtttcaataataaattttttactattgtagaaacttacactttgaggctgaagatttactcatatcgatactgcaaatactcattccatttgaaagaatttgaggctgaagatctacttgtaacatttaataagaatgaatgagaatatgagtactatagtattcatgatatcctattacgtacctcccgggcgcacacacaaattaacacacattgtttgagaagttttgaaaagtatcaacacacaaaaaaggctgtttcaatagtaacatatacctttatgaactcatattcttattttaggataacaattatttttataaaacaaggataataattataagcaaaggaaag

SEQ ID NO: 6878 - DNA, 830 bp, Glycine max
gagcgtcaggcagtgatcagaaagaaacttcagttagttggtgtaacagccatgctaatagcttgtaagtatgaggaggtctcagttcctaccgttgaggattttattctcataacagacaaggcatatacaagaaatgaagttttagatatggagaaattaatgatgaacatcttgcaattcaagttgtctgtgcctactccatacatgttcatgagaagatttcttaaggcagctcattctgataaaaagctggagctcttgtccttcttcttggtcgagctttgcttggtagaatgcaaaatgctgaagttttcaccatctttgctggctgctgcagccatttacacagctcaatgtagtctgtaccagtttaagcaatggactaagactaccgagtggtacactgattactcagaagagaaacttcttgaatgctcaaggctgatggttactttccatcagaaagctggatcggggaaactcacaggtgtatatagaaagtacaatacatggaagtatggctgtgccgcgaaaatagaaccagccctgtttctactggataattaagggaatgcaagtaaacttctagtttctaatgcattgctttggttgttttgagagtttgcttgtactagaagtttgttttgagagcttcacaagaccaacctatcgacagaagttggcttcagtagtgtttgtctttttctttcaagtaccgtgtctttttctttgcactcaatcttacctttcaggattgtatggaccaagtgaattagcacattaattgcttttactaatcactgaaagatgcttgtcatagttcttga

SEQ ID NO: 6879 - DNA, 986 bp, Glycine max
cccacgcgtccgtacggctgcgagaagacgacagaaggggatgacatatctccaacataaaggaccacctcaccctccccctccattactcccactgcatcttcttcaaattcctgtcctgaagatgacagcaaagtggtatctcattgtgtgtgttgtagcgatctgggccgttgatctgggttcatcatcacaccatgcccgtgccccagcaccagcaccgtcagtggagtgttcaaacctggtattgaccttatcggattgcctcaccttcgttagcaacggcagcaccgtcaccaagccacagggaacatgctgctcttccttgaaaactgtgctcaacacagcccctaagtgcctctgcgaggctttcaacagcagcgctcagttaggtttagccatcaatgtcaccaaggctgtcacgcttcccgctgcttgcaaactctctactccttctgccgctaattgtggactgtctgcaacgcctgctgctgctcctggcccctctcctacatctgctactgcaactattgggactccaggaggagctccatcatcaactcccgggaacgcagcatcagcattaatccccatatcagctggatcctctattgtttgccttttagtagctctatctctcatttcactttcagagtagggacatgacattagagactattttcatgtcttctgacttttccatcttctatgtgagacttaatgaagtagataaagtcattcagtgactcgaatttattttgtggttgtatatttataacttataatatatatgtatatgagtgagtgattttagcgttattattaaatgctggaatgatattgttgtgtgatttgatttcttgttgacacacaagggagaacatgtttgtggttgaaatgtaatctataacctttaataagggttattatcctgatgtatacattttcttagattattttatcctttaattaattttaaaaaaaaa

SEQ ID NO: 6880 - DNA, 1330 bp, Glycine max
acggctgcgagaagacgacagaatcagctacgtaggcccccccccccaaagaagaaagtgacagtggatgaacagaagaagaagaagaaaagggttttgtgtgtgtcgaagtggatagttccttccttcaattaatctccgatccgaaaccgaatggggattctgtacgcgctggttggtcgtggatcggtggtgctggcggagttcagcggcaccaccaccaacgccagcgcaatcgcgcgtcagatccttgaaaaaatccccggcaacaacgacacgcacgtttcttactctcaggatcgctacatcttccatgttaaacgcaccgatggactcaccgttctctgcatggccgacgacaccgccggaaggcgaattccttttgcgtttcttgaggatattcatcagaagttcgtgcggacttacggacgcgccgttcactccgctcagccttacgggatgaacgaggagttctctagggttttgagtcagcaaatggagtattactccagtgatcctaacgccgataggatcaatcgtctcaaaggtgaaatgtctcaggtacggaatgtcatgatagaaaatattgacaaagttttagatagaggtgatcggttggaattgctggtcgataaaactgctaatatgcaaggaaacacatttcgcttcaggaaacaagctcgtcgcttcagaagcactgtttggtggagaaatgtcaagcttacgattgcacttatagtcgtcctactagtgatagtttatgttgtattggcatttgtttgccatgggcctgcgctaccatcttgtttttaagtgaaggattggcaagtgaattttatgtgtgctttcttgtcttcttcagcttgcagaggtcacttcttttttatctgccattgttatgcagactcccatttcttcaacttaatttctgggttgtccacttttgtgctagtaaatttcttgtaatagattcaagtgttttgggttgtatttttcattatgagacttgaggggcaaaaaaaaaactattgtatcatgttatttattgtattctcctaccagcccaaagatttggattgaaccagaaaatggctgagattttgattgatgtatagtgttgcagcgtgaggttgtcaacgtgccatggatgttctcttgttcaagagggagaagggtaaaccttaaattccatttgtcccttcatagcttagtgaagggagattttatactgctcggccaggttctcttgtccagttgatgcatgtgaaccgcataagcttaatgtatatattcttaaatttgaaaaaaaaaaaaaaaaaaggggccgccg

SEQ ID NO: 6881 - DNA, 1397 bp, Glycine max
agaaaaacccaaaaaacggtccaaattctgtatctcgtaggcactcactcactctcttcccaaacacagcgtgttgttttcccggttcccgcccatagttccattttcgctctctcggtcgctctcactccatcacccatgggaaattcatccaaggacaacgactccgccacctccgccgacgcctccgccggcgacgttcagccctccaattccgccgtctactccgagggcgagaaagtcctcgcctaccacggccctcgcatctacgaagcaaaggtgcaaaaagccgagatcagaaagagtgaatggaaatattttgttcactaccttggctggagtaaaaattgggacgaatgggtaggtgagaaacgtttgatgaaacatactgaagagaatgtaatgaaacaacaggccctagacaaaaagcaaaatgtagacaagaatgttaagtctgggcgttcatctcaaggaaaggccaaaagttctaccgatgccaaaatggataaagaggatgtcaagaataatgtgtcaaaagggaagaaacgaaagcatgatgcgggagttgagaagggcagcgggactgttgaaaagcttgtcaagatttaaattcctgcaacattaaagaaacaacttgttgatgattgggactctgttactcagcaagataagcttgtaaaacttccccgttcaccaactgttgatgaaattctgacaaagtaccttgaatacaaatcaaagaaggatggcattgctcctgattcaataggagaaattttgaaaggaataaggtgttattttgataaagcattgcctatgatgctcttgtacaaaaaagaacgcaagcaatataatgatgcaattgtggataatgtgtctccatcaaccatatatggtgctgaacatttattacgcctctttgttaagttacctgagcttttggcatatgttactattgaggaagaaacattgaatcgcttgcagcagaaattacttgactttctcaagtttttgcagaaaaatcaaagtaccttctttctttcagcatatgatggcaccaaagtctctgaaggaaaaggtaaggggaaggatgaatgagaagacacagagtccctgatcttcatcctgttgtatttttaattgttgttataaacagtatcatctttctcttgaaaaactagggaagaaactcaattgttgttgtgagaatattgactaattcattctttaatttttaaagcttacacagtactattatacacaatggaaacgtttggtggctaaaaaaaaaaaaaaaatatgacctcttcaggtctgggatgtgctaaaaaaggcgtgtttgtggcctgaaagaaaagttggttgagctggcatgacccattttaaccatgttgcac

SEQ ID NO: 6882 - DNA, 622 bp, Glycine max
ggctcgagggattatgcggctgataagttgagggaattgttctccaagtttggtgcagtggaagatgttgtcatcaaagggagtaagaagaagggttctgctcttgttgttatggccactaaagaaggagctgtttctgctactgggagtgtgattggccatcttgccaatccgttgctggttgtacctcttaaaccagcatctgtggctgattcttcgagcgttccaaaatctgctgaaaccaccaggatgagtaatctggttggtgctgggtatcaagcttttgaggattctgttctgaagaaactgcaaaaggctgcggaaaagcaaagatgatgctgtcagaatgataatcataagattcaattgtttggcatggtcatccccagttctatttattaggtactgaaattaccattgtcattaatgattcatcattagtgatctgtcaaccggagtctttgtatccagatatactaattgaggagtagtatactagagaatgtatgtttactgtggattttttaagtcatcttttagttgttcttggccaccttgctcaatgaaataatattttatggtccaaactttatgattctcttgcagaactgtaaatggttca

SEQ ID NO: 6883 - DNA, 952 bp, Glycine max
  misc_feature (812)..(812): n is a, c, g, or t
tcgagtcagctacgtaggcccccccccccgatctgttgggaatttagggatttgcgtttactgatctcaagtcttccacctcactgtcgtagcgtagtgattgtggggtttctcttctcagttctcatcgtgacgatcttgctgctccgaaaaagggttttcctaacatcgcccattcaatttccgggctgttcagttcgtgaatagactgttgtttgttctaaaaagtagtggatagtaaaaattatcgaacttttttaagagaaaaatgcagagtaaagaagcagttgtggaagatggggaaataaagagtgtgactgctgtagggtctgaaattgatgggtggaccaattttggggatgatgacataatgcaacagcagtatacaattcaggctgaggaagccaagaaggttccatttgtgggtgacaaggaaccactgagtagcttagctgctgaatataaattaggcagtcctatcttgctggagaaaataaaggtgcttgatgagcaatatgctgccattcgtcgtactcggggagatggaaactgcttctttcgaagctttatgttttcatatcttgagcatattatggaatgtcaagaccaagcagaaattgatcgtatccaagccaatgttgaaaaaagtagaaaggcgctgcagaccttgggttatgcagacttgacttttgaagatttttttgcgttattccttgagcagctggaatctgttattcaagggaaagagacttccataagtcatgaatagcttgttcttagaatccgagatcagtcaatatctgaatatgtcnctatgttcttcagattattacctctgctgaaatacaaaagcctgcagaattttttgaaccattcatacctggcttaactaatacaacagtccaacatttttcaattatctgtaaacccaatggtgaaaaaaccaccacat

SEQ ID NO: 6884 - DNA, 1727 bp, Glycine max
  misc_feature (1379)..(1379): n is a, c, g, or t
  misc_feature (1381)..(1383): n is a, c, g, or t
  misc_feature (1385)..(1387): n is a, c, g, or t
  misc_feature (1390)..(1390): n is a, c, g, or t
  misc_feature (1395)..(1395): n is a, c, g, or t
  misc_feature (1400)..(1400): n is a, c, g, or t
  misc_feature (1404)..(1404): n is a, c, g, or t
  misc_feature (1412)..(1412): n is a, c, g, or t
  misc_feature (1418)..(1418): n is a, c, g, or t
  misc_feature (1420)..(1421): n is a, c, g, or t
  misc_feature (1423)..(1423): n is a, c, g, or t
  misc_feature (1427)..(1428): n is a, c, g, or t
  misc_feature (1434)..(1434): n is a, c, g, or t
  misc_feature (1437)..(1437): n is a, c, g, or t
  misc_feature (1441)..(1442): n is a, c, g, or t
  misc_feature (1449)..(1449): n is a, c, g, or t
  misc_feature (1454)..(1455): n is a, c, g, or t
  misc_feature (1459)..(1459): n is a, c, g, or t
  misc_feature (1462)..(1463): n is a, c, g, or t
  misc_feature (1465)..(1465): n is a, c, g, or t
  misc_feature (1468)..(1469): n is a, c, g, or t
  misc_feature (1472)..(1472): n is a, c, g, or t
  misc_feature (1475)..(1475): n is a, c, g, or t
  misc_feature (1481)..(1482): n is a, c, g, or t
  misc_feature (1484)..(1484): n is a, c, g, or t
  misc_feature (1488)..(1488): n is a, c, g, or t
  misc_feature (1491)..(1492): n is a, c, g, or t
  misc_feature (1494)..(1494): n is a, c, g, or t
  misc_feature (1496)..(1496): n is a, c, g, or t
  misc_feature (1498)..(1498): n is a, c, g, or t
  misc_feature (1505)..(1506): n is a, c, g, or t
  misc_feature (1510)..(1510): n is a, c, g, or t
  misc_feature (1514)..(1514): n is a, c, g, or t
  misc_feature (1516)..(1517): n is a, c, g, or t
  misc_feature (1520)..(1520): n is a, c, g, or t
  misc_feature (1528)..(1531): n is a, c, g, or t
  misc_feature (1535)..(1535): n is a, c, g, or t
  misc_feature (1538)..(1539): n is a, c, g, or t
  misc_feature (1550)..(1550): n is a, c, g, or t
  misc_feature (1553)..(1554): n is a, c, g, or t
  misc_feature (1557)..(1557): n is a, c, g, or t
  misc_feature (1559)..(1559): n is a, c, g, or t
  misc_feature (1561)..(1561): n is a, c, g, or t
  misc_feature (1563)..(1564): n is a, c, g, or t
  misc_feature (1570)..(1570): n is a, c, g, or t
  misc_feature (1572)..(1572): n is a, c, g, or t
  misc_feature (1576)..(1576): n is a, c, g, or t
  misc_feature (1579)..(1579): n is a, c, g, or t
  misc_feature (1581)..(1581): n is a, c, g, or t
  misc_feature (1585)..(1586): n is a, c, g, or t
  misc_feature (1598)..(1598): n is a, c, g, or t
  misc_feature (1601)..(1601): n is a, c, g, or t
  misc_feature (1606)..(1607): n is a, c, g, or t
  misc_feature (1610)..(1613): n is a, c, g, or t
  misc_feature (1621)..(1621): n is a, c, g, or t
  misc_feature (1624)..(1628): n is a, c, g, or t
  misc_feature (1631)..(1631): n is a, c, g, or t
  misc_feature (1639)..(1639): n is a, c, g, or t
  misc_feature (1641)..(1641): n is a, c, g, or t
  misc_feature (1645)..(1645): n is a, c, g, or t
  misc_feature (1649)..(1649): n is a, c, g, or t
  misc_feature (1659)..(1660): n is a, c, g, or t
  misc_feature (1663)..(1663): n is a, c, g, or t
  misc_feature (1665)..(1666): n is a, c, g, or t
  misc_feature (1668)..(1668): n is a, c, g, or t
  misc_feature (1672)..(1673): n is a, c, g, or t
  misc_feature (1675)..(1675): n is a, c, g, or t
  misc_feature (1679)..(1679): n is a, c, g, or t
  misc_feature (1681)..(1681): n is a, c, g, or t
  misc_feature (1683)..(1683): n is a, c, g, or t
  misc_feature (1686)..(1687): n is a, c, g, or t
  misc_feature (1689)..(1689): n is a, c, g, or t
  misc_feature (1692)..(1694): n is a, c, g, or t
  misc_feature (1697)..(1698): n is a, c, g, or t
  misc_feature (1701)..(1701): n is a, c, g, or t
  misc_feature (1705)..(1706): n is a, c, g, or t
  misc_feature (1709)..(1709): n is a, c, g, or t
  misc_feature (1711)..(1712): n is a, c, g, or t
  misc_feature (1721)..(1721): n is a, c, g, or t
  misc_feature (1726)..(1726): n is a, c, g, or t
ctgttgggaatttagggatttgcttttactgatctcagtcttccacctcactgtcctagattgtggggtttctcttttcagttctcatcgtaactaccatagttgctgctccgaaaagggttttcctaacaccgcccatgcaatcaatttccgggttgtacaattcgtgaataggttgttgcttgttctgaaaagtagtggatagtaaaaaatattgaactttttttgagagaaaaatgcagagtaaagaagctgttgtggaagatggggaaataaagagtgtgactgctgtagggtctgaaattgatgggtggaccaattttggggacgatgacataatgcagcagcagtatacaattcagtctgaagaggctaagaaagttccatttgtgggcgacaaggaaccactgagtagcttagctgctgaatataaatcaggcagtcctatcttgctggagaaaataaaggtgcttgatgagcaatacgctgccattcgtcgtactcgaggagatggaaactgcttctttcgaagctttatgttttcatatcttgagcatattatggaatgtcaagaccaagcagaaattgatcgtatccaagccaatgttgaaaaaagtagaaaggcgctgcagaccttgggttatgcagacttgacttttgaagatttttttgcgttattccttgagcagctggaatctgttattcaagggaaagagacttccataagtcatgaagagcttgttcttagaagccgagatcagtcaatatctgattatgtcgttatgttcttcagatttgttacctctgctgaaatacaaaagcgtgcagaattttttgaaccattcatactgggcttaactaatacaacagtcgagcagttttgcaaatcatctgttgaaccaatgggtgaagagagcgaccacatgcacattactgccctttcggacgcattgggcattccaatccgtgttgtgtaccttgaccgcagctcatgtgatactggcggtgtcagtgtaaatcatcatgatttcatgccagtggctggtgatctcccaaatgctagttgcagctctgaaaagaacattcctttcatcacgctgctatatcgtcctggtcactatgatatcctctatacaaaatgatgacctttttggggggaaaagacctttgtttgttacttttttggtggtagtgggagccgcaacagctctgcactcagagctgttgctgtaggacatatgtggtctgtatcttgttaatgttgaatggtcaattttcttgaacgttacctgtttagaagagattgatcaacaaagtacgtcaacattaacgcactaataatttaaaactcagtttgattttgctgctttccgtggtcncnnntnnnggnttcgntcggnccgncttgcggnttcttncnntntggnntggtgnagnctcnngtccgcncgtcnnctcncanngntgnngtntgngttctnncncccnggnncntntntttccgnngccncccntnnggnccgggtcnnnncttnatnnggggtggttgncgnnagntncnannactgcncntccnccncnctanntttgcgacccantantggtnncgnnnnggagttcnccnnnnnggntggcgccntnaccncaantctctgccgnngcngnngncccnngncttngngnggnntnctnnngtnnccngtcnnggntnncggtcgtcnccctnc

SEQ ID NO: 6885 - DNA, 1686 bp, Glycine max
gccagcgcagggtgtagcatataccattccttgagctccttcaaatggcagagacaccaaagaagaagaagaaggggcacgtggttatggtacccttcatggcccaaggccacatcatcccattcctggcactagcaaggcaaatccaacaaagcacaagcttcaccatcaccatagccaacacacccttcaacattcaatacctccgatctgcactttcttcttcaacttctcccaatcatcaaatccgtcttgctgagttacccttcaactccactctacacgatttgccacccaacatagacaacacagagaagcttcctctcactcaactaatgaaactctgtcatgcatcactcacccttgagcctccccttcgctccttgatatcacagatcacagaagaagagggtcaccctccactttgcacaatatctgacgtgtttcttggctgggttaacaacgttgcaaagagtttatgtattaggaacctaagcttcaccacttgcggtgcttatggaaccttggccgtccggtctccccggcgccccccccctcccaggaaatactgactctgatgagttttgcgttccggggggtccctcaaaactacaaattccaccgtactcaattgcataagtttcttctagcagctgatggcactgatgactggtcaagattcattgttccacagattgcactttctatgaagtctgatgggtggatctgcaacacggttcaggagattgagcctttggggttgcaacttctcaggaactatcttcaacttcccgtttggcctgtggggcctctccttccacctgcttcactcatggattcaaaacatcgtgcaggaaaagaatctggcatagcccttgatgcatgcatgcagtggctggattcgaaggatgagagttctgttctctacatttcatttgggtcacagaacactataactgcatctcaaatgatggctttggctgaaggattggaagagagtggtagatcgtttatttggatcataaggccaccttttggttttgacatcaatggagagttcattgcagaatggttgccaaaagggtttgaagagagaatgagagacaccaaacgtggccttttggtgcacaaatggggaccccagttggagattctgtcacacagttccacaggagcgtttctaagccattgtggatggaactctgtgttggagagcctcagctatggggttcctatgattgggtggccactagctgcagaacaaacattcaatctaaagatgttggtggagaaaatgggtgtggctgttgagctcactcaaactgtgaaaactgtgatctctgggaagcaggttaagaaggttatagagatagttatggagcaagaaggaaagggaaaggcgatgaaggagaaggcgactgagattgcagctcacatgagagaggccataacagaggaaggtaaagaaaaagggtcttctgtgagagcaatggatgatcttgttagaaccattttatcaccctaggctttgtgatttgttgcatttagaatttgaatgataataaagttgcttgtaaagcatacttgttatgtactgctcagcaatctttagcaatagactatggtaatattgtcactatgaagataataatttaactcattttaattaaaaaagaaaaaaaaaaa

SEQ ID NO: 6886 - DNA, 2576 bp, Glycine max
  misc_feature (2558)..(2559): n is a, c, g, or t
  misc_feature (2571)..(2573): n is a, c, g, or t
atcctcttcagcgaattaagatggctgaatctctgaaagattacgaggaggattttgaaaatcctgaaaagaagcccagaaggaacaagtacgctttcgcatgtgctattttggcttcaatgacttccatcctactaggttacgatattggagtgatgagtggagcagcactgtacatacaaagagatctcaaggtatcggacgtgcaaatcgaaatcctgaacggtatcataaacctctactctcccgtcggttctttcatcgccggcagaacctccgactggataggtcgccgttacaccatcgtcctcgccggcgccatcttcttcgtcggagccatcctcatgggattctcccccaactatgcctttctcatgtttggccgcttcttcgccggcgtcggcatcggcttcgccttcctcatcgcccccgtctacacctccgaaatctcccccagctcctctcgcggcttcctcacttctgatattcaggtatttctgaacggagggattttaataggatacatttcaaactacggattttcgaagctggcactgcggttgggttggcggctgatgctgggagtgggagccattccttcaattttgattggcgtggcagtgttagccatgccggagtcgccaaggtggctggtggcaaaaggtcgattaggcgaagccaaaagagttctctacaaaatctccgagtcggaggaagaggctcggctcagactagccgatatcaaagacacggctgggatccctcaagactgcgacgacgacgtcgttttggtgtcgaagcaaacccacggccacggcgtctggagagagcttttccttcaccccactcccgcggttcgccacatcttcatcgcgtcgcttgggattcacttcttcgcgcaagccacgggcatagacgccgtcgttttgtacagcccaagaatcttcgagaaggccgggatcaaatccgataactaccgtctcctcgccacggttgcggttgggttcgtcaagaccgtttccattttggtcgccacttttttcttggaccgggccgggcggcgcgtgttgctgctttgcagcgttagtgggctcatactctcgcttttgactctgggcctgagtctcactgtggtggaccattcgcagaccacgctgaattgggccgttgggctcagcatcgctgcggtgctgtcctacgtggcaactttctctatcgggtctgggcccatcacgtgggtttatagctccgagatattcccgttgaggctgcgggctcagggcgtggcaattggggcagcggttaatagggtcaccagtggggtcattgcgatgacttttttgtccctccagaaagctattaccattgggggtgctttctttcttttcgctggtgtcgctgctgttgcgtggatttttcactacacgctgctccctgaaacacgtgggaagactctcgaggaaattgaaaagtctttcggtaatttctgcaggaaacccaaagcggaagaaggacttgacgataacgttgaaatccaattaaagacccgtgaccaaactttgacaagcgtcgattagaataagggtgattatattgaataaaggtatccattttttttctcctaggtaaagttgtcagataatcgtagtttccactctaaactgtatttacctctctgaatgacgttgtgggatttgggattatacggtagtaataatatttacaacttttactcgcgttgcaatagtattttcacagttttgaaatcgaaaaccacaaccaggggaagagcttgtgtgaaaaggatgattatagtactataatagattttgggaatgaaaaggaaaataaacgtggcgttttcagttttgtggaagatatagacgatctcgtgccagtgttaatatgctatagaacacacggtatcatgtatgtattagttaattaactagattacaattcaaccacatcttcaaatgtatatcgctttcaaaaatctcaatacggtgaatgcctctagtgtccggaattcaaaagaataaagaatgtggcagttgctatgttaaaactgcttcaagaaagaattgcttgaagggcatccttcacgtaaggatatttgaatgggaaacccaacttcttagcttgaataggaagcactctctgcccttctaaaacctacaaagagacgttaacaaggatttcatgctaaaagttagtaagttatgtggactgagaacaaagtcaccatagattattacttaccacagtagcaccttctccaaggacagccttgagcgcaaagtccggtactggcagccatgagggacgacccaagacatttcccagctggtcacacaattctgccaatcgcacaggatttggtgcagttccattgataacacctattacaaatattcataattcataaacatgattcatgataatgcaataggttcatcacgattaaagtaaccaaaggaaatatatccattatattgccttgacgatgtgtggagtaggtggtagatatctcaaaaggaattagtgtaattgcagcnngaggaattaatnnntag

SEQ ID NO: 6887 - DNA, 1852 bp, Glycine max
ctcgcgttaggaaagttaggaacccaattacctgaacaacaaaaacaaaggattcattttatctggccattttcatttcccttggaaactcaaaatatttcaaatttcactctttctttctgcacaatattttcccatctatttttttcttcttctcaaaactcacatattagtattttctcccacaaaatttcagctcataatttttatttttcgatttcatccaatcctgctaatttatttttaatgacgaaatttacgcaaatggtgcaaaggtgaagattttccacatcttgtttcatgcccagctcctcaagctagcttttaattttgatttttctcatttcctggcttaaatttttcatcttttctaaaagaaaaaaaatcatttcccagcagcatagcatagtagtagaagttttgggtgattgagtttgaagaagaagaaaaaatatgagatattgatgtgtggttttactttatgttacgtgtgagtggtactacttctcaagtgtttgaacatggagaccagtggcggtgttagcggcggcgttacgctggtgggatcggatgctccgtcggactaccatgtagctccgaggaccgacaacccggctccggcaagcggatccacgacgcagattccggcgacggcgggaagtgttccgccgtcgccacatccgccacacacggcggcgatggaggcgtatccggcgaagatgccggcgaaaaagaagaggggccggccgagaaagtacgcaccggatgggtcggtgaccatggcgctgtctccgaagccgatatcttcctccgctccgttgccgccggtgatcgatttctcgtcggagaagcgcggaaaaataaaaccaactagctccgtgagcaaagccaaattcgagttggagaatttaggtgaatgggttgcatgctcagttggtgctaattttactccccatatcatcactgttaattctggggaggatgttactatgaaggtaatatcattttctcagcaagggccgcgagctatatgcattctttcagctaatggggtcatatcaagtgtcacacttcgtcagcccgattcttctgggggcacactgacatatgagggacggtttgaaattctgtctttatccggctcattcatgccaagtgaaagcggaggaacacgaagcagatccggtggcatgagtgtatctttggcaagccctgatggacgtgttgtaggtggtggagtagctggtctgttggtggctgcaagtcctgtgcaggtagtggtaggaagttttctggcaggaaaccagcatgagcagaagccaagaaaacagagacatgaggttataacaagtgtgataccagctgcagttgttccaatctctacccttgatccagtgccaattctatcagcagcgtcttccatccgaaacgataattggtctgctatgccagcagaggccaagaataagccagctgacattaacgtgtcgcttcctgcagggtaattaacttatagatcttcattccatctgaatttacatttgctgctgacaacattgtaatgtgatggattcctagttgttggctttgctttccgttgtttgttgtgtctgtaattgttgactttctaccgggaccagcattgttttcagaggtttaccagcttcctgttcttgtagaatttgagttggctgattaggtatgcttttaatgctgatgttgtgacatgaacaacactttgatgtgatagttattcatgagaatccatcttccctttggagtgatagattgcgcaatccacgttatttctattaagacaatattcctaatttgagaatgatcatttataatc

SEQ ID NO: 6888 - DNA, 1794 bp, Glycine max
gttgaagaaagcataaaacaaatatatgagttggtttctattgaaacgaggttaatttctttgtttgtgatgaaaatgttgagagcagattcaagatgccagagaaatcaataccaaaggatgcagcttttcagataataaacgatgagttgatgttggatggtgcaccaaggctcaacttggcttcgtttgtgaccacttggatggagcctgagtgtgacaagctcataatggcttcacttaacaaaaactatgttgatatggatgagtatcctgtcaccactgagctccagaaccgttgtgttaatataatagcaaatctattccatgctcctataagtgatgatgagactgcagtaggtgtgggaactgtggggtcatcggaggcaataatgttggcaggtctagcttttaaaaggaaatggcagacaaagagaaaagcagaaggcaaaccatatgataagcccaacatagtaactggggctaatgtgcaggtttgttgggaaaaatttgcaaggtactttgaggtagagctcaaggaagtgaaactcaaagaaggatactatgtgatggaccctgcgaaagcagttgaaatggtagatgagaacaccatctgtgttgcagccattttggggtcaactatgaccggagagtttgaggatgtgaagcttctcgatgaacttcttactaaaaagaacaatgagacaggttgggataccccaattcatgtagatgctgccagtggggggtttattgccccatttctatatcctgatttagagtgggacttccgtttgccgttggtgaaaagcatcaatgttagtggtcacaagtatggtcttgtctaccctggtgttggttgggttgtatggaggagcaaagatgacttgccagatgaacttgtttttcacataaattatcttggatctgatcagcccactttcacattgaatttctccaaaggatctagtcaaattattgctcaatattatcaattgattcggcttggctttgagggttacaaaaatatcatggaaaattgctgggagaatgcaagagttctgaaggaaggaatcgagagaacaggtcggtttaacatcatctccaaggatatcggtgtgccacttgtagccttctccttgaaagacagtagtcaacacacagtgtttgagatagcagaccatctgagaaaattcgggtggatagttcctgcctatacaatgccaccagatgctcaacacattgctgtccttcgggtggtgatcagggaggatttcagccgcggcttggccgagagactcgccgctgacatagagaaagttgtgaagctcttggacacacttcctagccccctcactaccaaagctgttcatatcacagctatcactagtgagactggtgagaagattaagaaagctgcaatagagactcagaaagagattgctttctactggaagcgacttgtggatggcaagagacttggagcatgctaggcttaccaaatcttggccttttggccaccttgctatgagttatggtgctttgtttcttatctttgaggatatgtgagtgtgtaatggctttgtagcaataagcaatgccaatgcatgatggattctaatactcattgctgctcttgcctaagggataattctctctctctcttttgagttggcaatttggtactcatcaaaaggcactattatcatataatgctcaagttaatttttattagagatgaaatttttattagagatgaaggaatagagaaaagggaaaaagacaagaaagaat

SEQ ID NO: 6889 - DNA, 954 bp, Glycine max
gggaccacacagttaaaaaaatgatacactaagcgagaaagttttcttaccgagattgcagggaatttatccttttggattctacccaaagaagataaaattctcatcttcgagtctgcgtcgtggccccccccccccccagttcagcgtttcacacctagacaattggctcagaagaaaagaaaagcaaccaaaaatggttctcacatccactgccacacacccagatgaacaagaccagagcctaaactatacttttgcttccagatatgtgcgtgaacctattccaaagttcaagatgccggagaaatccataccaaaagatgctgcttatcagataataaacgatgagttgatgttggatggtgcaccaaggctcaacttggcctcgtttgtgaccacttggatggagcctgagtgtgacaagctcataatggcttcacttaacaagaactacgttgacatggatgagtatcctgtcaccactgagctccagaaccggtgtgttaatatcatagcaaatctattccatgctcctataagtgatgatgagactgcagtaggtgtgggaactgtggggtcatcggaggcaataatgttggcaggtctagcttttaaaaggaaatggcagacaaagagaaaagcagaaggcaaaccatatgataagcccaacatagtaactggggctaatgtgcaggtttgttgggaaaaatttgcaaggtactttgaggtagagctcaaggaagtgaaactcaaagaaggatactatgtgatggaccctgcgaaagcagttgaaatggtagatgagaacaccatctgtgttgcagccattttggggtcaactatgaccggagagtttgaggatgtgaagcttctcgatgaacttcttactaaaaagaacatgagacaggttgggataccccaattcatgtagatgctgccagggggggggtt

SEQ ID NO: 6890 - DNA, 1248 bp, Glycine max
acttcagatctgagatgttagattcacatccatttgtagcccgtgaatgaataacagttacgtacattttactttcaccctttttaatttttacatggtgaatatatatgagttttataatgaaatgatgactttgaatttgggtcaatcaagaccagacagatatacttgaatgaatgaatgaatcattcgttattaaggcttttgttcagttccaaattcctcgtacgaaagcaattgtgttgttggacttggaggcatggagaaggagcagcttgaatatgtgttggtgccattgggtctgttggtgtacctgacataccatatatggcttgtctataccattgtacgcaaccctcttcgaactgtcattggccttaatgctgagtctcgtcatcagtgggttcttttcatgatgagtgatccgttgaagaatggggttttggcagttcaaactattcgcaacaatatcatggcatgtactcttctatctacaacggccatcacactcagttcacttattggtattttcgctagcggcacgtggagttctgatgacacggctttcataccttctggccgtacttcaatcaaacatatttctgtcaccatttgcttccttgttgcatttttgtgcaatgtacagtctattagatactattgccatgtcagtttcctaatcactgctccaacactcagagacaaaagggagtatatggaatatattgccgtgactttgaatcgtgggagtcatgcttggtctattggacttcgagcattttacttgtcatttccattcttcctctggatttatgggcccatacctatgtttgcatgttgctgcttgacatcacttgttttgttcttcttggatacgacggctaaaatcacgcggaatcttcatagtaactcattcaggaaggagaggggaactcatgatgtagagtctgctgtggaacctgattatcatcctttacctgctaacaatttgtctcaaaactcaggtgtcaatcatgtataattaattataaatgtaacaaatttgtatgttcctattgagaagtatgaacatgtgccaggggtgtgagtgagaaggattcaccagagagtactaggtggtatgttttgtttcttgttaatagtagtagaattcatttttgttttctttgcgtcagttaattttcacttccttgggatgaacttacccatgtacttacttacaattgtcccaataatttttgctgtatc

SEQ ID NO: 6891 - DNA, 904 bp, Glycine max
tcagcgtcgctggcgcccttccaaacacttgaacatcatctacatttcatcacaatcttcctcaatcatgtcttcagaaacaaaagcagaaacacaaactttgaccaccccctcttactcctcagatgttgacaatggtatagtgaaggatgtagtcctatggagaagaaagaaaataaatataagcgttcttgttgcggcaacagcggcatgggtgttgatggaagtgtttgaattcaacttcctcactctcatatcatgggtggccatactcggtcttgcttcaatattcctctatgccaatatgcttagacttttgggcaaggaaccaccgaacttgttggggttggaagtgagtgaaaaaacaacaacgagaatagcacacacagttcgagcatggattgaagaaggaataaggtggttgttccttgtgggcgcagagaaagagtggcccgtgtttgtgggggctgtggctggattgttatcactatcttatttaggaagttgcatggacctcctaacactagtttatatgggtacgttagtgggaatggcagttccattaacttatgtgaagaacgaggacaagattaagaggtttgtggagtggttgagggagaaacacaagagatattatcagattattgacgagaagaccattcagaagattaaaagcagaatcgtaaaggagaagaaaacagagtaattagctttttaagagaaatgtgcacggttatgctgtattatttaatgaatattaagagtctattatttgtttcgttatatttcggtaatgttatgaatagattagtataacgtaagaattgtaacttcgccctgaaaagttaaactcttaagttaatattattattacgagtgttcatcagcaaaaaaaaaaaaaaaa

SEQ ID NO: 6892 - DNA, 837 bp, Glycine max
  misc_feature (837)..(837): n is a, c, g, or t
caaataggtaaaaagtgtggaaatgcaaatatgagagagagtgagagggagtaggaaaaggggaacaaaagcaccttcagataggacccataacatgtcctctcaaaagaccccaagatgtgattttcatctttctccactgcactaacgcattcttttctttcacctcttcttgtgtcttatttctacctattccaatttccagccaccatgtctggcgaaatgcataccgattccgcgtcatcgtcacgagccgccgccgcctctgatcagcgtcatcagcagccggcggcggcccctctgagccggtacgaatcgcagaaacggcgagactggaacacctttggccagtacttgaagaaccagacacccccagtttcgctttcacagtgcaacttcaaccacgtgcttgagttccttcgctaccttgaccaatttgggaagaccaaggtccacttgcacggttgtatctttttcgggcagcctgacccgcccgcgccctgcacctgtcctctcagacaggcttgggggagtctcgatgcgctcatcggacggctcagggctgcctacgaagagcgcggaggctcccccgagactaatccctttggaagcggagctattcgcgtgtaccttcgcgaagtcaaggagtgtcaagcaaaggccagagggatcccatacatcaagaaaaaggaggaagaagaaccccccctttaggggcccctcatggatggctcccaaagtccctttaagcgaattgggcccaacttgaaaatccaatgggatggaatgggatggacattaaaaaaaaccgatctacctgggaatgggggaattaan

SEQ ID NO: 6893 - DNA, 916 bp, Glycine max
atggttcatccctctattacggctgcgggaagacgacagaaggggatgagtcatgagatacacttttcagttcatgaaacacaacagtaatcctcaaattctctctctattcaaagagaaaaaatcatcgtccacttgcaaccaacacaatttggtatcaaaatgggcctgtcaagtctcccagcaccatctgaaggagtgttatgtgtgcttcttgtaaacactgccttgtctatatccatattcaaaggcattgttaggacaattctacaaattgtcggtatccgcgtttcgtcgttgtctccttcaccagacatctcccgaaacccacctgagccattagaattcaacctcagcccctcggagggtttcattgaagagttcagaagcaggacaccaacacttaggtttggcagcatgtgtggcagtaaacaacctcaacatgaatgttgttgtgtgtgtctcacaaagtttgaaccagaatctgagataaactgtttatcatgtggccatatttttcacaaagtgtgcatggagaagtggttggactattggaacattacatgcccactttgcaggacttccttgatgcctgaagatgatgcatcttgcttttggtaaaaaaacatgtacatataaaagaaaagagatatattcatgtacagtatatattgtatgtacatagttgtggcagtgttgatgttcccttggtcttggctctaacttttttaaccctttacttttttatgattgttaaagtgtgtggagggtcttgttttcctttgtttctctgtatctggtgttgccacatatgagtcgagggatctacttttttgggataattgtgtttgtccataatatcctcttgatatgtaaacagacatcatatacagacccttttgcttttgccaaaaaa

SEQ ID NO: 6894 - DNA, 699 bp, Glycine max
  misc_feature (20)..(20): n is a, c, g, or t
  misc_feature (699)..(699): n is a, c, g, or t
tcgagtcagctacgtaggcnccccccctcagtagataacacattattattattaggggactatcaaacattttggcccccttccgtgcccaactttctctcagacccgaaaatgaaagacatcttctaatggcagaagaagcacacaacagcaactccatgaatgccctgccaaaggttctcgttctgggtcccccaacgtgcttcataaccctccaacctctctactctcacaagttccatttcctcaacccccacacctcaagcctttcactgcaacacttcctccaccaccaccaccaccacccttcctccgtctccgccgttctctgcggtgcatcctactccgtcaccgccaacgtcctctgcctcctgcccgcgctccgcctcatcgtcaccaccagcgccggaaccgaccacatcgacctcgccgagtgccgccgccgcggaatccaggtcgccggcgccggagagctgttctccgaggacgtcgccgatatggccgtcgccctgctcgctgacgttatgaggaaaatttcggcggcggatcggtatttgaggactcagcagaatcacgacactacgccttgggattttttcacattcggctccaagttagcaggtaagcgagttgagattattggactgggaagcattggcatggaagtggccaagaggttggagtcttttggttgcattn

SEQ ID NO: 6895 - DNA, 1358 bp, Glycine max
  misc_feature (13)..(13): n is a, c, g, or t
gagtcagctacgntaggccccccccctcagctacgtaggcccccccccccccggaaaactttttttcttctctcaactctctctctctgcgtccatggagttttggggtgttgaggtgaaaaatggagaatctctcaaggttgatccaggagatgacaagattatccacctttcaaatgcatgcatgggggatgtcactaaggatataggaggtggaccagtagccctgtatgtgaagtttggtaaccagaagtttgtacttggaacactttcttctgataaatttcctcagatatcttatgatttggtatttgagaaggaatttgagctatcccataactggaaatatggaagtgtcttctttactggatttaaagctcaacctcagtcggagtctgatgatgatgaagattctgatgatattgatgaagatattccagttagtgcagtcaatggtaaacccgaggttggcgtcaaacctgatgcaaatgaagctaaacagaagaagatagcagatccaagaaagagggatgcaaatggtgaagatgacgattcatccgaatctgattctgatgatgattcaagtgaagataagcccacagcgaatggcgacatagaaagtagtgaaggtgatgatgatagcgatgatgatgaggaggaggagggggatgatgaatctgatgaggagacagccaagaagattgaagcaagcaataagaggggtattgagtcttctaagaaaacacctgttcctgtgaagaagacaaagtttgttactcctcaaaagactgatagcaagaatgttgtccatgctgcaactcctcacccttctaagcaggctggtaaagcaactgcaaataacaagctgcagtctccgaagtcaggtggagattacagctgcaagccttgcaacaggttatttaagacagaagatgccttaagttctcataacaaggccaagcacagtgctaagtgaagtcttgcttttttgcctgagcagtgacagtgaatgttggtgtttctggtgttggatgatagtaaaaaaacagtgtagttgatgtaggaaagctggtctagtgattttggtattcaacttgggtttgtgctaactggtctttgaccttgaccttgatcccatgtcggccttctttcaaccgaatctgtgatgaaatgcgtaaatactccgtacaactcatgaaatggtattcctgacaaaagtaagttggtatttaacgttgctaagccatcaaccaatgtttctaattattatttggatggagggtatttttatttttttatcactttcgttcgtatatttccaatcatcaagcaaattttttaaaaaaaaaaaaaaaaaa

SEQ ID NO: 6896 - DNA, 1371 bp, Glycine max
acgcgagccagctacgtaggccccccattcgatcaaatactcagaactgttcggtttttctggaaatttttcttctctcagccatctctctctctctctgcgtccatggagttttggggtgttgaggtgaaaagtggagaatctctcaaggttgatccgggagatgacaagattatccacctttcaaatgcatgcctgggggatgtcactaaggataaagaaggtctaccagtagccctgtatgtcaagtttggtaaccaaaagcttgtacttggaacgctttcttctgaagcttttcctcagatatcttatgatttggtatttgagaaggaatttgagctatcccataactggaaacatggaagtgtcttctttaccggatttaaagctcaatctcagtcagagtctgataatgatgaagattctgatgattttgatgaagatattccagttagtgctgccaatggtaaacctgagattgaggtgaagaatggcatcaaacctgatgcaaatgaagctaaacagaagaagatagcaaatggtgaagatgaagattcatccgaatctgaatctgatgatgattcaagtgaagatcagctcacagcgaatggtgacatagaaagtagtgaaggtgatgatgatagcgatgatgaggaggagggggacgatgaatctgatgaggagacacccaagaagattgaagcaagcaataagaggggtattgactcttctaagaaaacacctgttcctgtgaagaagacaaaatttgttactcctcagaagactgatagcaagaatgttgtccatgttgcaactcctcacccttctaagcagactggtaaagcaactgctaataacaagcagcagactccgaagtcaggtggagattacagctgcaagccttgcaacaggtcatttaagacagaagatgccttaagttctcataacaaggccaagcacagcactaagtgaaggcttgctttttgcccgagcagtgacagtgagtgttgatgtttctggtgttggatgattgtgtgaaaaaacagtttagttgatgtaggaaagctgggcttagtgattttcaactttgattggatcaacttgagtttgtggtaactgcgctttgaccttgatcccatgtcggccttctttcaaccgaatctctttgtgatgaaatgcgtaaatactccctgcaactcatgaaataagtattcctgactaagtcaactgggatttaacgttgctaaaccatcaactaattgggagctttttttatcacttttgtttgtatatttccaatcttcaaccaatttttgtttaatgacttttattaacaattggaaaaaattaaagcttaaaatacccccaaaa

SEQ ID NO: 6897 - DNA, 710 bp, Glycine max
  misc_feature (696)..(697): n is a, c, g, or t
atcgagaaatcgttttgatatatgatatagaaagagagagaagaagaaaagaagaacaaagatgcaatcctcaaaggagaagatgaaaaacatggcaagtgctgccaaggaacaagtcgacatctataaagccaaaatagacgagaaggcagagaaagcaacggcaagaacagaagaggagagggtgatagcccatgagcacgcaaaggcaaaggaagctggagcaaagatggagctgcatgaagctaaagcaaggcatgcagcagagaagctaagcgccaaccaatcacattatggtctccaccatggccacaacaaccctcccttagtaggaacaactcagactcactaccagcaagggcaccagcaccagccacttggggcagttcctatgcctggaaccacttatccatcttatccactaggaggaaaccctaaccctccaaggaacaaacatatataatagatctatctgtgttttgctgtagtacgtctacttcttgtgttattactcctaggagtttctctttgcagacatgaaataagaagggtttcaatttagtctgaatccttccatgtatatttgagagtggctttgatttcagtgaatgtttccccttttgtattaattcaacaatctttaaacttccaagatggtggtacttgtcccattggccatcatcattgacggtccannaaaaaaaaaaaaa

SEQ ID NO: 6898 - DNA, 1717 bp, Glycine max
tgatgtgaaggaggagggagaggaggaggaggatgaagaagaggaggaggggttgaaggaagaggtggatgcaaatggggacgtgaagatgggtgagattgatgaggggcaggttcaggagttggaggagcaccgcattgagttgagtctcgggcaagataataatgttgagagggttgaagttgagaaggagcagggtggagaggagcagatgatggatgtgggttttgagcagtctaaggaggaggatatgcctggaatgtggcttttggatcagaagaactgtgtgggggagccatttttgcggccttgtcatggtggtgatgtgaagggtgtggagtttgaacaagtgagagaggacgatggagaagatgtgcaggaacaagaggaggtggaggaggaggaagaagaggaggatggtgaagaggatgagcatgagggcgggttccatctctcgcccaagtgtattcctatggaggggatgtcttctgggaatgggggtctcattcaagttatggaagctgggcaaatgccttttggttctgggattgatctccgtgacaatccggtgggagattttctgtcgtccagggatgagccccagatgatttctggttcatcactttttggtaatggtcacaagagagacaaccttggcctggataatcatcattctctgaatggcagtaacaagcggctgagaggtgatagcccgtggaactccaagccaatggactttgaaacgtgcatagaacagatggaacattggatggggaaagctagaatgatgtttgcaacaaaagatcaggcttgcgaagaatctacaatgaatcagcaactcttgattaatgagctccagaagcgagataacatgattgagcatttgcataaggcaaagttagaagaggctcagaaaagacagattgaggtatatcggttcgagaaggaactttatatgatgcaaagtcttgttgatggctacagaaaagccttgaaagaaacacggaaggcttttgctgaatatagagcacaatgtcctcaaggtgataatgaaccactttataaagatcttcctgggtctgggggccttgttttgactgcggtggaggtggaaagggaacagctgaagaaggaagctgaagaaagggcaaagatgagagattttatgatagattttgaaaagaagactacagattttgaatccacttggtttggtaaatttgaagctcatatgagtacagttgaatccctaagtcagaggttgctggttttggaggaccaagtaaaacatttgaatgaagtgagtgctactcgcaaggtttctgatcccattgaatctgatcccgttgaattcaaggtttctgatcctattgagtccgatcccattgaaagtaaggtttctgatcccattgaatgcaacgtttctgatcccattgaatgtaaggtttctgatcctattgaatgtgctccaacacctgaaggagaaactgcttagtaaggtttagctttttcagtagctcagtagcacttgattaaaatctgttcacaccaagttcaaagctgcaggttgtttatatttataaattataatgtacagagctttatcttgaaaccgagacctttaactagggtaattcttaccttgaattgtctgagatcaagtcacaaattatggaaacttattttctgtgtttcacatctctatgatgtttttttc

SEQ ID NO: 6899 - DNA, 1805 bp, Glycine max
acgctgacaagctgactctagcagatctttcaagaatggcacaaattaacaacatggcacaagggatacaaacccttaatcccaattccaatttccataaaccccaagttcctaaatcttcaagttttcttgtttttggatctaaaaaactgaaaaattcagcaaattctatgttggttttgaaaaaagattcaatttttatgcaaaagttttgttcctttaggatttcagcatcagtggctacagcctgcatgcttcacggtgcaagcagccggcccgcaaccgcccgcaaatcctctggcctttccggaaccgtccgcattcccggcgacaagtcgatctcccaccggtccttcatgttcggcggtctcgcgagcggtgaaacgcgcatcaccggccttctggaaggcgaggacgtcatcaatacgggcaaggccatgcaggccatgggcgccaggatccgtaaggaaggcgacacctggatcatcgatggcgtcggcaatggcggcctcctggcgcctgaggcgccgctcgatttcggcaatgccgccacgggctgccgcctgaccatgggcctcgtcggggtctacgatttcgacagcaccttcatcggcgacgcctcgctcacaaagcgcccgatgggccgcgtgttgaacccgctgcgcgaaatgggcgtgcaggtgaaatcggaagacggtgaccgtcttcccgttaccttgcgcgggccgaagacgccgacgccgatcacctaccgcgtgccgatggcctccgcacaggtgaagtccgccgtgctgctcgccggcctcaacacgcccggcatcacgacggtcatcgagccgatcatgacgcgcgatcatacggaaaagatgctgcagggctttggcgccaaccttaccgtcgagacggatgcggacggcgtgcgcaccatccgcctggaaggccgcggcaagctcaccggccaagtcatcgacgtgccgggcgacccgtcctcgacggccttcccgctggttgcggccctgcttgttccgggctccgacgtcaccatcctcaacgtgctgatgaaccccacccgcaccggcctcatcctgacgctgcaggaaatgggcgccgacatcgaagtcatcaacccgcgccttgccggcggcgaagacgtggcggacctgcgcgttcgctcctccacgctgaagggcgtcacggtgccggaagaccgcgcgccttcgatgatcgacgaatatccgattctcgctgtcgccgccgccttcgcggaaggggcgaccgtgatgaacggtctggaagaactccgcgtcaaggaaagcgaccgcctctcggccgtcgccaatggcctcaagctcaatggcgtggattgcgatgagggcgagacgtcgctcgtcgtgcgtggccgccctgacggcaaggggctcggcaacgcctcgggcgccgccgtcgccacccatctcgatcaccgcatcgccatgagcttcctcgtcatgggcctcgtgtcggaaaaccctgtcacggtggacgatgccacgatgatcgccacgagcttcccggagttcatggacctgatggccgggctgggcgcgaagatcgaactctccgatacgaaggctgcctgatgagctcgaattcgagctcggtaccggatccaattcccgatcgttcaaacatttggcaataaagtttcttaagattgaatcctgttgccggtcttgcgatgattatcatataatttctgttgaattacgttaagcatgtaataattaacatgtaatgcatgacgttatttaaaaaaaaaaaaaaaa

SEQ ID NO: 6900 - DNA, 1306 bp, Glycine max
ggtattcggctcgaggcttaaggcttttctttacactgtccaaattgtgaattatttcaagaattccttccacaccttcaaagttagaagccatggaaacttctcatcctctttctattgaaagcttctcttatagttggttagtgaacctgaagccatcactagaaagcctagatggctccctcagaacttcccttgatgcttctgatgaaacttcttccttcattgaaatggatccaagaatgacaccttctaaaagattcttcagaaactcccaagatttcaaatttgacttcccaatctcgcagtcccctcgcactcttgttgatgctgatgagctcttctccaatggctacctcatgcccctttttgttgaatcattgaagatggaagcatttgaggcctctgatgtcattccaagcctaccttcctcttcacatgtgccaaagagtgtggttcctaatagtcattctagatgcccttcgttgaaaaggtgcaaaacattatcaaggagaatatttctcaagtatctcaacttcttaaggcccttgtatagaagattgaggggtggcaaatcaggctcaaaacctgaatctgttgttaagagaaccgtgtcagcaaagaataggggatactattctgaaacttccccacggattagtgtagcttattctgctgatgactggcgcaagtcctgtgattctgaaagctcaatttatgaagcagttctccattgcaaaagatccattggtatgttcaaattcattgtgtatatcaattaagcatatgttgtgttcaaggttttaaattgcagtcacggtcacaatttcatcgtgatcttggatattgctggcaattatggctgcaattgcgatcgcaagagtccgaaaactttgacatagagaacgaaattgtggtcacagaacattttttaaaaccttgatgttgtgttcccttgatgacattttgtacattttgtgtggaactaacttggacatttgacccttcgtgtattgcagaaagaatgaattaaggatgctgcaaaagggttgcgtttggagatcaaaaatgcaagagaaaagagaagataaagtgaaaagagagagatgatcaaggttaaacccccaagagcaactcctttgctccattatcctctgcttgaatgataaaggaattataataggaaataaagatgtggttggtcaggcatattcaatctttatgatcaaattttgaagagaaaaaaaatatgtaggccaattttgtttgatcatctaatttaatatgggaaggaaccctttttctt

SEQ ID NO: 6901 - DNA, 1186 bp, Glycine max
actgataatcaaattgcgactcagctacgtaggcccccccccccctttgaaactcttgaatctagtaaaacagctgattcatcaataacaaatgctgaaggggttgtagagacagaatctcagccaggcctgcagcttcaggttttcaaatggccattgtggcttttgggcccttccgttctcctagcaactggcatggtcccaacattgtggttaccgatatcatcaatctttctcggccccaatatagccagcctactttccttaattggacttgattgcatatttaacctcggtgcaaccctttttctcctcatggctgatgcttgttcacgaccaaagtctccaacacaagactgcaaaagcaaggctcccttcagttaccaattctggaacattgttgcaactcttaccggttttgttatcccactgttgatgatgtttggatctcagaagggttttctccaacctcaactacctttcatcccatttgcagttctacttggtccatatcttcttcttttgtctgtacagtttctgaccgagatgttgacttggcattggcaatcaccagtctggcttgttacccctgtcatttacgagtcctaccgtgtcttgcagctaatgaggggattaaagcttggggttgagctcagtgcaccggcatgggtgatgcatacaattagggggctggtttgctggtgggtgctaattcttggtctgcagttgatgagggttgcttggtttgctggcttagctgcacgagctcgtaagcagcaattgtcttctgatacttctagtgttaatggtgattagtgattaatacattgtaaaaatattctgaaagagacagattatagaataagtagatgttgtttattttagttatggatgttttccatcccatccatataccatagtgatagtggtacacatctaatagatatatacacaagtaaattgcatacaagacttactttatcactgggctttatgctgtatcaatggttttgtctgtgctatcttcaagttgtgaacaaagtggtttatctgtttttacctcaacttatgaagatggaaaaattatatagtggttggttcaagtaaaagtttatggatttattatttttgataaattataggtaataaaataagttatattaattagaaaaaaaaaaaaaaaaaa

SEQ ID NO: 6902 - DNA, 1057 bp, Glycine max
  misc_feature (928)..(928): n is a, c, g, or t
  misc_feature (1013)..(1013): n is a, c, g, or t
tcgatcagctacgtaggcccccccccccccccgatttgtcgtagtttattttcatccacaccacagagtaaaactacaacctcaggaggagaatgttcctctgaatccgaagcccgtgctctacccagcgactttgccagaagtccaccatttcttgatttttggaggttaacagtcttcatattcaacactttgctatttcttaacttcaagtgcaagagaacaaagagcataaaatcctttagagtgtcagcagtcaagaatgcatacaggaatggcttcgttaactcaactccattataaagtacatgcctccactctcagaagggtgcattcaagaagccaagggctattgaagtctggaaaactatcccaactccaacgatctgcctttcctagtattcacattaatcaatcctgcatatgctgcacgaagttaactccatgggagtcatcacctgtcacatatgctcctactgataatcaaagtgatacttttttgccgcaaaatgccaatatatttgaaactcttgaatctagtaaaacagctgattcatcaataacaaatgctgaaggggttgtagagacagaatctcagccaggcctgcagcttcaggttttcaaatggccattgtggcttttgggcccttccgttctcctagcaactggcatggtcccaacattgtggttaccgatatcatcaatctttctcggccccaatatagccagcctactttccttaattggacttgattgcatatttaacctcggtgcaaccctttttctcctcatggctgatgcttgttcacgaccaaagtctccaacacaagactgcaaaagcaaggctcccttcagttaccaattctggaacattgttgcaactcttaccggttttgttatcccactgttgatgatgtttggatctcanaagggttttctccaacctcaactacctttcatcccatttgcagttctacttggtccatatcttcttcttttgtctgtacagtttnctgactgagatgttgacttggcattggcaatcaccagtctggct

SEQ ID NO: 6903 - DNA, 2379 bp, Glycine max
  misc_feature (9)..(9): n is a, c, g, or t
cctctaggnaatggatggaaaacgggtatgtctggataacaactacttttctgtctacttggctggatataggtagtcccctatcttcagatgcaacggatgacatgcaaggagttattatacttcgaatgtatataccagattcagagcgcaaaagatggtttttttctaggtggaaaaacttgactactggaaagactgctaatggttcccagggtttgagtacttatggtatctttgcatatgatactgtttacgctcttgctcatgcacttgatgcatttttcaaacaagggaaccaaattacattttcacgtgatccaaagttatctcaactacgtggagacaacattcatcttgatgctgtgaaaatattcaatgaaggaaagctgttgcataaatatatttatgaggttaacatgactggtgtatcaggtctattcaagtttacatctgatggagaccttgttaatcctgcttatgaaatcatcaatgttattggaactgggactcggaggggttggttattggtctaattacactggattatcaattgttcctcctgaagcactttattcaaaaccacctaatcgatccagtgcaagccaaaagctactccctgtgctttggccaggagaaacaacccataggccccgtggttgggtttttccaaacaatggaaggatgttaaaaattggagtgccaaaaagggttagttatcgagaatttgtctctcaagtacaaggcactgacatgttcaagggattttgcattgatgtatttctttctgctgtgaacttgttgccctatgctgtcccctataaatttgtttcttatggggatggtgacagcaatcctagtaacactgagcttgtccgtcttatcacagctggtgtcttcgatgctgcagtaggtgacattacaattactacagaaagaacaaagatggtggattttactcagccatatatcgagtctggtttagtggtagttgcatcagttaagaagacagattccaatgcttgggcttttttgacgccatttacaccaatgatgtggactgtcacagctgtcttttttctactagtgggagctgttggttggattttagagcataggctgaatgatgattttaggggacctcccaaacaacaaatggtcacaattttgtggtttagtttttcaaccatgttctttgctcacagggaaaatacagtgagcactctcggtcgctttgtgctgcttatatggttatttgtagttctaataattaactcaagttacacagcaagcttgacatcaatcctcacagttaaacaactttcttcacctgtcaaaggcattgaaagtttaagaagtagcaaagagcctattggctacttgcagggttcatttactcgaaattatttaattgatgaaattggtattgatgaatccagactagttcctctgaaaacaccagaagaaactgcagaagcacttaagaaaggtccccagaagggtggtgttgctgcatatgttgacgagcgtgcttacatagagctcttcctttcaagccggtgtgattatagcattgtaggtcaagagtttaccagaaatggttggggatttgcctttccgcgagactcgccattagcagttgacctttcaactgcaatattggagttggcagagaatggagacttgcaaaggatccatgacaaatggcttttgagcagtgcttgcctatcacaaggtgcaaagcttgaagtggacagactcaacctgagaagcttttggggcctctatctggtgtgtgggttggcatgtgtgcttgctctcctaatatattttattcagaccatgaggcagtactccaagcatggcccagaggagctcgaatcttctggccatggctcaggatcttcgcgtttgcgcacattccttacattcgtagatgaaaaggaagagatagttaagagccgctccaagagaaaaaaaatggaggggatatcttacagaagcacaagtgaggttggatcatccatcaccttcaacaaagcatattctcaggcatcattaaacagaattgattcagttaatgaaatctaactgttgcatatttatttgctcataattttgtagcctcttgtactaactacttgtgcatcacacttcattcttcattccctattgtaactgctggctttctactacattccctatttgtaagatatatcaacttgtgttggattgtggtgtaagtgtggggacaaggtggctttgcaatttttgtcgttacttatggtttgtgtaggatacataatattgaatgaaataatctttgtaatttctgaagtcctggataagcaaatttaatgcattttagttcctcttgat

SEQ ID NO: 6904 - DNA, 794 bp, Glycine max
attatctggtccccacggcttccatttttttttttttttctgtttgccgtggaagagagaaaccctagggtttggaagaagctgatcggagaagatggtgcagcgtctcacctaccgcaagcgccacagctatgccaccaaatccaaccagcacagagtcgtcaagactcccggtggcaagcttgtttatcagaccacgaagaagagggccagcggacccaagtgccctgtcactggaaagaggattcaagggattccacatttaaggccaacagaatataagagatcaaggttacccaaaaaccgaaggactgtgaaccgtgcatatggtggtgtgttgtctggcagtgctgttagagagagaatcattcgagctttcttggttgaagagcaaaagattgtgaaaaaggtattgaagatccaaaagacaaaggaaaagcaagctttgaagggctgagttttgagaaaagtgataaagatctttttggagggattttaggtttgggtgattaatgattatagtaatgcatgaaatttgttagagctgtttctgtgttaattttgtgcttatttggctttttaaaactcattctagtgcaactgttaactttgttgacaactccattacgatacagttttgtatgtcaccattttctcttgctggattattaattttctctctgcatattagtgctttgctccaaaacctgttgcagctagaattctgctttgtcactgtaattttactgaatatccattggtttttgtagcttgaaaaaaaagggcggccgctc

SEQ ID NO: 6905 - DNA, 640 bp, Glycine max
gtcttcgttctcactcgacccattctctgcttgttcttctgttaccgccgctgtggttcccttatgttctcgagttttttttttttttttttttttttcataccaaatattttgttttgattagatatcagtacttctgtacaatagttgataacatttccattacatatttcgctgactaagaactcatagatggaaatagtaaatatacaagacatatcataaccccaaaaagttgaagaaaatacaagacatcttggttgtgctattgctcatatcaccaaggcacaaatcgatccataagcaaacacaccgttgcctcagacatggttccattagtagtgtctctcttaaccaccgcagtttgagtttccttttcttcttggttcctttctgatccttctttggctttggataataagaaaggcttgcgggcaagaactttttctcgaagctttgtcagctccccaacccatacctctaccatagcagacatttttctcagcacttagaaactaatgaggcaataattaaaactctttgttctcttgtttttgcttggggggggggcctacgtagctgatggtttatataggaatagtaggaaggctaatgaaaggggcttagtagtgttgtgtct

SEQ ID NO: 6906 - DNA, 744 bp, Glycine max
tcccgggccgacccacgcgtcacggttcctttttttttctctctttttgctgtgggaagaggaaccctagctagggtttggaagaagctgatccgagaagatggtgcagcgtctcacctaccgcaaacgccacagctatgctaccaaatccaaccagcacagagtcgtcaagactcccggtggcaagcttgtttatcagaccacgaagaagagggccagcggacccaagtgccctgtcactggaaagaggattcaagggattccacatttaaggccagcagagtataatagatcaaggttacacagaaaccgaaggactgtgaaccgtgcatatggtggtgtgttgtctggcagtgctgttagagaaagaatcattcgagctttcttggttgaagagcaaaagattgtgaaaaaggtcttgaagatccaaaagacaaaggaaaaacaagctttgaagggctgagttttgagaaagagtgataaagatctttttggagggattttaggtttgggtgattatagtaaagcatgaaatttgttagagctgtttctgtgttaattttgtgcttatttggctttgttaaactcattctagtgcaactggtaactttgtcgacaactccattatgatacagtttttgtatgtcatgattttctcttgctggattattgattttatttctgcatattaaaaaaaaacaaaaaaacatgttgcagcaaaaaaaaaaaagaaaaaaaaaaaaa

SEQ ID NO: 6907 - DNA, 1683 bp, Glycine max
ccttattttattattttttttgcttcccacaaaatatttatataatgaatgaacataactgttttacaacctgcggagtaagggacccttaaaaaagctttgtataacccaaaactgatgccttcatcaatactcatggactatactctcaacccaaaaataatgactgaaaaaggatgtaaaaaaaacaaaattttttatatcatccctcaccaaaaattaccaataaagcaattggcgaccctacatacccgtctatgtgacaggtaacaaaatattacagagttgtatccatgaaacaataagttggcacatacatggagactataaaaggagcccacaaaagggaaaggggaggaaggggacaacacagtcttggcaagaatgggcactttcctccaaaaggatagccccaaagcaccaaacaataagctgtgaactaagacctggagaaactgctgactccacagttcctcgaatgcaatcctctctctggacaatggcaacttcggtgcacagagctccgagcacttcaaaactgcaaactcttcatgatcaaagaccaacaactggcgaccacaaagccgacaaatgcctcaaatataggcaaccctctgattctcctaaagaatgggtaacagggaacttgagaattaaaaaatgcagcagtaataatgtacattcagaagcttaagaagctgtggcagccgtcgacttctctaatttttctttttcaatttctgcccttctctgctcagcatgctgggcaacaccattagcaagagcttgataattgaactcaagcttctgggtaaggttctcaaacctcgatggatccaatgattgtatcactttgattgaatccacaaagaaaacaaaaggatcaacctcatcaattggggactgcaactcttcatcatcactaaagtcatcatctgaatcatcatcatcgtcatcattgggccggaatgacttcgcctgttcagccaactttctaagtgtgatagtatcagcatcctctccctcatcagcatcaactcccatttccttgtcaaaaccatttccttcctcatcttcatcatcagtttgaaaaccatccatatcatcatcatcttcagcttcttcctcttttgcagcctctgcaacttgttccttgtaggcaactagaagatcaagattggcccggaacacccgacctaaagcctccgctggcaattgatcagctgggagtgccagtaatgatgttaaaccaaggcagcatactttcttttcatgttcccttttaaaattagtacgcattccactcttcttaacttgttgaagcaaatggaaccaaagatggaatatttctgatgcaacacctagcttttgcaatatgctgagagtcaaagctgcattgtagtaaagagcatctgcaatcacttgcatgaaaagacatttcaaatatgatttttcagtgtgacgcaagcgttcaaccgtaattctgagatacggctcaagccagtgatccacttgtcctctgcaattctggaagacaacttcgataagctttggagccggcacaatatcattgtcctccatatttttatccgacataatggatggaatcatgttccataaactctgttgatagtcgggttctttgcggggggggggccgacctggcccccttgaaatatagtt

SEQ ID NO: 6908 - DNA, 887 bp, Glycine max
  misc_feature (1)..(1): n is a, c, g, or t
  misc_feature (3)..(3): n is a, c, g, or t
ntnaagtctgtctgcattactgatctctctctgtttctccctcactctgatccacttctacttcaacatcttaagaaagcgaatcgattccgattcctctcaatggctgcggaacccaaggaatcgccttccaacaaccccggtctccatacaactcctgacgaagccaccaagggttacatcatgcaacaaactatgtttagaatcaaagaccccaaagtgagcctcgatttttattctcgagtcttgggcatgtctttgcttaagagattggattttccggagatgaagttcagcctgtacttcatgggctatgagaatacggcagaagctccaagtaatccaattgataaagtggtttggaccttttctcagaaggctacaattgaactgacacataattggggtactgaaagcgatccagagttcaaagggtaccacaatggcaattctgaacctcgtggctttggacacattggtgtaactgttgatgacacatacaaggcatgtgaaagatttcagaatctgggagttgagtttgttaagaaaccagaagatgggaaaatgaaaggtatagcatttattaaagatcctgatggatactggattgaaatctttgatcggaaaacaataggaaatgtaacacaaactgctgcttaggcttaagataacaccttaaggcccggcttttctgtgatatgttcttatctctgatttaattgggtcttttgctcgtatgtggagtatgtaggatttttcgagcttcacctgaatgaataatttgttgtcaaaccagaacgaaaaacaagattgtgttgtgaatcttgtattttttttttctttaatttcaaaaacctagccaatatcgaaactggtgacttgagtct

SEQ ID NO: 6909 - DNA, 803 bp, Glycine max
  misc_feature (730)..(730): n is a, c, g, or t
cccacgcgtccgcccacgcgtccgtacggctgcgagaaacgacagaagggtcgttcattggtgaccaattttcgtttcgcagaaatggggaataacagacaaaggagattcagaactcatcgcgcacaatcaagtcgacaccaccaccaacaactcttactagaggacgattctcaaagctctcttccagaaaatggtgagggcgaggaagaggaggaggaactcacggaacctaaaataaagcttgctatgtgggattttgggcaatgcgatgccaaaaagtgcactggacgcaagctttcaagattgggcatgctaaaagagttacgtgtgagtaatggttttgggggcattgttttaagtccggctggaaatcaatgtgtctcaagagaagattactctttaatccagaagaaaggattggctgttgtggattgttcatgggcacgcttagatgacgtgcctttcgtgaggctgcgctgtgctgctcctcgcctcttgccatggcttgtagcagcaaatccagtaaattatggtcggccatgtcagctatcttgtgtagaggctttatctgctgctttgacaatatgtggggaagaaaaaactgcaaatttgttgcttgacaagttcaaatggggccatgcttttatgtctctgaatggggaattactgagggcctactccaaatgctgcttctcgtccgaaattattttctgttcaaaatgcttgngctgtcacaagaaagtcagattccaagggctcctactgatagtgaaattacgacacctgaaagtgaggataaa

SEQ ID NO: 6910 - DNA, 948 bp, Glycine max
  misc_feature (821)..(821): n is a, c, g, or t
  misc_feature (867)..(867): n is a, c, g, or t
  misc_feature (869)..(869): n is a, c, g, or t
tcgagtcagctacgtagggcccccccccccttcagagacacatgggagaacctcttcgcgtatatatggatcttgaagctgggcgaaagagatcaggtcgagaggacatatatattagctaccatgctgaggatgatgtacaatcaacctatgctggtgcactctttcacaatggtcgaaactaccacgtctccaataaaaaaaacagagatatacttgtttattggtcttcatcacgttgtcttcctcaaaggaatgagcttgccaagaaactcctgagcttactgccacatcattcatttggcaagtgcctaaataatgttggtggtctagacatggctctttctctttatcccgaatgtgcaaacgatgccaacgttacaccaaaatggtgggatcatttacattgcgccatgtctcactacaagtttgttcttgcaattgagaacacttttactgagagctacgtgacagagaagttattctatgccttagactctggtgcagttcctatctattttggtgcaccaaatgtcatggattttgtccctccacattcaataatagatggtagaaaattcaactcattggaagagttggcttcgcacgtgaaggctgtagctaatgacccggtagcctatgcagaataccatgcatggagaaggtgtggtgtactgggaaactatggaaaaacccgagccatgagccttgacacgttgccttgtcgattatgcgattctgttagcagaaaaggtggaagaaatgcggcaagctaggttgagtttttggctaaatttgttgtcctgcatgagagattgacncattgaattaggcttgcaacctgtatagaggcacattgcttgtttntntaagctaagtacattttgccaaaaaaggaaacaaaaaaacaaaattagaaaggtttagctcaaaaaaaaaaaaaaaaaa

SEQ ID NO: 6911 - DNA, 1995 bp, Glycine max
gcgttttcgcgtccgcccacgcgtccgttcggctgcgagaagccgacaccggagggaggagactgagaaaacagaagaaaacaaaatggaagacacagtttctgcgttgaggtctttgatggtttctcactctccgccgctggatgccttagtggtgccctctgaagattatcacctgagcgaatatgtgtctgcacgagacaagcgccgcgaattcgtttccggcttcactggaagtgccggcttggcacttataacaaagaaagaagcactgctgtggacggatggacggtattttttgcaggctgagaaagaacttagtgctgggtggaagctaatgcgaattggtgaagatcctgctgtagatatctggatggccgataatttgccaaaagaagcatccgttggggttgatccctggtgcatttcaattgatactgctcaaagatgggagcgtgcttttgccgaaaaacagcagaagctggttccaacctcaaaaaatttggtggatgaagtttggataaatcgcccaccggcagagataaatgctgttattgtacatcctgtgaaatttgcaggtcgctctgttgcagataagttgaaagatttgagaaaaaagcttgtacatgagcaaacccgtgggattattttcacagcacttgatgaagttgcatggttgtataatattcgtggaagtgatgtggcctactgtcctgttgttcatgcatttgctattgtgacatccaattctgctttcatttatgtggacaaacaaaaggtttctgttgaggtacaaactcatttagtggagaatggaattgaaattcaagagtatacagccgtaagctctgatgcgacattgcttgcaactgatgagctagatgctgtatctactgccaaggctgctttagccgaaacagaggccagaaaaattcccagtgaaattgataagagtgtaaatggtgaacatcaagcagaagaaaatagtaatgacctcatatgggctgatccagtttcatgctgttatgcactgtatgcaaagttgaaccccgatacagttctcttgcagcaatcacctttagcccttgcaaaagctttaaagaactcggtggagttggatgggttaaaaaaggcacatattcgggatggtgcagcagttgtgcaatatcttgtctggctggataagaagatgcaggatatttatggagcttctggttactttttggagaaggattctgtgaaaaaggagaaacatttgcaatctttgaaattgactgaggtgactgtaagtgaccagcttgaaggttttcgagcatcaaaagagcatttcaaaggattgagtttccccactatttctatatttggatatgcttttcttagaaaaaattttgctcaagaaaaaaaagtggtgattccaaagattttggcttctgaaataggcagtggggaataaccattttcagctttcctagaaggctgatattttaaagttgttaaagtttttctttatagaaaagaactttcattaagaagacaatatttagttattagacattgcagaggtggcattacctgtaatttaggtatttttgttttaaaattgattatcttaagttgtcaggaaaagactaaattatgcacaattttgttcctatagtgtgctgtttgattggaatagattcattaggattgatcagaacagttacgggtatttcctggaattctaacttaaaatgttcatctcccttgcctttgatactttttcaaaattttgttttatagacttattattctttatgatcctccctagaatctaatcatccattgtatgcttaagtagtgaatgacctttccagatgttgcgtacagtgtttctgtagattctgcatataaggtggatttaaaatgttttgacctgtttgatatgttatatgtacaaatgctgcgatgttaaggaaggatcacattttttctttgcaacttcatcaggccaat

SEQ ID NO: 6912 - DNA, 1512 bp, Glycine max
gcgacattgcttgcaactgatgagctagatgctgtatctactgccaaggctgctttagccgaaccggcgcccgggaaaattcccagcgaaattgataagagtgtaaatggtgaacatcaagcagaagaaaatagtaatgacctcatatgggctgatccagtttcatgctgttatgcactgtatgcaaagttgaaccccgatacagttctcttgcagcaatcacctttagcccttgcaaaagctttaaagaactcggtggagttggatgggttaaaaaaggcacatattcgggatggtgcagcagttgtgcaatatcttgtctggctggataagaagatgcaggatatttatggagcttctggttactttttggagaaggattctgtgaaaaaggagaaacatttgcaatctttgaaattgactgaggtgactgtaagtgaccagcttgaaggttttcgagcatcaaaagagcatttcaaaggattgagtttccccactatttcttcagttggctcaaatgcagctataattcactattttccaaaggcagaaacatgtgctgaacttgatccagacaaaatttatctttttgattctggagcccagtatctagatggaacaacagatattacacgaacagttcattttggtaaaccttcgactcacgaaaaagcgtgttatacagcagtcctaaagggtcacattgctcttggaaatgctagatttcccaatgggacaaatgggcattctcttgatattcttgcccgaattcctttgtggaaggatggtcttgattatcgacatggtactggtcatggaattgggtcctatctgaatgttcatgaaggacctcacttaatcagtttcagacctcaggctcgaaatgtaccattgcaatcttcaatgactgttacagatgaacctggttactatgaggatggagagtttgggataagattggagaatgtgcttattgtcaaggaggctgatacaactttcaattttggtgatagaggttacttatcttttgaacacattacctgggcaccatatcagacgaagttgattgacctgaaccttctaagtcccgaggagataaattggctgaactcctatcacgccacatgtaggaatattctggcgccatatttggatgaagttgaaaatgcatggctgaagaaagccactgaacctgtaggtgcatgagctgtgtttggagttgaaaagttaaataacttaaagatggttcagcgtaattttagtgtcttccgtatccataatactgtaatctagattttagatatcattgggaatggttattccttcaaattactatgcacagcatatataatatatcaatattctgctgcatcatatttgagggcgtgtacaacgttaaattgtctatccgcacggcatcactgcatgcatcagctcttttacttttccctaatattgtttataaataagatggatcttgtacctaaaaatgatgacccactaatacagatg

SEQ ID NO: 6913 - DNA, 2159 bp, Glycine max
gccggaattcccgggtcgacccacgcgtccggaccaattttttgctggcacacacacgggcacaggactatcatatactctttttcttccttcttccgtttcattttcggcgtccctctctccctcccacaatggacctccatcgccggccgccgcccgccgctgacgacggagcaatccaccccaagaagaggagggacacttcctctcccaaggccggcgacgctctccctctccctctctacctcaccaacgcgatcttcttcacgctcttcttctccgttgcttacttcctcctccaccgctggcgcgacaagatccgcagccacacccctctccacgtcgtcactctctccgagatcgccgccattttctccccccccccctccgcccacgcggccctcacgggatgcctcgattatattatcctccgaggatgacgaggagattgtaaactccgtcgtggaaggcgtcacgccctcctacgcgctcgagtcccgcctgggcgactgtcgccgcgccgcggggattcgacgcgcggcgctgcagcgcctgacggggcagtcgcttgagggcctgccgctggaggggttcgactacgactccattttagggcagtgctgcgaaatgccggtagggtatgtgcagattccggtaggggtggcggggccgttgttgttggatggattcgaatacactgtgccgatggccaccacggaagggtgccttgtggcgagtaccaacagagggtgcaaggccatctatgcttctggtggggccagcagtgtggttttgagggattgcatgtctagggcacctgttgttagattctccactgccaagagagctgcacagttgaagtttttcttggaggatcctctcaattttgataccttgtcacttgttttcaacaggtcgagtagatttgccaggctccaaggtattcagtgtgctatggctgggaagaatgcttatttgagattcacttgtagcacgggtgatgccatggggatgaacatggtttccaaaggggtgcaaaacgttcttgattttcttctgaatgatttccccgacatggatgttattggcatttctggaaattattgttcggacaagaaacctgctgcagtaaattggatcgagggacgtgggaaatcagttgtttgtgaagcaattatcaaagaagaagtggtgcagaaggtattgaaaaccaacgtgtctgccctggtggagcttaacatgctcaaaaaccttgctggttctgctgtcgccggtgctcttggtggatttaatgcccatgctagtaacattgtttctgccatctttatagccactggccaagatccagctcaaaatgttgagagttcccattgcttaaccatgatggaagccgtcaatgacgggagggaccttcacatctcagtgaccatgccttccattgaggtgggtactgttgggggtgggactcaacttgcatcccaatctgcttgcttgaatttacttggtgtgaagggtgctagcaaggagtcaccaggatcaaactcaagactcttggccaccattgttgctggatctgttttagcaggagagctgtctctgatgtctgccattgcagcagggcagctagtgaacagccacatgaaatacaacagatcaagcaaagatgtaaccaaaatatcatcatcttgaggtcagggacgtggttgcagtcattaattctggactctagaataaaaaaattgagggtaagcggatttagggaaggaaaatggagaaacattagattagattgttggcatccacgtttggctctgcattgctgtctgtttagatcttttattatttggagagaggaaagtagagttatactctagatcttccctgtccccttctggatcatttcttcttttcattgcttcttctgccgagccattcagtgggtgttaacactttttttctcctcaaccaagacatttgacgtgttatattctaattcttttccccctatataatatgcttagcatatctatcattgtagccgaatgggttgatgaatattctcttgtccgctagtgcccgtcaattaagcttgagatcccattgtctcaagtctttatctaattaatgaatgtatttctgtttaagggtaatttttggtc

SEQ ID NO: 6914 - DNA, 1317 bp, Glycine max
  misc_feature (22)..(25): n is a, c, g, or t
  misc_feature (32)..(33): n is a, c, g, or t
  misc_feature (45)..(45): n is a, c, g, or t
caatcttgaggttcctctcaannnngataccnnggcacttgtttncaacatgtcgcgtagattcgcaaggctccaaggtattcagtgtgctatggctgggaagaatgcttatttgagcctcgcgtccggcacgggtgatgccatggggatgaacatggtttccaaaggggtgcaaaacgttcttgattttcttcagaatgattttcctgacatggatgttattggcatttctggaaattattgttcggacaagaaacctgctgcagtgaattggatcgagggacgtgggaaatcagttgtttgtgaagcaatcatcaaagaagaagtggtgcagaaggtattgaagaccaacgtgtctgccctggtggagcttaacatgctcaaaaaccttgctggttctgctgtcgctggtgctcttggtgggtttaatgctcatgctagtaacattgtttctgccatctttatagccactggccaagatccagctcaaaatgttgagagttcccattgcataaccatgatggaagccatcaatgatgggagggaccttcacatctcagtgaccatgccctccattgaggtgggtactgttgggggtggaactcaacttgcatcccaatctgcttgcttgaatttacttggtgtgaagggtgcaagcaaggagtcaccaggatcaaactcaagactcttggccaccattgttgctggatctgttttagcaggagagctgtctctgatgtctgccattgcagcagggcagctagtgaacagccatatgaaatacaacagatcaagcaaagatgtaaccaaaatatcataatcttgaggtcaaggacgtggttgcagtcattaattgtggactccagaataaataaaaaattgagggtaagcgaaatttgggaaggaaaatggagaaacattagattagattgttgtcatccacgtttggctttgcattgctgtctgtgtagatctttaattatttggagagaggaaagaagagttctactccacatgttccctgtccccttctggatccttcctttctttcctgtatacttttcgttgcttgttctgccgagccattgagtgggtgttaacgctcttttttctcctcaaccaagacatttgacgtgttgtattgtaattcttttcccctatataatatgcttagcatatctatcattgtcttttcttgtagccgaatgagttgatgaatgttctcttcatgtccgctagtgcccatcaatttaacttgaccgtgtctttttcattatttactaactcttgtcctatttatacgattttcaatcaatc

SEQ ID NO: 6915 - DNA, 1232 bp, Glycine max
tttttttttggtaaatgccagaagagcttttccatgatcatcaacacaatcaatccagaaaatatcaattacagttgtgaaatgtacagttatagccatttcaaaatcacaactacggttttaagagacctaaagccaaatgccaggctgtaaagaaaaatgatagaaggcaacatgataagcaagcatccctgcgataatattatatatgcccaatttgatcaagttggaaccacagagttataatgctctcctagcccaaaagcatgcttatgataagaaagcataatactcaaattagacatgccagcaccaccatcagatttatactctttgcccatctccacatctgggaaggaccctgaaaatatcataatatgcttcttcaagcagtgagtcaaggcaccaagctctagttgtcccccccatgtagctgtggactccacttctttacaataattttcaaacttctgggcaggtgattcgtcggaatcatcttcaatcaaattctctgacaggaaaaatggaaggaaatcagatgtatgatttctcatgtacgcagccaccatttctcgaagatcttggtatgtataaggagatctacccccagagaggagggccagctgatcctccacggctctatagaggcagtgcccatcaggctttatttcacaaacagtcaaaccaagaggcttcaacttcttttccaatttctcgttctcaatcatacgatcacttaataatgtcactctgctctgcttggattctctgctccctttctgcttcttgttgagctcttttgtctcgcctctgtttggccttgctgacctttgtatgttcaggttgactagtaacagatactccagctatggccttcaccagactgtccaaattgctcttttcatttccattaccactgatatagcctaatgcagtcagttctttggcatgattctccttaagcttagcagaaagttgacaaacctcttcttccacttgcttcttcttagctttctgctcagccttgctacctctagctgcagcttttttcatctcaacttcttttttctgcagttgcaatatctctttcctgtgtcgtgaaagaatttcatcaagagtttcctgctgcttctcagatgttttgtctgaaatcacttctttgtgtgcttgctcctcaatttcttgggtatcctccattggagcaacccaagtctagcgcatacggcggagac

SEQ ID NO: 6916 - DNA, 978 bp, Glycine max
ctacagcttcaggatggccttcctttgatgacatcaaatcatcttctctcacttattctctatcagcagaagagaaagcaactgtggcagtgctgcaattgcagcacagagcattagacgcttgccagaagttcttagttggggatgctggttctgacagtgacgaagatgatgaggaggcggaggatgaagatgagctggtagataatgattctgaagaatctgaggagtataagttctttgaaaaagtgtttgcagaagatggtgaccttaggagatattatgagaacaatcacaaggaaggagatttttattgtttggtttgtgggggtattgggaagaaggtatggaagaggtttaaggattgtattggactaattcagcactccactgccatattaaggacaagaaggaagcgagctcacagagcctatgcacaagtcatctgcaaagttgtaggttgggatatcgatcaaatgccagctattgtgttaaaggatttggattcctcattggctggttcaaggaagcttttcgttgaacccaaaaatcctgctgcgggttgtactgatgatacaaattcaaatggtgaagctactaattctactgattaatcatactgatgattaggatgttcttcaggaaagtgtagccaatgtgaatagcactttgttaatatggtttgttgggaggctcatgtacttgttgatgatgtggagacttgtgagttgtgatagggtttatatcttgtgtcctgtgaatttctctcctgcactagcggatagttttgtaaatccttcaattgcaagtcttgcgcacccaaaatttgatggctaacttgcaagtagttgattcacatttgtgttaccttttaaaattgtatgttttgtctacagaaatttcgctgaatatggagcattgcaatgaattgggtcgtgtgtctaaactatttacttgaaaattatgaaaatcaattat

SEQ ID NO: 6917 - DNA, 2397 bp, Glycine max
ccggaattcccgggtcgacccacgcgtccgaaaataattcctttttctttcggctcgagctcctttagtttactacatcaacagcaccgtcttactcgaagtatctgatttcaaatcttggattcgattccatcacttatagttctctcttctctttcttttcctttctttctccgccgaagatggcgccgcccacgccagcagttgaaggcgcccaggcgccgcaagggcggcagcaacagccgcaaggagggtttggcctcaccggaatcatacgcatggtcgttttctggtacttcgcttccaaattcttttcccccaaaaaacctaccgaaccttccgctctcatctccaatctctttcagaaagcacagcctctggatatgtggctttatctctccgagcacgagaagttcaatgactttggcagtgaaagttctcttgtatggcatgaaaccaatgttccatatgctgtttggggacctgagagtaccaggactcatactttgaagtatcatccgtcggagtctttgaagcataatgggagtctatatgctcatgttttctttgcgcactctggcttttcgcctgacccaagtgatccggagtaccaacctcaagcagcgtttggaaggacgcatcctgttgtgacgtacttgcccaagtcaaaagcagataaaaagaaaagtctgctgggaagttcaccagattctagtgaggctcaagtggcatccaaggtggttgatgaatctgaagatgatgatgattctagtgatgatggtgattctaatgatgatggtcctgtggagtgggcttcatattggaaaccaaatataacaataaacttggttgctgacttcactcagtacccaaagacaggtgtagcaccaaacattgctccttacttgaatgtcgatcctcttactgggaactactatccaattgtttatttcaatgagttctggttactcagggataagctgatacctttaaacgagacagtgactgaattatcacttaacctggaagttggtcccattagtatgacaaagtggcagttattcctgcagattgaccagtccttccagattcaccgtagttatggaagcatgcttgaaggcgaggctgatgaactcaagagggtattcttggaagggaatccttacctcctggcaattaccatggttgtttctcttctccattcagtctttgacttcttggctttcaagaatgatatccaattttggaataaaaataaatctatggaaggactctctgcaaagaccgttgttgtgagctttgcttgtcagcttattatcttcctttatctgcttgacaatgacacctcttggatgattcttgcaagctctggaattggttgtgttattgagttctggaaaattggaaaagccatgcgcatagagattgataggacaggaaggatacctatgttgaagctccgcgatcgagagtcatatgtacggaataagacaaaggaatatgatgatattgctatgaagtatttgttctatgttctatttctccttgttgctggtttttctgtttactcgctgatgtatgagcgtcacaagagctggtattcttggattctgtcttcgctcacaagttgtgtatacatgtttggctttattatgatgtgccctcaattgttcatcaactacaagctcaaatctgttgctcatctaccttggaggcaaatgacatacaagtttctcaacaccataattgatgacctttttgcctttgtcattaaaatgccaacactccatcggctttctgtcttccgtgatgatcttatctttgtcatatacttataccagaggtggatttataaagtggacaagaaacgtgttaatgaatttggttttggaggcgaggatgatcaggttgtggcagagacagacgccacaaaggaagaagagaacactacaacggaagaagagaagaaaactaattgatttggttttctctaaacaatttgagaaaattttacagtagataccaaatactgtagaattctacggggattggtttgtttttctcccccttttgttacacatttgcatttagatttttgttgaaagaaagctttagtttggccttgtctactggaatttttactaggatcgaaggattgagggaatttaactactgaaaccttcatggttgactgtaatggtcataacagctttttagttaccccctctgtagtttttctttgatctcaaatgtcttttagtttgtgatagataacccttttatatgtattattttcttccactcatgtatttttaactaatttatccctggttttgatttatttgtattggtgttttaacattttttaatatttcggaccaattaactcaaaaaaaa

SEQ ID NO: 6918 - DNA, 1373 bp, Glycine max
atttggtagccaatttccattgagacatttcaataattcaaaacctcggtagttgagggtttagcggtagcatagagatagcgcggattgaaactctaatggcactctcaacccctctcttctctttctcttcttcttttcttcattcatcttctcctctatgtcttccaaagcccctcttcccttatttgacagtgagcaattcaaccttccagaccaccagtctcgccgttcgctccgaaatgggttcttcccctgagcccatcaatttcaggaagtccgagattccgtccatgtctcacttgagactctcaatgaacgaaagtagcaagccttcatttaaatggcgaagggttttgctcaaagttagcggagaagcacttgctggagaccactctcagaacattgaccctaagataaccatggccattgcaagggaggtggcagcagtgactcgccttggcattgaggttgcactggtagttggtgggggtaacatcttccgtggatcctcctgggctggaagtagcggactagaccgctcatctgctgattatattgggatgttggccactgttatgaatgctatatttcttcaagcaacaatggagagtattggcattcctactcgggtgcagaccgcatttcgtatgtctgaggttgcagaaccgtatattcgcagaagggcagtgaggcatttggaaaaaggaagggttgtcatttttgctgctggaactggaaatccattctttaccacagacactgctgcagcactccgatgtgcagaaattaatgccgaggttgtactcaaagcaacaaacgttgatggagtttttgatgaggacccaaagcgtaatccacaagcacgtcttcatgagacactaacctatcaggaggtaacttccaaagatctgtcagtgatggacatgactgccataactttatgccaagaaaataatattccagttattgtctttaatcttaacaaacctggtaacattgagaaagctattaaaggagaaagagttggcactttgattggggccacctggaattctaccgtatcaagagcatgaaaatatttgtagtctggttacccattgattacttcttgtgtttttcttttcctatacaatcctccagccgaggatgccaaatatgtgaggtgcattacttgcgcattggtggttttgatggacttcaagggtgctgttgagtcataaatttgtaaatataacaagttaaattatcgtttgatgtttccctccacctggtttggcctaattttactttaccattttgtggtttaagcaaattatattttgacttttggactttgctccgtttgcataaattcacgtcttccgtttttt

SEQ ID NO: 6919 - DNA, 1207 bp, Glycine max
tacggctgcgagaagacgacagaaggggaaaagctttgtttattaataataataacaagcgaggtaaaacacttcgagcggcggggcaggggcagagttgattgcagttgagagagttgtaatgagtaacgaatacgattatctgttcaagcttctcctaatcggcgactcttccgttggaaaatcctgcttgcttctcagattcgctgatgactcctacgtcgacagctacataagtaccattggagttgatttcaaaatcagaaccgtggagctggaaggaaaaaccgtcaagctgcagatttgggatacagctggacaggagcgattcaggactataacaagcagttactatagaggagcacatggaattattattgtctatgatgttactgagatggaaagctttaacaatgtcaagcagtggttgaatgagattgatagatatgcaaatgacactgtatgcaagcttcttgtggggaataaatccgatctagttgataacaaggttgttgactcgctaacagccaaggcatttgcagatgagcttggtatccctttccttgagacaagtgctaaagactcaatcaatgtggagcaggctttcttgaccatggcagcagagattaagaagaagatgggaagccaaacaactactggtaagtcggcagaaagtgttcaaatgaaggggcaaccaatcccacagaagagcaactgctgtggttaggttctattctagttctactttctgttatatcaaaatagggagactctgttatgatatggatgtttcagtaactcttgaaatatcacctatcatctatttaaatccttggataatattattctgaatcccctgatggcttcccatgtttaaaatgaaagggatgcaatttttcactgcatcttatattagaaacctgcgcgctttagcctgacattatgaaaaggaatgttcagaccaaaaaggatatcataatgtccatcatcaacaactttcaactgtacataggggggaattgttggccacattagtaacattcttcgtggccgtaatatcactgttttaatccattacagttacagaaggaggtagccaattcctgcagtcggaaaagtaattgtagattcctaaactcataaaccaatggcttaaagttttttagctgatttatattgtaatgtatgaaaaaataaaattaccggc

SEQ ID NO: 6920 - DNA, 992 bp, Glycine max
acggctgcgagaagacgacagacggcgaattgatcggcggggcaggcgaaggggcagagttttggagtttgaaagagaaaatattgattgcagttgagttctaatgagtaacgaatacgattacctgttcaagcttctcctaatcggagactcttccgttggaaaatcctgcttgcttctcagattcgctgtgagtcatcacttcccttcactttcatctctcttgttcttgttcttcacctcctttgtttcttcatttcgtttcaggatgactcctatgtcgacagctacataagtaccattggagttgatttcaaaatcagaacggtggagctggaagggaaaaccgtcaagctgcagatttgggatacagctggacaggagcgattcaggactataacaagcagttattatagaggagcacatggaattattattgtctatgatgttactgagatggaaagctttaacaatgtcaaacagtggttgaatgagattgacagatatgcaaatgacactgtatgcaagcttcttgtggggaataaatctgatctcgttgataacaaggttgtagactcattaactgccaaggcatttgcggatgagcttggtatccctttccttgagacaagtgctaaagactccatcaatgtggagcaggctttcttgactatgacagctgagattaagaagaagatgggaagccaaacaactgctggtaagtcggcagaaactgttcaaatgaaggggcaaccgatcccacagaagagcaactgctgtggttaggttctagttctacgttctgttatagggaggactctttcctgactctgttatgatatatggatgtttaagtaaatgttaaaatatcacctatcatctatttaaatccttggattatattgttctgaatcttatgatgatttcccatgtttaaaatgaaagggatgcaatttctcacatgtctcttatatttaaaaaaaaaaaaaaaa

SEQ ID NO: 6921 - DNA, 920 bp, Glycine max
tttcggtccggaattcccgatccatcacataccaatattcaaacacaaactaattaaccaaaagcatacaaaacaatgaagagcacaatgctgctagcatttgcccttgtcttagccttgagttcacaaccactgctaggaggagctgaagcctcacccgagcaagtggttgacacattaggcaagaagctccgagttggaaccaattactatattgtcccatctcttccctacaccaaaattagaaccactagaggccttggcctagccagtgttggaaaaccttattgtcctcttgatgttgtggttgtgaatggataccatggcttgccagtgacattctcaccagttaatcctaagaaaggggtcattcgtgtctcaactgatttgaacatcaagttctctgctcgcactagttgtccccgccaatattccacggtttggaaacttgatgattttgatttctcaaagagacaatggtttgtgaccactggtggtgttgtgggaaaccctagcttggaaaccatccacaactggttcaagattgagaagtacgatggtgcttacaaattggtctattgtcccagcgtggtgaaatgtccaaagcatttgtgcaagaatgttgggttgtttgtggatgagaaagggaacaagcgtcttgctctcactgatgttcccctcaaagttcaattccaacaagcctaaacaagcttaatgctcctctaagtctaacattaatgcataaaaactatatatgaataagtgtatttcctttctaataacgatgcatgttctttcaatgtttatcaggatcctcatgtaaggttttccttggtaaatgcaaaataaataaaatgaacaaatgatatatttctcctaaaaaaaaaaaaaaaaaaaaaaaactcgagactagttctctc

SEQ ID NO: 6922 - DNA, 992 bp, Glycine max
ggaattcggcacgaggatatgtgcaagaaaaggatagcaagcacaaacgaagagactcatgattgtgacagcactttgataaatggttctcctttacgcatatctgatggttcttgttccttggatgagaactttgagtattgtgtgaaagtaattcgttggctagaatgtgagggtcacatcaaacatgaatttaggttgaaattgctaacatggtttagtttaagggcaacagagcaagaacgcagggtggttaataccttcattcaaactcttatcgatgatccaggtagtttggcaggacaacttgtagactctttttctgatattatatccaacaagaggctaagaagtggattctgtagtaaagctggggcatcaaattaagggtgatcctgttattcaagtttgccatttgcttcaacttttccatttatcattttctgtcagaaaaagtcaccctctgattgtttttgccttccttgtacaggcattttttaaaattaatcaccttccaagggattcatttttattgcagacaagctttgtcttgctaaaaggatttgctttgatgatctcagaaacagtaactcatttttccctggagggaggatttatggacatgaagtttcaggatgtaggaggcattatgccatttctaaattgctgcaatgatttttagtaatgaatttaattacggaagatattagaacccttttcttataacctttatttgaagaaggtacatgattcaatcgctgatttgatttatatttgtcattcttttgtaatcttcttgttcctcgtactgattagctggcaaatgaaaatgcttgcttcaaattgtggttaaagctgctgctgtttactatggttttctagactagcgtttcacatgatttctttggagatcttaagctagctggataaattaactttataaattaagacaatacatttgtgggttaaaaaaaaaaaaaaaagggcggccg

SEQ ID NO: 6923 - DNA, 787 bp, Glycine max
gctcgattcttctcacacactcattcgtactcaatagcttccttttcagcactttcactatagtatactttctgaacctctgagaatgacttcttcctcttccgcactcgttcttctgctcgcggcgattttcgtcttctccggcgtcgcacaatctccggcgtcgtctcctgagtcccctgctactccaccgaaagccgccactccctcgccttcttcgtccaagtctccacccgctgtttctccgacaccttcaccttccggcgggatctctccgccatctcctccttctttagtaccggcgtcttctccttcatcgatctcttcccctccgtccgatgctcccgcaccgtccgagaatgccgccgtctcgaatggattcgccgccgccggatctgtcgtagtcggtctcgtcgctgccgcctcattgatcatgtgaaccgccgcataggcttatatagaaaatttattatctcctaataaattattctccttatttttgagtttgttatggtttttttttttttcatttagagtttgtataagacgcttagtagtatatcattttagctctatttttattcgcctaataaatttattatttaattcaccttattacttttacattgaattcgtaatggtattcgctatttgcctgtttgttcagcgaaagcaatctccgtgtaatctttcgttatttattattattattatttgtgagagagatttgtgattatgttatgattgttaacactgggaggcttttgttccttattttttgttgtta

SEQ ID NO: 6924 - DNA, 514 bp, Glycine max
  misc_feature (508)..(508): n is a, c, g, or t
aaccctatcgactcggcgcagccacccaccgaagcagactccggagagcaggcaaggcgaggaccgagatggcgcgcggcgtggcggcggctaccaagggcggcgcgggcgccgggaagaagaaggggtcggtcaccttcgtgatcgactgcaccaagcccgtcgacgacaagatcatggagatcgcgtcgctcgagaagttcctgcaggagcgcatcaaggtcgccgggggcaaggccggcaacctcggggactccgtcaccgtcgcccgcgacaagagcaaggtcaccgtcacctccgacggagccttctcgaagaggtacttgaagtacttgacgaagaagtacctgaagaagcacaatgtgcgtgactggcttcgggtgatttcatccaacaaggaccgcagcgtctacgagctccggtacttcaacattgctgagaacgagggcgaggaggaggactaatatgcactgccatgcttctgtgtcgtgtgaaactttgaacttgntggagc

SEQ ID NO: 6925 - DNA, 658 bp, Glycine max
gctagaaccctagctcgcgcacgaaccccctccgccgccgacctcgcgtcttctcctgcgcatctcggaggtgcttcctagtttccacgatgaagctgatcgctgcctacctcctcgcctatctgggtgggaactcttccccaagtgccgctgacgtcaagaacatcctggactcagttggtgccgaggctgatgaagaaaagcttgagttccttctggctgaactcaaaggcaaggacatcacagaagtgattgcatctggaagggagaagtttgccgctgtgccttcaggtgggggtgccattgctgtgggagctccagctgctgcatctggtggtgccgcagcacctgctgctgagtcaaagaaggaggagaaggttgaagagaaggaagaatctgatgaagacatgggtttcagtctgttcgactaagcgcttcagttcctcccccctaccctctgtttaccctagtatctgtcgtgtgtggcctgccacaacagcgcctgcataatatctagagacctgaagttcgtgctattttgcttgggacaatgtatatgtttagtaccttcgtatgtgagtgtgttactgcttccgcagccttgagaagttgattgataaaaaaaaaaaaaaaaattcctcgcaaaaaaaaaaaaaaa

SEQ ID NO: 6926 - DNA, 538 bp, Glycine max
cttcaacacccttcgccaaaatgcagatcttcgtcaagaccctcacggggaagaccatcaccctcgaggttgagagcagcgataccatcgacaatgtcaaggccaagatccaggacaaggaggggatcccgccggaccagcagcggctgatcttcgccggcaagcagttggaggacggccgcacccttgccgactacaacatccagaaggagtcgaccctccatctcgtcctcaggctccgcggaggcatcatcgagccatccctgcaggcgcttgcccgcaagtacaaccaggagaagatgatctgccgcaaatgctatgcgcgcctgcaccctagggctgtcaactgccgcaagaagaagtgtggccacagcaaccagctgaggcccaagaagaagatcaagaactagagtgccactagtcagtttcatgggccggttgaatccatcgcgtgtcggagtttatgctattatcgtctcgtttgtcgttgaaccttattttactttgctttcagcctcgtatcgttgtggtgataatg

SEQ ID NO: 6927 - DNA, 1118 bp, Glycine max
ctcacgaaaaagagaacaaaaaccagaaaccctttccccgtgaaaacatgagggtcaaaccctcttgatgaccctcaaaccatacccacctaaaccaaaccctagttgctttcactttcctatataccccaaaacaaaaccaaaaatcacagtcccataaacctcacttcctcaacctcaatccaacagaaacaaaaaaaaacctcacttagatcacatagatcaaacaacaaaacacagagttacctaaattgaacctaccccagtaggttctacaagctcttgatcatggcctcagcatcaggggaggcaccaccaccccaacccacttcaacagaagctgctccagcatcaggctcttcagctccagccatatcagcagcaccaccacaacccggaggatcatcgccggcgcctccgagccgctacgaatcgcaaaagcgtcgagactggaacacgtttctgcagtacctgcagaaccacaagcccccattaacgctggcgcggtgcagtggcgcacacgtcattgagttcttgaagtacttggaccaattcgggaaaaccaaggttcacatcacggggtgcccgtactacgggtaccccaaccctcctgcgccctgcgcttgcccactgaaacaagcgtggggaagccttgacgccctgatcgggcgactcagggcggcttacgaggaaaacggaggccgccctgagtctaacccgttcggcgccagggccgtcagaatttacctcagggaggtaagagaaggtcaggctaaagcaagagggatcccttatgagaagaagaagcggaagaggaccaccgtggtgacggtgagtagtggtggtggtggtagtagcggtgcagttgcctctccgagtggcggtggtgataccgctattggtggtggagctggttctagtgctagtttaacttcttcagcaactgccacagctaatgatactacaaccacagtataattttaatagttatttaattatttatttttccttaattttttttgtttttacattattactatctatttttagttttctaaggaaattaattgtgattacaaggcttatataattatcaagttgcatattttattatggcg

SEQ ID NO: 6928 - DNA, 1878 bp, Glycine max
aattcggctcgaggtaacacctataaaatccgcccccaccctaaatttccatgtattccaacacaagacagacactgatttatgtagatagataaccataaccataccatagcttacaaattaagctccgctcactctctttctctctagaatccatggcagccattggtctgaatggcgtaaaggttgggacgacgtcgtctcaggcgtaccttgaaggcaaggcagtgaaggagacgagagcgttgatggctgaactgtgtcgccatttctacacccttggatgggtgacagggacaggtggcagcatctccatgaaggtccacgatgactccatccccaggcctcaacagctcatactcatggccccttctggtgttcagaaagaaagaatggagccagaggacatgtatgtgttatcacacagtgggtctgtcttgtctgctccatctcctaaaccttggccgcacaagcctcctaagtgtagtgattgtgatccacttttcaagaaggcatatgaaatgcgtgatgctgcggctgttttccacagtcacggaatagagtcttgtctcgtaacaatgatcaatccattatcaaaggagtttcgaatcactcacatggaaatgataaaaggaatcaaggggcatggctattatgatgaacttgttgtccccataattgagaatacggcctacgagtatcagctcacggaatcttttgctaaagctattgaagactacccaaaagcaacagcagtgcttgttcgcaaccatggggtatttgtctggggagactcatggatcagtgctaaaacacagtctgagtgttaccattacctctttgatgctgctctcaaacttcatcaaatgggattggattggtcaactccaaatcacggtccaatacaaagtgcaagaaggggtctaagtattgctggggagtcaaatgtgtcagttaaagcaaggaaatctaatggtgacagtgatccattgccacgttgcgttgttcttgacattgaaggaactactactcccatatcatttgtttccgaggttctcttcccatatgcccgtgataatgttgggaggcatctatctctaacatatgatacccccgagaccaaagctgatatcaagttgcttcgttcccaagttcaaagtgaccttgaacaagggattgcaggtgctgtgcctatccctccagatgatgctgggaaacaggaagtcattgctgcacttgttgccaatgtggatgctatgattaaagctgatagaaagatcactgccttaaaagagttgcagggtcatatatggaaaactggctatgagaataatgaattggagggaatagtttatgatgatgtaccagaagctctagaaaagtggcacgccttgggtataaaggtatacatatattctagtggtagcagattggctcaaaggctaatatttggaaaaaccaaccatggggacctaagaaaatatttatctgggttttttgacactacagtggggaacaaaagagagacacgcagttatgttgaaatttctgagtcactcggtgttgaaaaaccatcagatattttatttgtcactgatgtatatcaagaagccacagctgcaacggctgcaggtttggaggtgataatttctattcgacctggaaatggacccctccctgacaatcatggcttcaagacaatcaaatccttctcggagatctaagaccaattgcagtcttctggaatgacattaaatgtgttatcattactaagaatagtgtaacgttcacttcttaattaaaataatgtaattaaaaaaaattaaaataatgtaatgtaatgtattttgcgttgagtttctccaagtttaaaattag

SEQ ID NO: 6929 - DNA, 2170 bp, Glycine max
agattgttgaatcatcacatggctgtgacaaaagagaaagaggatgttcggaacactgggaagagattgaaatgcatgaggaatgaagaagaagaagtttatgaagaagaagagagtgagcttcctttaaagccaggatttttcttctacccaacaacacccacttcctttgttgtatctgatgctcttgaacccgattttcccatcatatatgtcaacaaggtctttgaaatctccactggatatcgtgctgacgaggccctcggtcgcaattgtcggttcttacagtatagagatcctcgagctcagaggaggcaccctttggtggatcctgttgttgtgtctgagattagaagatgcctcgaggaaggtgttgagttccaaggtgaacttctgaatttcagaaaggatggtactcctttggtgaacagactgagacttgcgccaattcatgacgatgatggaactgtgacacatgtgataggtatccaactcttttctgaggcaaatatagatctgaaccgtgtctcatatccagtcttcaaagagacttgcaatcaagattttgataagactggtaaatataatcctaagagtggacaatcattgtacagtcagcaccaagagatgtgtggcattcttcagctttctgatgaagtcttggctcacaacattttgtcacgcttgacaccgagggatgttgcatccattgggtctgtatgcaggaggatccgtcaattaacaaagaacgagcatgtcaggaagatggtatgtcaaaatgcgtggggcaaagaagtgacgggcacattggaactgatgaccaagaagttgggatggggtcgcctgactcgggaacttaccactcttgaagctgtttgttggagaaaactgacagttggaggtgcagtggagccttcacgctgcaatttcagtgcttgtgctgcaggaaaccgacttgtattgtttggaggtgaaggagtggatatgcaacctatggatgacacttttgttctaaatcttgatgctaaaaatccagaatggcgcagggttagtgtgaaatcatcccctcccggaaggtggggccacacgctctcgtgcttaaatggttcttggttggtggtttttggtgggtgtggtaggcaaggattgctcaatgatgtgtttgtgcttgatttggatgctcaacagccaacatggagggaggtttgtggtggaacaccaccacttcctagatcatggcatagctcttgcacaattgaagggtccaaattggttgtctccggcgggtgcacagatgctggggtacttcttagtgacacatatttactggacctcacaacagataatccaacatggagagaaattccaacttcatgggctcctccttctcggttggggcactcactctcagtctatgggaggactaagattctaatgtttggaggacttgccaagagtggacacttgcggctacgatcaggcgaggcttatacaattgacttagaagatgaacaaccacaatggaggcaactagaatatagcgcattcacagggttagcgagtcaaagtgctgttgttcctcctcctaggctggatcatgttgctgtcagcatgccttgtgggaggatcattatatttggaggttccattgctggtcttcactcaccatctcagctctttctgttggacccctctgaagaaaaaccatcctggaggatcctcaatgttcctgggcaaccgccgaaatttgcttggggtcatagcacttgtgtggttggagggacaagggtgttggtgttgggtggacacactggggaggaatggatactgaatgagttgcatgagttatgcttggcaagtcgacaggactctgacctgtgaagtgcataaaaccagaccctcttctctcaagacaagattttggttgcaaaaaggttttgggtggctttcctttagcagtttggtttttgtatatgagccactattacatgattgttatatgaaatgacgtgtgtattaccagtgtttttgaatgatatatgatgtcatctggctcctctgtacatcatagagttcttggctgttgtatcatccctcctttttcttttacaattagttttgttaataattaattcatttattattatttttttatattaaaaaaaaaaaa

SEQ ID NO: 6930 - DNA, 1247 bp, Glycine max
  misc_feature (1203)..(1203): n is a, c, g, or t
ggcacgaggagagaactagtctcgagtttttttttttttttttttttctttttttttcttaggcgaaatctgtcgagtacaagaaggaacagtgcagaaagcgatagaaaatggcttcccttttccccttttgtgctcgcaattgaccgtcgaatccaatcctgaaatcccccaataaatagagaagcgaagaaaccaaaccaaaccatcgagtgcgttgcgcccccaccgtaagtagagctatgtcgttgcgcaggcgaaccttgctcaaggtcattgttctcggcgacagcggggttgggaagacctcgttgatgaatcaatacgtgcacaagaagtttagtcagcaatataaggctaccattggagctgattttgtcaccaaagagcttcagattgacgacagacttgtcactctacaaatatgggacactgctgggcaagagcgattccagagtctcggggttgcattttatagaggcgcggattgctgtgttcttgtgtatgatgtgaatgtgatgaagtcgttcgatacccttgagaactggcatgaggagtttctcaaacaggcaaaccctcctgatcccagggcatttccatttattttacttggaaacaagatcgatattgatggtgggaatagtcgagtggtttctgagaagaaagcaaaggactggtgtgccgcaaaagggaatattccctactttgaaacatccgcaaaagaggattacaatgttgatgctgcattcctgtgtattgccaaagctgctttagccaatgagcatgaacaagacatatattttcaagggattcctgaggcggcagttccagagaatgagcagaggagtggatgtgcatgctgatctggagatgctgaataatttttatgcactccccttaatgctgttgttgaaactcttcaaattctttttggtcatttagtgtatactgtatgccttgattgtgcgtgtaaattgttattatgtaccttgaggtttccattttgataaattgtatcatttatttattgtagtcctgttttaggaaggacgaagcttgagaatgttgcacacgcagtaaaagcatgctctattgataaaccatgacctacgagatgaggcatggaccatggaatgtttaaataatttttgaactttttttccgttgattgtcaaattgaaatgcggcctggaccataaaaanaaaaaaaaaaaaaaaaaaaaaaaaaaaaaaaaaaaaaaaaaaaa

SEQ ID NO: 6931 - DNA, 1569 bp, Glycine max
ataaacaccacgcaaatgccacaactacaagatgctgctccacgttctgtgaactcttcaccttcactcttttagtagattttgatggatgcagcaaagggattggaagcttctggggagacccttcgtgcagaagtgaaaacctttttcgattctgctcctcctttgcagaacagtgatgagataactcagaagttgaatcagttcattcaacgcaattcttcagctaggagaattgtttgtgtgacttctggtggcaccaccgcgccattggaacaacgatgcgttcgctatgttgacaatttcagttcaggtcacagaggggccacatccaccgagtattttctgaaggctggatatgctgttatctttctgtaccggaagagaagtttccagccattttgtagatcccttcctgatgatcccttacttgaatgcttcaagcccaaccatgagtccaacattcaagtttgcgaggcttattctgaaacagtgaagagggctatcgttgatcatcatactgcagtggcaggtggtctctttgaaacttccattcaacaccatatttgagtatctccagatattacaaacaattgcaatgtcaatgaggtgtattggtccccgtgcaatgttctatcttgctgctgcagtgtctgactattatgttccttggaaggaaatggtagagcacaaaattcagtcaggatcatctcaccttttggatgtgaaactagttcaagtgccaaaaatgttgtcagtgcttaggaaagattgggctcctctggctttctgcatatctttcaagttagagacagattcaaacattcttctaaataaagctggtgcagctcttgaaaagtacaagatgcatgcagttgttgcaaatgaactctcaactcgcaaggagcaagtggtggttgtcactagtgctgagaaggttactgttcagcgtgataagagtctgtctgataatgatgtagagaatcccctgattaaacttctttcggagaaacatgccacttacattgaggattctggtagatgaatctagggaatggatttggcttctcgttgcagttttggacactacaactaattgcatcaataagtcatgatcatgaataaaaaggagaagaattagacagtatggacacagggctgtagaagaaatgaaatgagcagagacgacagttctaaccatacctttgacagacttaggccatatatgaatgttgtatttcacttgtccttcttatcattgttaattgggataccccgtttgtcatattaatttataatatcgaagttaagatgtgtgtggtgaaaaaaaaaaaaaaaattttggttttactggaattggtagtttaagatgaacagataccattaatcaacagcaaaaggatgatgtatagtgaaatattaacccagggtctgagatgtgtaatttaccattatgaacacaaagttgtaatgtattgtaatttgtaaggttaaaaccacagaagaattttattactctattgatcactggaatgtgctgtcaccgaatacatgatgcgtgttgacact

SEQ ID NO: 6932 - DNA, 1317 bp, Glycine max
tcgatcagctacgtaggcccccccccccccccgaacgctaccaaagccaatggaaaggcattatctcgttgtatgaattgggtagtactactagactactagtctagtgtctgcaatttctctctaaaaccctaaaccccattctcctgatttttgttattctgaatttcgggaacaaaaaacaacacaatcagctggcaaatgtctaactctaacccgttacccctcaagagacaaggtgaacaatcgtccgatgatggcgcctctgccattaaactttctcgcctcaaaatcgcaataccctctgaggattccgacaagaagaatgcgaacaggaggctcaaagatgttgaaatttgtgtcccaatagtgtatggaaccattgcattctatcttggaaggaaggccagtgagtctcagtcacataagtggacggtgtatgttcgtggagcgtcgaatgaagatcttggggtggtggttaagagggttgtatttcagttgcatcctagttttaataaccccaccagagttgttgaatcacccccttttgagttatcagaatgcggttggggtgaatttgaaatagccatcaccctctatttccaccctgatgtctgtgaaaaacagttggacttgtatcaccatttgaaattatatccagaagatgaatctggcccccagtctacgaagaaacctgtggttgttgaatcttataatgagattgtttttcctgaaccctcggagggttttctagcacgtgtacagaatcatcctgctgttaatgtgcctaggcttcctgctggtttgaatttaccaagtcctgtaccaattgatactgtgaatgataaggagagaggtgacaccaaagatcatcctctaacccaatggttcatgaacttctctgaggctgatgagctcttaaaacttgcagcagctcgccagcaggtgcaagctcatattgttaagctgcgaagacaattaagtttggtggaaggactacctcagctgtctaaaccgccctctggttatgaatgcacatgattcttatttttaaatcttttgggcttcccttttgggtcaaacttggaagattcattatgaacaagtatgtatatatgcgtatagtcatccttgtagattgtgttgcttatttttatctatggcagccaaaagattagaggtttgaactttgaagaatggacatgatcctgggcaaatactagttgtaacctgaggagtataatattttatctcaaacttatctaaatccaaaaaaaaaaaacagtttaatcatttaacaaccgaacttcgattatt

SEQ ID NO: 6933 - DNA, 1708 bp, Glycine max
ctcgagccgcttacacaccatcattctcatctactcaactcgatcaaacaataataaccggtttttctcacttttctttttcttttgggctttcagtttcacataacaaaccgtttgcagaacatcccataaaagcttagcttgtattcagtttctcttctcccaacgtttttgtcgctagtaacagaatattacaaagtaacggctttctcagtggagcgcttgatttgggttggtgggtcaacttcaagtttcaatttttttttcatttttgtctggtcgattgagaaggctcagttgcagagacggtgggggtgggaaggttatggctttttgcccaattttttgttgcggaaatagttcggatcgcaaaggacgagggaagaaacaacctccatggcgggtgttttctttgaaggaattacactccgctacaaataatttcaactatgataacaagctcggcgaagggggattcggcagtgtgtactggggccagctctgggatggatcgcaaattgcagtgaaaagattgaaagtttggagcaacaaagcagacatggaatttgctgttgaagttgagatattggctagagtacgacacaagaatcttctcagtctacgtggctattgtgctgaaggtcaggaacggttaattgtttatgattatatgcctaatttgagcctgctctctcatcttcatggacagcactcagcagaatcccttcttgattggaaccggcggatgaatatcgcaattgggtctgctgagggaattggatatctccaccaccagtcaatgccacatatcatccacagagatatcaaggcaagcaacgtgttgttggattcggattttcaggcacaggttgctgattttggttttgccaagttgatccctgatggggcaacacatgtgactacgagagttaaaggcaccctaggctaccttgcaccagaatatgctatgttaggtaaagcaaatgagagttgtgatgtctacagttttggaattctccttctagaacttgctagtggcaaaaaaccacttgagaaacttagttctgcggtgaagcgatcaataaatgactgggcactgccattggcttgtgagaagaaattcagtgaactagcagatccaaaacttgagggtaactatgcggaggaagagcttaaaagagtagttttaactgctctcttatgtgttcagagtcagccagagaagagacccaccatacttgaggtggtagagctactgaagggagaatccaaagataagttagcccaactggaaaataatgaactctttaagaaccctccagctgtaggacatactgatgatgggaccgttgctgctgaaggcagttcagatttcatctcagaagacaaggaatcaaaacctgagttggaagagaatactgagccataaactctgcaaaagaaatggaactatggatttgatatgctatacagattgattgtgaacctgcaggattgctttttttgtattactatttttattacttgtgcagagaaagactgggtgcctattcattatagaagttgctgcatgcatgtttctacttgccacactatgaatgtggttatgaatcatgcagaattgctgaaagtctgaaactaggaatttgatgttaaatacagattgtgaagttttcaaaaattgtgatttctttttttaattgtttgg

SEQ ID NO: 6934 - DNA, 2044 bp, Glycine max
gtgaactggaggatgaatttgatgccagtggtgatagttcggcccagcttcttgctgctgcgaatgctgctaataatgctcaagcaattattacaactttgttagaggagtatgagaatatatttgatgaagaaaatatacagagatgttccatgtcagcagattctcaggttgaaaacagtgggagtgaagattcaactgatgatgataatatagatgtgaaagaaaatggttaccatgatgcagagaatgaagttgatcaggagacagatgatgatgctgatcgtgttcagagtggaaaattgagtgagagtagtggttatgctggcagtgatctttatgattacaaggcatttggaggtgatgattctgatgttggatcctccagtagtaaccatgctaagactgaaaatgctaatctgaatgctgttccagataccccagggtctgaggatcaaaacaagcaaagaaaggccagtgaaaacccagttgatgaaaatgatgcttcgaatttgttgccttcatctgaatcttatcgatccatgggtgagattttatcttctatggaccccagcaaccatttacccatgccagtgattgaatcgggttctggaaagcaaacaagtaaagctagtagcactagtttcagttctaagcggtcgacattctggggaaggagcaatccaaggaagacaccgtcagtggaatcagttgattcttctggagaagaggagcttgctattcagagactggagattgcaaaaagtgatttgcaactcagaattgcaaaggaggctagaggcaatgcaattttgcaagcaagcttagagagaaggaagcaagctttgcatgagcggcgcttggcacttgaacaagatgtttcaagattgcaagaacagttgcaagctgagagggatcttagagctgcattggaagtaggcttgagcatgtcttcaggacagctttccagttcacgtggcatggattccaagacaaaggctgagctggaggagattgcacttgctgaagctgatgtggccaggttgaagcagaaggttgcagaactccatcatcaacttaatcagcaacgacagcatcactatggttcacttactgatgtaggcgatcgataccaacatgcccaaaatcatcctcaacagaggtttcttcagcaagattttgattcaaccctggcctttgttaatcacgagaggaaacaaaggactgaggagagtttgttgggcactgattggagaaatatcaaaggacaagtattggcatctggtagacagccttctcgaaagcaatttttagagtcaagtcctagcgattccaaaagtaccgaggcatcaacaagcatgtctgtcgatgatctcggtgcccttgattcggcctctgtgccttccacctcaagagcagcagaggtgggggaatatgcaagacatccatcagtagcatcttcaacattagtagagttaactactcgtcttgactttttcaaggaacggcggtcccagttgatggaacagctccataaccttgatttgaattatggttctacaacttcccaagactttgtctataaaccgtcgtcgccatcatggagttgactggccaaatcataggtgcttcataaaatccgtggggaagaattttggctgacatgtatatcctttgagtctgacttattgcatatatttttatccttcatgggtctgtactgcttcaatctcttgtttcctatttaattttttcttcttttggtagtgaagttaattggagttgaaatgaaaggctttccttttggtcttcaggttttctctttttttaataacattgagttcttttgtttctttaggggagggggtggaatttggtgtaattatatggcatgtcaatagatggggaattttgttgaacaaacaacgaaagtgaagaaattttaattaccgttttggcaaattctttgtacatagggacatgcaattgccagtttatatgtcacctatgtggaatgattggtatgtaattgttgtatctagca

SEQ ID NO: 6935 - DNA, 930 bp, Glycine max
atggctacggtagtgccgtgtttggttgcgtaaaacaactcgcgttaactggttttttttaatcgaggttagctggttttcactcgcgtcgaattgaggaattgggagtgatggatttctcttcggtgagggctgcgttggattcgaagtcgtacgacaaggttgcggatgtgtgcgacaacttgatgcttcaggttgcagctgagggcattgcttatcaggacgattggccctacacaattcacctcctctctcacatttatgttcacgacatcaatagtgcgcgctttctttggaagtcaataccttcctcaatcaaagagagccagcctgaagtcaccgcggtttggaaaattggtcagaagctctggttacgtgactatgccggagtgcacgaggcaatccgtggctttgattggactcaggaactccaaaccctagttgctgcattttcagaactttacacaaaggagatgtttcagctgcttctctctgcttattctacgataagcattaaagacactgctttatttctgggaatgaatgaggatgatgctacaaattatgttttgcagcaaggctggactgtggaccctgcctctcagatgcttattgtgaagaagcaacctgttgtgacagagcagaaacttgatccgagtaaattgcagcgattgacagaatatgtcttccatcttgagcattgaagcttttaattatgtaggaattagaagttttattttctaaaatattctcaaattgatcaatcatatgttctatgttcttgaagatgcgtgaaagtgcatataacctgttgataattttgtagcttaccctgtatgtgtttgaactttagcactgattggtgaaatttgcatctcacttggtatttattcaaaaaaaaaaaaaaaaaaacgcgagactagttctggt

SEQ ID NO: 6936 - DNA, 809 bp, Glycine max
ctgcgagaagaccggaaaaattcatccccatcaaaacacaagcaaatcctaaaaagttgattgagatatatagaaactagcttcaatttcacaaaatgaagaaagtgtttgtcacatttttagctgtgctagttgtatttgttcttacagcgaaagcttcagaggcacgactaccagttaaaacaaattcagcatcaaatgactacaattgttcacaagtctataacctgttagtttcgtgcgtagattacatgattggtggagatgatggtgccccttcaggtgtttgttgccaaagtgttaatgcagtgaaagcatcagcaccaacacaaattcaacgaatggctgcatgtaagtgctttttcgacgtagcaactcgccttccttccttgctcgaaaacaaggccaattcacttcctaaattatgtggtgttgatttgggttttatcatgagcaagcagaacaccaattgtaacaatgttcctgtaagctcaaggcaagggagagattagtacaataaaattgatgcatgtttggaagtttctttcttcttgaaaaaagaaaataaaatggtttgttgaatatgtggaacaagcgtttcatgttggaaataataatgagtggatattttctaaaaaaaaaaaaaaaaaaaaaaaaaaaaaaaaaaaaaaaaaaaaaaaaaaaaaaaaaaaaaaaaaaaaaaaaaaaaaaaaaaaaaaaaaaaaaaaaaaaaaaaaaaaaaaaaaaaaaaaaaaaaaaaaaaaaaaaaaaaaaaaaaaaaaaaaaaaaaaaaaaaaaaaaaaaaaaaa

SEQ ID NO: 6937 - DNA, 1535 bp, Glycine max
aacgaaacaggcgttgggttgagaatagaggggcgcgtaagaataaattagagggaaagggggggttgacacttccattttacgaaactcaattaacgtgaaatcaggtctacgaaaatcaccttttggacacctgatttcagttctttttcttctcaataattattatttgtatttgtaaacacacactatcaaagcaaatggggtgctcattctccgggttgaacgcactttacgactccgtgaacggcggaggtgatgtttggatcaacgagaaccgtttccgcatcgtgcgccagctcggagaaggtggcttcgcctacgtctacctcgtcaaggaggctcccgacgactccgccgccgctggcctcgccaagaagctcaaaggctcctctcatctctccgatgatggaacttatgctatgaaaaaggtcctcattcagaacaatgaacagctggagttggtcagggaggagatccgtgtttcatcactgttcaatcatcccaatctgctcccgcttcttgagcatgcaatcatttctgtcaagcctacccatgaaacatcttggaaccatgaagcatatttattgtttccagttcatttggatggaacattgctagacaatgccaaaataatgaaagccaagaaagaattctattccacctcagatgtgcttcaaatatttcgtcagctttgtgcaggactcaagcacatgcacagttttgatcctccttatgcacataatgatgtcaaacctggtaatgttctcataacacacagaaaaggacaaccacctcttgccatactgatggattttggcagtgctcgtcctgcaaggaagcaaattagctccaggtcagaggcccttcagttgcaggaatgggcatctgaacattgctctgctcctttccgagctcctgagctgtgggattgcccaagccaagctgatatagatgagaggactgacatttggtcgctaggatgcacattatatgcaataatgtatggggtatctccatttgaatatgcacttggagagtctggtggaagcctgcaattggctattgtaaatgcacaggtcaaatggccagcaggacccaagcctccatatccagaagctcttcatcagttcgtgtcatggatgcttcagccaacggcttccatgcggcccaggatagatgatatcattatccatgttgacaagttagttgcgaagttctctcaatgagttactatggaagtgagaagtggggcttgagatttttatgttgcagtcgtttaaaaaaattcgtgtgcatttgccgtccagttatatgttaatggatagaaaagcaatagcaattcctcgcctgacggagttaaccatatatttatatgtatcttcgattttggtggtagtctaggtagtcgggcgttggctttaaagtattgtttgtcatttctacataattttgtttcttgtaatttatgaaatggccaatctccctgtgtcttcagaatttatcagcataaatggaatatcatttatttattg

SEQ ID NO: 6938 - DNA, 1788 bp, Glycine max
  misc_feature (26)..(26): n is a, c, g, or t
  misc_feature (781)..(781): n is a, c, g, or t
cactcatttaaatctgtgactgtgtntgctgcttcccatataaaaaatatattggctttcttctagaccttagtgaagagtgtagagaatagtgaacaaatccgcattgaaattttgctcaaataacagaccaataaaggaaagttgcagctggttgggcattatatgcaattggtttgcccatactttggttcaaaataccactttaaccttgtgctgtcatttgcattctgctgatattaaatgtttgtagagcttctttggatcttgcttttgttagtctccaaatgaaatgccaaagtgttctaacaaaagaatccattaaattatttgattgctggtgcagagatatttttgcaacattgctttcatacttaaaaccatgtggaatcatgggaaggcatgcccttccttcgtttgatggcaactatagctttagggccatgcattatgtattttgattggttttgctatcctcgtattggaagcaagttaactaatttgtttggattttttcctttacaaatgaaggttgcaggtgatcttttgaaacaatacaagggaaagttcaaaggtggaactttcgcagtgacatggaactacttgagagaatccatgaatacttatctgtcacagccaaatccggttactgctcggtgggaaggcgaagaccatttacgagatcctaaatttcaattggatgcgttcagagtgagttttatcttgattgcatgactaatgatttaatatagtttatactgacataaatattaaatcaacntagttatttggattttcactctgcagggccggccagctagattacttcaaagtgttgctgtacgacttcgaaagcattctaaatctcttggggattttggtgcatggaatagatgtttgaatcaccttttgacacttgcagagtcacatattgagtcagtcatccttgctaaatttattgaagccgtgcagagctgtcccgatccaagctcccaagctgctctgaagctcgtctgtgatctttatgctctggatagaatatggaatgacattggaacctaccgaaatgttgactatgtggctcccaacaaagccaaggcaatccacaagctcgcggagtatcttagtttccaagtgaggaatattgcaagggaacttgttgatgcatttgatcttccggatcacgttacacgggcccccattgccaagcggtcaggggcctactcgcagtacacacaatatgtgggattttaaaaaaaggaacgcaaagaagattgatgtatttgcgggaattaacatgagaaaatattttcttggctcattgttgaaatttatatgctagtggttgctcctgaccaagaaactactacacacgaccagaaccataaatgaatgaaatgaagtttcagtcgaagatatcagtggaaagtgaaaattattttgtgaaaagatatacaaggttttttcttcaatatttttggaagccaaaagttaccttttgaattttaacattgattgattgcgaactatttgctcagcttctgcatgtaatggagcaatggtattaatcttgtggcatgggtaaaaattgtaaatttcttataatatctaaatcacacgaaaagtaccaagaatttagtccattagcctttgctgctattatgcagatggatactgtttcaatgtttcacgtacaaaaacagaaaaataaaaatggttaacagtgtctataacaaaaccatcagtgaagaagtatctcagattctcttcaagcaacatagtctttgc

SEQ ID NO: 6939 - DNA, 1106 bp, Glycine max
attattctgattttaagttgagtattatatcgtggtagctgttacgagtcagcaagagagaaatatcttgttgagttgatttctgatcccaaattgagtttgagtttcagccatggtatctgtttctctgctcttattcctatctttctttgccttctttgcaccctctgaatctcacgacaaagtctcgttggaattgtactacgaaagcttatgcccctacagcgccaacttcatcgtgaatcacctcccaaaaatcttcaccccagatcttgccccaatcgttcacctcaaactcgttccttggggcaatgccaaactccgtgccaacgccacctttgactgccagcatgggccatatgagtgcttgctgaacacagttgaagcctgtgcaattcacatctggcctcaactcagcaaacattttcctttcatctactgtgttgaggatctggtgtttcagagtaagcgtgaggaatgggaatcttgttttgagaaactggatcttgattcggaacctattaatcagtgttataatagtgaacatggaaaacagttggagctacaatatgcagctgaaacaagtgctctggagcctcctcacaagtatgttccttgggtagttgtggatggagaaccactctatgaggattatgagaacttcttaagctatctttgtaaggcttataaaggcactgttacaccccaaagttgcacccaagcatcatacctaagagaagtgaatgcaaagcctaagcattcggtttgctacaaggacagtgggattatgctaacatgggaaaaagtgaggtcaaccattgcatcatggatgcactagatgaatcttggcagtgcattttagatgtgccaatgctgcatttagtagcagtttgttcgtgttatcttgtgtgtagttgtgttgatccctccaaaagtgcaaatagaacttgtgatgcacataaaaccatatcgtactctcataaaaaaaataaaaccatgatgtgtatgtgtatgaggtacttaagtacaatatatatagagagagaaaaaaaaaagtaagtgcaattctataaaaaaaatattctcgtcaaaggaaaaaaaaaaaa

SEQ ID NO: 6940 - DNA, 769 bp, Glycine max
tcagctacgtaggcccccccccccccaaatatgttgaaatgaaagctataaaaggttgggccaggcagattcttcatggcttagtatatcttcacagtcacaagccgcccattattcacagagatttgaaatgtgacaacatctttgtgaatggaaaccaaggtgaagttaagataggggaccttggtttagcaattgtcatgcaacaaccaaccgcccaaagtgttattgggactcctgagtttatggctccagaactatatgaagaggcatacactgaacttgttgacatctattcttttgggatgtgcatattggagatggttactcttgaatatccctatagtgaatgccaaaatcctgctcaaatctttaagaaagttacctcaggcatcaaacctgcttcccttaataaggtgagtgatccccaacttaaggactttattgagaaatgtctggttccagcatctgagagattgtcagcagaggagcttcttaaagacccatttctacaagttgagaatccaaaggatcccatcctttatcctttacaaccgcctagccgaacactgagagcatattcattcaagtctggttctctatctatggacatggattctgactgcaaaccgttttctatgagtatctgttctgaaagcaaccaggaaaacccacattgtcctatttttggaagtgcgaggacctattagaaccaacagtttaagttgaaagggactaaaaatgatgttaattccacgttcattgaccc

SEQ ID NO: 6941 - DNA, 1559 bp, Glycine max
gcaccaggagagaacaacatgcgactttgtttttttaacgatgaaaacgaagtgtattgagtaatactccgttccctggttcctccatcgcgaaattagggttcgctcacttgtcttcaatttcccagattcacctagcaccatccataaatccccctattaacgtgtctttcggaccgatttttctacgtgacgcatcgcaattcttcagcggtttcgtttagggaacccgcgaaaccgaatcagatagtgcggcacggaaactaggaattaaagcaatggcagaagatctggtgctggatactgcaatcagagactgggtgttgatccctctctctgtggttatggttctcattggtgtgctccgttactttgtttctaagcttatgcactcttcacaaacccctgatgccaaaattgttaaagaagggcaagtgattgttagagctcggaatttacgtgctggggcgaatttcattccatccaaggcatttcgcgctcgcaaaatttatttctgtaacgaggaaaatggtctgttgtttgttccaaagggccagggccagaatccgcaagcacagatgttctctgatccgaacatggccatggatatgatgaagaaaaacctttcaatgatcattcctcagactcttacttttgcttgggtgaactttttcttttctggatttgtagcagccaagataccctttccattgacacagaggtttaggtcaatgctacagaatggaatagaccttagcaccgtagatgttagctatgtcagcagtcgctcttggtacttcctcaatctgtttggattaagaggattgtttagtctcatattgggtgaagaaaatgctgtagatgatacacaacgtatgatgcaaatgggtggatttggatttgatccttcaaagggtctgagtgctgagaaagacaatcttgacataacccagcatgactgggccttaccaaattttgagcagcgtgctgaagctgtgttgaggaaagttgccagttaaccatgttatggagtaggaagcttcattgctagcattagcaggatacacttactttctattgttgcggtaggaggtgtacctttttgcagaaaagatatcaaagatcttgttgagactgtagtcttgagactgaacattttgcaactatcagaaaacattgttcggttttgttgaagctagaactgaaactattcattcttgcttatttttctgaatgaccattgccataaaaagcatgaaggcttcccaggaaacgttgagtcctgtaatgtgtttcaaggcctattcaactattctatctgtatcccacatcccactcctagaattgtcccctaatatgttaaattaagaaatattacattcgcatctcttattctgcttttgttgcagaattagaatgcaggtgaggtgcacttgattataatcagatgctaaaaaattgtgatgtgatgtaatgcatgctcaaattaccaaaagccgaaagaatgttttaaaatttgaattgagtgattaaaatggcaaaaaaaaaaaaaaaaaaaa

SEQ ID NO: 6942 - DNA, 1657 bp, Glycine max
ggctcgacttcacgctgacacacactacacaaacccctaaccttccttccttccattcactactactccttcactttacttcaaaatttcacccttccaaatccccaacttttacaattttactattagaatttaccatctctctttctcttcctcaatccaatccaatccaatcccctctcaatcgaagcaagaaaaccatgtatttatcggagaagcctcgtcccatcgatttctacaaggaggaaggcgcgcgcgacatgatgatcgaggtcgtctccaacggcgacctccctcctccgccgccgccgccgccgatgattctcggcgagagcagcggcgaggaccccgaggtcgagatcaaggccccgaagaagcgcgccgagacctgggtccaggacgagacgcgctctctcattggccttcgccgcgagatggacgcgctcttcaacacctccaagtccaacaagcacctgtgggagcagatatcggcgaagatgagggagaaaggtttcgatcgttctccaaccatgtgcaccgataagtggcgcaacctcttgaaggagttcaagaaggccaagcaccaggaccgagggagtggttccgccaagatgtcgtattacaaggagattgacgagatcctcagagagaggagcaagaatgtgcagtataaaagccctactcctccgcccaaggttgattcctttatgcagtttgctgataaaggtattgacgataccagcatctcttttgggcctgttgaagctactggaagaccaacactgaatcttgagagaagtttggatcatgatggacatcctcttgccattaccacagctgatgctgttgcagcaagtggagtccctccttggaattggagagagactcctggaaacggtggagaaagtcagtcatgttgtggaagggttatatcagttaaatggggtgattatacaaggcgaataggtattgatggcaccccagaagccattaaagaagcaattagggctgcttttaggttgagaactaaacgtacattttggttggaggatgaagatcagattatcagaagtattgaccgtgaaatgcctttaggaaattacactcttcacattgatgaaggaatggccattaaattacctctctatgatgagcctgaccatatacctgtgcatactgaagataagatattttacactgaagacgatttccgtgattttctgacccgccggggttggatatgtctaagagaatttgacagctacagaaatattgacaacatggatgatcttcgacctggtgccatatatcgtggtgtgagttgaaagcaggtacatggtgtggtcaatgttcagctaccataaaatgtctggagaactgtggtggggactgttcagatctttgatgtatgtgcggcactaacctggaattgtatttgttttaagttttgataatgctgtttatagttttatataggaaaaggaactagtccctttgcacaaattccgttccaatcattggccttaacatgtctgtaaatatgcatttgcagtgagaacatattgtctaattttatagtggatcattttcatcactcttaactctatgtagctaagttggacagatgcatattatgaagcacacacctttcttgttc

SEQ ID NO: 6943 - DNA, 1369 bp, Glycine max
cagacacgtccccctcttcctcatcacccctctctcttttgtttccaccgcatccaaaccaaacgctgacataaacacactgcacaaacccctaaccttccttccattcactactcctccttcacttaaaaaatttcagccttccaaatcctcaacttttacaattattacaatttagcatcactctttctcttcctcaatccaatcccctctcgatcgaaccaagaaaatttaagaacccaaaccatgtatttatcggagaagcctcgccccatcgatttctacaaggaggaaggcgcgcgtgacatgatgatcgaggtcgtctccaacggcgacctccctcctccgcctcctccgccgcctccgccgatgatcctcggcgagagcagcggcgaggaccccgaggtcgagataaaggccccgaagaagcgcgccgagacctgggtccaggacgagacgcgctccctcattggccttcgccgcgagatggacgcgctcttcaacacctccaagtccaacaagcacctgtgggagcagatatcggcgaagatgagggagaaaggtttcgatcgttctccaaccatgtgcaccgataagtggcgcaacctcttgaaggagttcaagaaggccaagcaccaggaccgagggagtggttccgccaagatgtcgtattacaaggagattgacgagatcctcagagagaggagcaagaatgtgcagtataaaagccctactcctccgcccaaggttgattcctttatgcagtttgctgataaaggtattgacgataccagtatctcttttgggcctgttgaagctgatgctgttgcagcaagtggagtccctccttggaattggagagagactcctggaaacggtggagaaagtcagtcatgttgtggaagggttatatcagttaaatggggtgattatacaaggcgaataggtattgatggcaccccagaagccattaaagaagcaattagggctgcttttaggttgagaactaaacgtacattttggttggaggatgaagatcagattatcagaagtattgaccgtgaaatgcctttaggaaattacactcttcacattgatgaaggaatggccattaaattacctctctatgatgagcctgaccatatacctgtgcatactgaagataagatattttacactgaagacgatttccgtgattttctgacccgccggggttggatatgtctaagagaatttgacagctacagaaatattgacaacatggatgatcttcgacctggtgccatatatcggggtgtgagttgaaagcaaggacctggggggggcaatggtcaacttccattaaatgtgcggaaaactggggggggga

SEQ ID NO: 6944 - DNA, 1386 bp, Glycine max
  misc_feature (2)..(2): n is a, c, g, or t
tnaaaatcactgactactgttgtggacacagcgaagagaaatgaaattgcctctttcaagaagcatctgagtgtttactattttgtactatatttatatatagtcactcaagcttctaggatttctgcctgctgcatcaaaatgggaagcaacttgaggtttttgagtctttgcctcttggcattgattgcatcaactcatgctcaacttcagcttggtttttatgctaacagttgcccaaaagcagagcaaattgttttgaaatttgttcatgaccatatccacaatgctccatcactagcagctgcattaataagaatgcactttcatgactgttttgtaaggggatgtgatgcatcagtccttctgaactcaacaaccaatcaggctgagaagaatgctcctccaaatctcacagtaagaggctttgacttcattgacagaataaagagccttgttgaagctgaatgccctggtgtggtctcttgtgctgatatcctcactttggctgccagagacactattgtagccacaggtggacctttttggaaagttccaactggtcgaagggatggggtcgtctctaacttgacggaagccagaaataacattcctgctccatcttccaactttaccaccctacaaacactctttgctaaccaaggacttgatttgaaggacttggtcctgctctctggtgctcacacaattggtatcgctcattgctcatcattatcaaaccggttgttcaatttcactggcaagggtgatcaagacccgtcactagatagtgaatatgctgcaaatttgaaagcattcaagtgcacagacctcaacaagttgaacaccacaaaaattgagatggaccctggaagtcgcaagacatttgatcttagctactatagtcacgttattaagagaaggggtctatttgagtcagatgctgcattattgactaactcagttacaaaggcacaaatcatccaattgcttgaagggtcagttgaaaatttctttgctgagtttgcaacctccatcgagaaaatgggaagaattaatgtaaagacagggacagaaggagagatcaggaagcattgtgcatttgtaaatagctaagaatcttgtcttgttcatggatgaatcttgtatcatttattttttgggtttggttatttatgctatgccatgtttttttgattagttatgctatgccatgtggtctctgtctacatacgtgtgatcctttatggtatggttgttgtatgtgtgttggaataagtgggctcttaagttattcatatttccaactttccaactttgctggtagatcatgctcttgtaataagaaccagaattttttgtgctacccacagctgagttaattta

SEQ ID NO: 6945 - DNA, 800 bp, Glycine max
cggaccagatactgttcttcatagataaccatgatattcatagaccagaaaaatgaatacacaatgttattaacagggaataaacagtttatcttacaatttcacttctggtcataacatgaggaactacaatgaagtaggagaaacaatgacaaatttcaaatggttgaaggtaagaacatcctgtacaagatgacaatcacaaaacatgaacgaaccaacacgaagagcggaatgaatagaatggggagcagaaaggaatgctaccagttctccttaacaatttttgacttttcaagtatgaactttccttccttgtacttctgggatgcttcataagctctttcatacttccaacccaacacttcacggcaatcgccacaataaacatcagcaacagtatggaggccagtcaagagatgcctgtcttcttttggccccgtgacaatattcattgcatgggaaaacagaaaggctcggccgtttcttccatgaaaagccttggaaataatatcatcatggagtgagacatggtttctacaattagagcagctgtacaagcgaggccctatcagttccgccatgaatttggtcaaacaaatttcagattaaacacctcactacagcaagctcaatgatgacccgaaagtctgcaacaataagataagaagaaatatatggcgttagttagcgtgcaagagtaggcttgatcacaaaaatatgaatgaagattccccattccgggcatgaaaaaaaatacactatatatggtcccccttctgtcgtcttctcgcagccgt

SEQ ID NO: 6946 - DNA, 706 bp, Glycine max
acttctgtgatgcttcataagctctatcatatttccaacgcaacacttcacggcagtccccccaattaacatcagcaacggtgtggaggccagtcatgaggtgcctgtcttcttttggccctaccacaatattcattgcatgggagaacagaaaacctcggccatatcttccctgaaaggttttagcaattatatcatcgtgaagggagacttggtttctacaattacaacagcagtacaagcgaggccctacaatttccgccattaatttgtcaacaattgcacactaaacacctcgctgctctgaaatgaaaaaggaaaaaaaaaaaacaataaaaagctaaaatctcagttagtctagagtgcgaacagcacacaagaggtttagatctgcaacactaaaagaaacaaagtggggcgttagtgggaaagcaacgagatttctttacctgcaaccaacaaacgatgacccaaaacaaagattcgcaacaataaattaaggtaaaagaaaaagaaatgttcggcgcacaagtgtatgcataatataataatattctgaataaagaagaataaaataaaaatacaaaaccaatttcattcatcaagttcactgtcgcatcgatttgacggggtgaaatcaaataggtaaaaaaaaaacaagaatgaaactgtttagccgtacttgccaatcaactgaacgcaaatt

SEQ ID NO: 6947 - DNA, 925 bp, Glycine max
accagaactagtctcgcgtttttttttttttttttttacagacataataacattaatttataaaattcatcatataaagagttacgatcttcacaaagttccaaattttaaaaataggttacaagttgaataaatatacaattttatagacaaggaataaagatacgacattaagaccatcctgtacgacaaatcttacatcacttctactcacaccaccaggtaataatgaaattaaaaaaacaatgacaaattttagataggtaaagatacgacattaagaccatcctgtacgtcttaaaagcatgaaagaactgagcaaacacatgactggaacgaatggattaaggagaatcctaaatgaatgctaccagttctcctttacaatttttgatttttcaagtatgaattttccttccttgtacttctgtgatgcttcataagctctttcatatttccaacccaacacttcacggcagtcaccacaataaacatcagcaacggtgtggaggccagtcatgaggtgcctgtcttcttttggccctaccacaatattcattgcatgggagaacagaaaacctcggccatatcttccctgaaaggttttagcaattatatcatcgtgaagggagacttggtttctacaattacaacagcagtacaagcgaggccctacaatttccgccattaatttgtcaacaattgcacactaaacacctcgctgctctgcaaccaacaaacgatgacccaaaacaaagattcgcaacaataaattaaggtaaaagaaaaagaaatttccggcgccctcgcgcagccgtaatataataatattctgaataaagaagaataaaataaaaatacaaaaccaatttcattcatcaagttcactgtcgcatcccccttctgtcgtcttctcgcagccgta

SEQ ID NO: 6948 - DNA, 1767 bp, Glycine max
gttttttttttttttttttgacaaggaataaagatacgacattaagaccatcctgtacgacaaatcttacatcacttctactcacaccaccaggtaataatgaaattaaaaaaacaatgacaaattttagataggtaaagatacgacattaagaccatcctgtacgtcttaaaagcatgaaagaactgagcaaacatttttttggaacgaatggattaaggagaatcctaaatgaatgctaccagttctcctttacaatttttgatttttcaagtatgaattttccttccttgtacttctgtgatgcttcataagctctttcatatttccaacccaacacttctctcgagaaatgaaattgcctctttcaagaagcatctgagtgcttattatttgtaatatatatagtcactcaagcttctaggatttgtgccagctacatgaaaatgggaagcaacttcaggtttttgagtctttgcctcttggcattgattgcatcatctcatgctcaacttcagcttggtttttatgccaagagttgcccaaaagctgagcaaatcattttgaaatttgttcatgaacatatccacaatgctccatcactagcagctgcattgataagaatgcacttccatgactgttttgtaaggggatgtgatggatcggtgcttctgaactcaacaaccaatcaggctgaaaagaatgctcctccaaatctcacagttagaggctttgacttcattgacagaataaagagccttgttgaggctgaatgccctggtgtggtctcttgtgctgatatcctcaccttggcttccagagattcaattgtagccacaggtggaccctattggaaagttccaacaggtcgaagggatggggtcatctctaacttggtggaagccagaaataacattcctgctccatttgacaacatcactacgctacagacactctttgccaaccaaggacttgatttgaaggacttggtcctgctctctggtgctcacacaattggtatcgctcattgctcatcattgtcaaaccgcttgttcaatttcactggcaagggtgatcaagacccatcattagacagtgaatatgctgcaaatctgaaaaccttcaagtgcaaggacctcaataagttgaacaccaccaaaattgagatggaccctggaagtcgcaagacatttgatcttagctactatagtcacgttattaagagaaggggtctatttgagtcagatgctgcattgttgactaattcagttacaaaggctcaaatcattgaattgcttgaagggtcagttgaaaaattctttgctgagtttgcaacctccatagagaaaatgggaagaattaaggtgaagacagggacagagggagagatcagaaagcattgtgcatttgttaatagctaagaatcttgtcttgttcatggatgaatcttgtatcatttattttttgggtttggttatttatgcgatgccatgttttttgaatagttatgctatgccatgtggtgtctggctgcatatgagtgatcccatatggtatggttgtagtatgtgtgttggaataagtgggatccattgtaattcttattttcaacttcgttggtagatcatgctcttgcaataagaagcagaatttcttgtgctacccacaacagagttgatgtatgtttagtcttttatccccattttttttgtattgatgtactttttcattgttattctcaattcaatgcatttttttgtttaattg

SEQ ID NO: 6949 - DNA, 1356 bp, Glycine max
tcgcgatcggacgccccacgcgtccgctctttcaagaagcatctgagtatttactattttgtactatatatatatatatatagtcactcaagcttctaggatttgtgccagctacatgaaaatgggaagcaacttcaggtttttgagtctttgcctcttggcattgattgcatcaactcatgctcaacttcagcttggtttttatgccaagagttgcccaaacgctgagcaaatcgttttgaaatttgtccatgaccatatccacaatgctccatcactagcagctgcattgataagaatgcacttccatgactgttttgtaaggggatgtgatgcatcagtccttctgaactcaacaaccaatcaagctgaaaagaatgctcctccaaatctcacagtaagaggctttgacttcattgacagaataaagagccttgttgaggcagaatgccctggtgtggtctcttgtgctgatatcctcactttgtctgccagagacactattgtagccacaggtggaccattttggaaagttccaacaggtcgaagagatggggtcgtctctagcttgacggaagccagagataacattcctgctccatcttccaactttaccaccctacaaacactctttgccagccaaggacttgatttgaaggacttggtcctgctctctggtgctcacacaattggtatcgctcattgctcatcattatcaaaccggttgttcaatttcactggcaagggtgatcaagacccgtcactagatagtgaatatgctgcaaatttgaaagcattcaagtgcacagacctcaacaagttgaacaccacaaaaattgagatggaccctggaagtcgcaagacatttgatcttagctactatagtcacgttattaagagaaggggtctatttgagtcagatgctgcattattgactaactcagttacaaaggcacaaatcatccaattgcttgaagggtcagttgaaaatttctttgctgagtttgcaacctccatcgagaaaatgggaagaattaatgtgaagacagggacagaaggagagatcaggaagcattgtgcatttataaatagctaagaatcttgtcttgttcatggatgaatcttgtatcatttattttttggggtttgattatttatgctatgccatgttttttgattagttatgctatgccatgtggtctctgtctacatacgtgtgatcctttatggtatggttgttgtatgtgtgttggaataagtgggctctattgttattcatatttccaactttgctggtagatcatgctcttgtaataagaaccagaattttttgtgctacccacagctgagttaaaa

SEQ ID NO: 6950 - DNA, 711 bp, Glycine max
ttttttttttttttttgtttttcatagataaccatgatattcgtagaccagaaaaatgaatatacaatgtcattaacagggaataaaaagtttctcttacaatttcacttctggtcataacatgaggaactacaatgaagtaggggaaacaatgacaaatttcaaatggttgaaggtaagaacttcctgtacaagatgacaatcacaaagcatgaatagaatggggagcagaaaggaatgctaccagttctccttagcaatttttgacttttcaagtatgaactttccttccttgtacttctgggatgcttcgtaagctctttcatacttccaacccaacacttcacggcaatcaccacaataaacatcagcaacagtgtggaggccagtcaagagatgtctgtcttcttttggccctgtgacaatattcattgcatgggaaaacagaaaggctcggccgtttcttccatgaaaagccttggaaatgatatcatcatggagtgagacatggttcctacaattagagcagctgtacaagcgaggccctatcagttccgccatgaatttggttaaggaaatttcagattgaacacctcactacagcaagctcaatgatgacccgaaagtcatgagtgtggggtgttcccgagaagaaggaaatatggcgttagttagcgtgcaagagtaggcttgatcacaaaaatatgaatc

SEQ ID NO: 6951 - DNA, 1637 bp, Glycine max
aattcgcctcccccgcaaacgcaactcagctttccttcgatccctgaatctggacgttactaaagcagcccagccatccacgcaccattttaaaagccaacacagaaagcacagaaccaccacatcgttgccttcctctaaacgataaatttttgggattctgaaactagtgatacattttcttgcatgaaggcagcgtattgaggaattcagttagtgtattggaagatctagttcaacatgtcttctgtaagcaagggtgataggaaggcttccattgatgcagcatcatggctgttcaatgtggtcacgtctgtgggaattattcttgtcaataaggccttgatggctacatatggttttagttttgctacaactttaactggtctccattttgccacgacaaccttgttgacactcattcttaaatcgttgggatatatccagacctctcatcttccattatctgatataatcaaatttgtcttgtttgcaaatttctccattgttgggatgaatgtgagtttaatgtggaactctgttggtttctatcagattgctaagctgagcatgattccagtatcttgcttcctggaggttgtcttggacaatgtacgatattcaagggacacaaagcttagtattgttttggttttgctcggcgttgctgtctgtacagtcactgatgtcagtgtcaatgcaaagggtttcatagctgctgtaatagcagtttggagcacagccctgcaacagtattacgtgcattttcttcagaggaagtattctattgggtcatttaacttgttgggccatactgcaccagcacaggcagcaagtttacttctagtaggcccctttatggactactggttgactggcaaacgagttgatgcctacggctatggtttgacatccacgttgttcatcattctgtcttgcactatcgcagtagggacaaacctcagccagttcatctgcattggtaggttcacggctgtaacgttccaagtccttggtcacatgaagactatcctggtcctgatcttaggattcattttctttggaaaagagggtctcaatctacatgttgttctaggcatgatcatcgcaatagcaggaatggtttggtatggcagtgcttcttccaagccaggggggaaagagcgtcgtagcttttccctccccaaaacacaagattatagttcactacctgtgtcctctgaaccagatacgaaggaatagaaaataatagaaactaattagagaaaaagtgatgaaacttctggtgaactgcatgaaaaaaatcaggtgcccattaggcgagctggttcattttctttataccaggagtgaattcccaattatttatagatcatggttatatcttttcttatgtgttaatgaattgtttgggaaagaaatgagaggaaacagcgttaagggatggaaaaatctacgttatgttcctttttttttatgacagaaaatgttactgttacttttatagtaaaagtttaattccatttttcccattagggttggttccgttgttaccttctactcatgacaactattagcatgtttggattacctagttatgaaatgttttactctataaaatacttttgaaagtttta

SEQ ID NO: 6952 - DNA, 727 bp, Glycine max
aaacgagttgatgcctacggctatggtttgacatccacattgttcatcattctgtcttgcactatcgcagtagggacaaacctcagccagttcatctgcattggtaggttcacggctgtaacgttccaagtccttggtcacatgaagactattctggtcctgatcttaggattcattttctttggaaaagagggtctcaatctacatgttgttctaggcatgatcatcgcaatagcaggaatggtttggtatggcaatgcttcttctaagccaggggggaaagagcgtcgtagcttttccctccccaaaacacaagattatagttcactacctgtgtcctctgaaccagatacgaaggaatagaaaataatagagattcattagagagaaagtgctgaaacttctggtgaactgcatggaaaaatcagatgcccattaggcgagctgattcattttcttcacaccaggagtgaattcccaattatttatagatcatagtcatatcctatcttgtgtgttaatgaattgtttgggagagaaatgagaggaaacagcgttgttaagggatggaaaaatctacgttatgttccatttttttaagacagaaaatgttactgttacttttatagtaaaagtttaattccatttttcccatcaaagaaaattccgacagcccccgggatccactagttctagagcggccgccaccgcgtggagtccagtttat

SEQ ID NO: 6953 - DNA, 1485 bp, Glycine max
cgcgttcaagagtggtgagctgcataataaattgagactcagctacgtaggccccccccgtctctattccatcatcaatcaatggagaacaccgagggatccagatctgcgacgaacggggtgctgcctctggcgcgcaaggtggcattgattaccggaattaccggccaagacggttcgtacctgacggaattccttctagacaagggttacgaggtgcacggtctgatccgtcgctcctcgaacttcaacacgcagcgcatcgaccacatctatgtggatccccacaacgcccacaaggcccgcatgaagctccactacgccgatctctccgacgcctcctccctccgccgctggctcgacaccatcctccccgacgaggtctacaacctcgccgctcagtctcacgtcgccgtctccttcgagatacccgactacaccgccgacgtcgtcgccaccggcgccctccgcctcctcgaggccgtccgttcccacatcgccgcctccggccgctcccacatccgctactaccaagccggctcctccgagatgttcggcgccacccctccgccgcagtccgaaaccacccccttccacccccgctccccctacgccgcctccaaatgcgccgcccactggtacaccgtgaactaccgcgaggcttactccctcttcgcctgcaacggcatcctcttcaaccacgagtccccccgccgcggcgagaatttcgtgacccgcaagatcacgcgggccgtgggccgcatcaaggtcgggctccagagcaagctcttcttgggcaacctccaggcctccagagattggggcttcgctggggactacgttgaagccatgtggctgatgctgcagcaggagaagcccgatgactatgttgtggccactgaagagtcccacaccgtggaggagttcttggaagtcgcgttcggctatgtgggactcaattggagggaccatgtcgtcattgacaagagatactttcgcccctctgaagtcgataacctcaaaggggacgcttccaaggccaagaaggtgcttggttggaaacctaaagtggggtttgagcagcttgtgaagatgatggttgaccgggacattgagatggctaagaaagagaaggttcttgttgatgctggctacattgatgctcagcaacaaccttgaatctcatctgcaacttgaggaagagggggttttgctgttttgatcatataatgccgttgacatagtttagtttatgggcaatttatgttgttttcttgttgcaactgttatttcctagatgtgcatttgtcggatttcttcttcttgtaagcccgttgattcattcaattaaaagctatatacatctacgcccattttcttgtagaaaaaaaaaaataaatccagttgttctgtttcttccttggtttctcctatatttcactccctggattggaaaacaaaatggttccaatgggagtatcaagt

SEQ ID NO: 6954 - DNA, 1181 bp, Glycine max
  misc_feature (30)..(30): n is a, c, g, or t
gtgtggtagttattcaataaaatgttcagnttaagactttattttctttagaatgatgagaaaaaatattgagcgtaaggagaaggtgctgttgggtggggcagaggatgaatcgtccaccgtttcagacaacagcttcagcacttgttcatatcccgatacagagaggtacaggtcggaagagtacatggaagggaaagatctgctggataggtgcgataagcttctcaacagcatcgcagaaataacagcggccaacgagttgcaaccaagtccagtatcggttcttgactcatccttttacaaggatgagtgggcttcaccatccccgataaccaaacgctgcattgattacaaagatcatgcggcggaatcagaagatgatatgtggagtgcagcattgtgcagcagcgaggaggcagcgtcggaggattgtgatttcgcttacgtgtgggagattctgcgagcttgcacttacttgccggaagagagcgacattttcctgttactggagaagcagcaatgtctgaaggggaaagacacctcgaaggcttcgacgctgcagaggaggttgattttcgacacactccaggagatcttgaaccggaaccagcaattgccgccgtggaaggcggtatcgtgcggcgagcagaggcagcagatctggtcggagtttcggaggatccgagagagggaggaagcggagtcggaggacttgtttaaggtgatatgcggagtgttgaagaaggacatggcggatgagatgcgtgggtggggagaatggccggtggagatgggagatgtcgtgttggacatcgaacgtctcgtgtttaaggatcttgttggcgaaaccattcgagaactcgcttcgttttcccctcaatctcaatgtaacaacaagctactactacccgcgcttcgtaggaaactcgtcttttgaatttccaaccacaaacatcaaaaacaaaacgagaaaaagaaaaaaagtcgcacgctttgtttaaattttcgcgcgcttgcctttttttaatttttcttttcctttttttggctagctttcttattattttacttttactctctgtcaatgacgaaatcgggaaactttaaatctaggcgaaatctgaccgtggctatcttcaatatagagatgaatgaatgaatgaatgaagtgttggctt

SEQ ID NO: 6955 - DNA, 1592 bp, Glycine max
atatgaaatatgtttgtctccaagaataataaaaatttagaaagaaaaacagaatttgatggtgaaatgtattgtaggaattgcatttggtggaaagaatgtaacccgtgtgacataagtggccgcacatttagagaactagccacttctatataagaataacattagcaggcaaaggccttatctggcaccaaacatgagttctctgaatcttggaacatggcctcgtcccacctctatgttgaacacaccttcacatctccttcccccttttcacactctcactctcacaacaacgcttcccaaactcgcaagtggaaccccaaaactaatatcttcttttcccctcgtctctgctgtgcccactaaggaacacacagtcacaacccaggaaattcaactccaagacacgccgctcaacttcgatttcaagggctacatgatcgccaaggcccacacggtaaaccaagccttggacgccgccattgcgttgagggacccacacaagatccaccaagccatgcgctactccctcctcgccggcggcaagagggtccgccccgtgctctgcatcgccgcatgcgagctcgtcggtggcacagaggccaccgccatccccgccgcctgcgccgtcgagatgatccacaccatgtcgctcatccacgacgacctgccatgtatggacaacgacgacctccgccgcggaaagccgaccaaccacaaggtctacggcgaggacgtggcggtcctcgccggcgacgcgctcctcgccttcgcgttcgagcacgtggcagcgtccacggagggagtgtcgccgtcacgcgtggttcgagcgattggggaattagcgaagtcgatcggtacggaagggcttgtggcgggacaagtggtggatatagattcggagggggtggcgaatgtggggctggagacgctggaattcattcacgtgcacaaaacggcggcgttgctggaagctgcggttgtgttgggggcaatagtgggaggtgggagcgacgaggaggttgagaaattaaggaagttcgctaggtgcattgggttgttgtttcaggttgtggacgacattctggatgttacgaagtcgtcggaggaattggggaagacggcggggaaggatttggtggctgataaggttacttatcccaagctattggggatagataagtcaaaggaatttgctcaagaattgttaaaggatgccaaggaacaattgtctggcttcgatcctccaaaggcggctcccttgtttgcattaaccaattacattgcttataggcaaaattaaaagtgaaaacattggataccctgttttctcaccggggaaccactcaaataaatttctctgcttccatttccagtcctcaatgctgtactgttctccagcgattatttgtaataaaataaacctctttttttcaaaaaaaaaattaaaaatttgcgctgcagctcttggctctttctatcgtctgcttttcgaattttggacaggatatattctactatctgccttcggcaggctccagtccttaacattatctctttggaaaatgaaatgtgttgttggatttaaa

SEQ ID NO: 6956 - DNA, 1101 bp, Glycine max
ggctcgaggttctggtgatgcttccactggctctagtaggagtttaaatgctctggctagtgcctacagtggtggacaggggagagtcaacaatggtgatagattacagaatcgtggctctgctcgggcagctcctgtttggcttgaaactggtgacgcagttgcaaatatgtattctgagctgcgggaggaggctcgtgatcatgcacgtttgcgtaatgcatattttgagcaggcacggcaagcctaccttgttggcaacaaggcccttgcaaaggagctaagtgttaaggggcaactgcacaacgtgcatatgaaagcagcacatggaaaagctcaagaatctatttatcgccagaggaatcctgttgctccagagaatggaagagggccccaaagaatgatagacctacatggtctgcacgtaagtgaagcgattcacgtgctgaaacacgaactgagtgtgctacgaagcacagccagagcccccgagcagcgtttgcaggtttacatctgtgttggcactggtcaccatactcggggctcccgcactcctgcgagactcccaatagctgtacagcgttatcttctcgaagaaggccttgatttcactgaaccgcagccgggcctgctttgtgttgtgatatactgaaccaaggagatatacaagtttctgacacggtaaaaaaattcatcatgaacacatagacattgtagtcattcttgtatctgtatatgggaagtaatggcaatggtcaagtcaaaaagaaaaatgaaaaaaaagaggttttacgggttgagaaaaaagaggttttacgggttgaaaaaaaatggaaaaggttagaagtaaagagaagggttgtagcagaattgtaccattaaggtttcagaggcatctgaacacattagtcagtcagcaggaactccacttcagcatttaccttctgttaattttgtaccctaattttcatttctttgttaaattcctttttttttaaattcagatgtaactgatagaactcaattacatgatagaacaattcactttgccaattagattcaatgccaatttacagctcggaacaaaaaaaaaaaaaagaa

SEQ ID NO: 6957 - DNA, 1047 bp, Glycine max
ttcctttcgtccgtttaaatttaattttgattcctaatcatcattttcccttctttttattctctgcacaacaattcgagattccaaccatcgatctcaattttcaaccttaacctctaagaatgtcttacgcttatctcttcaaatacatcatcatcggtgacaccggagttggaaagtcttgtcttctacttcaattcacggacaagcgctttcagcccgtccatgacttgaccatcggtgttgaatttggtgccaggatgatcacaattgataacaagccaatcaagttgcaaatatgggatacggctggtcaagaatcattcagatctattacaaggtcttattacagaggggctgcaggtgcattgcttgtttatgatataaccaggagggagacatttaatcatttggctagctggttggaagatgcaagacagcatgcaaatgcaaatatgactattatgctgattggcaacaagtgtgatcttgctcatagaagggctgtaagcacagaggaaggcgagcaatttgcaaaggagcatggattgatcttcatggaggcctcagcaaaaactgctcagaatgttgaagaggcattcataaaaacagctgcaaccatatacaaaaagattcaagatggagtttttgatgtatcaaatgagtcttatggaataaaagtaggatatggtggaattcctggaccttctggaggtagggatggcccttctgcttcggctggaggctgctgcagttgaagaacctatccaaacctatctgcgtcaatgtagtcctttatgtcttctcttcttttattttgggtttggatatgaagatatatatgttctacttccattcataaaatcagataattgtataatgttttctttttaatcttgactttgttttgttgacctgaactgattatttgtctatatttgtgtgcatagttaaattgatctgttgcttcattttcataaaaaaaaatactgtgttagttaattgatctgttgtttcgttctaaaaaaaaaaaaaaaaaaaaaaaaa

SEQ ID NO: 6958 - DNA, 2476 bp, Glycine max
gggaagttagagaaagaacaaagaaggggaaaaataactgataactgagataacaataccatccacgcgccccgatagttccgagctccattcccagaaaaaaaaataaaactttgcttcgctttttctcttcattgtttttcttcctcttctacccctttgatctcatgcaatctcccctcatggatccctttgatttgattcgcaaagggtttggctgaagctatctggaatatttgtgttacatttttggaggtccatctatgttttagtcattttgtccatattcttgtcaataatgagcttatccaagaaaggttcccaaacagacacaaaactgagctccttaaacaaagcaacctatttgaatccaaatgcagcagagtttgttccatttgccctcagatcatcgccatctggaagcaccagctcggtagatgcagcagcgaggtttactactgctggatctcttgggaaagcagttttagatcgatcagaatcatccatttcaaataattccgatgatgaggctcaccagtactggcgttgtcagcttcctgatgatatcacccctgacttcaaggtcatggggagaggacgaatcccaaggtcttaacaacctctctttagcaggcttatctataaatgatgataatgaatcctcaatgtttccttcttctaagggaagtagatatatactaaatgagcagctggaactgtctccacagcaccttaatggcaatacttttgctgataaattaaggttttccaattcaacctacagggaggagccatcttcaggaagcattttgaactcatcagcaaagccttgggataggcaaattgggaataccgatttgcacgttaccagtggtcaagaggaacttgtttatgatgtcagctccggacgccccccccccccccctgtttttgcagggaattctcttgtgaatgatacagatttgaaccctttggagtttttagcttctctattccctggttttgcttcagaaagccttgctgaagttttcttcgcctatgcatgcgatttacatctgaccattgagatgctcactcagttagagattcaagttgatggtggcttcaatcagaatccgagtccaaagactctgtcatctcccaatctgagtgcaatggactttccagctcttacatcatcaaatgggcagaatacttcaaaatatgctgcagataatgttcaacaaagtggcattccatacatatcatctgataaagacatgctcatgttcaaatctggctcttctattccatctagaggttctgttgactttgcttcagcagtcagaaaattggcttctcaggattctggtatatggaagtatgataaaaatggttctggtgatgcttccactggctctagtaggggtttaaatgctctggctagtgcctacaatggtggacaggggagagtcaacattggtgatagattacagagtcgtggttctgctcgggcagctcctgtttggcttgaaactggtgacgcagttgcaaatatgtattctgagctgcgggaggaggctcgtgatcatgcacgcttgcgtaatgcatattttgagcaggcacgacaagcctaccttattggcaacaaggcccttgcaaaggagctaagtgttaaggggcaactgcacaacatgcatatgaaagcagctcatggaaaagctcaagaatctatttaccgccagaggaatcccgttgctccagagaatggaagagggcaccagagaatgatagacctacacggtctgcacgtaagtgaagcgattcacgtgctgaaacacgaactgagtgtgctaagaagcacggccagagccgctgagcagcgtttgcaggtttacatctgtgttggcactggtcaccatactcggggctcccgcactcccgcaagactcccgatagctgtacagcgttatctacttgaagaagaaggccttgatttcacggaaccgcagccaggcctgcttcgtgttgtgatatattgagccgaggaggtatacaagtttctgacagtaaaaaaaaaatccatcatgaacacagacattgtagtcattcttgtatctgtatatgggaagtaatggcaatggccaagccaaaaagaaaatggaaaaaaaaaagaggtttggggggttgaaaaaaaactggaaaaggttagaagtaaagagaggggttgtagcagaattgtaccattaaggtttccgaggcatctgatcacattagtcagtcagcaggaattccactttagcatttaccttctgttaattttgtaccctaattttcatttctttgtcaaattcccttctttttttttggattcagatgtaactgatagaactcaattacatgatagaacaattcactttgccaattagattcaatgccaatttacagctcggaacaaatgttcaagcagctcgggttttaatttaaaaaaaaaaaa

SEQ ID NO: 6959 - DNA, 1492 bp, Glycine max
tcgctttgcttgctcgagctggaactgtttataatttcattttgactctctctctctctctgattgcttccttttcccttttattttgctctcttctctgcacaacaattccttctcattccagatattccaaccatcgaccgatctcaattctcaaccttaacctctcagaatgtcttacgcttatctcttcaaatacatcatcatcggtgacaccggagttgggaagtcttgtcttctacttcaattcacagacaagcgctttcagcccgtccatgacttgaccatcggtgttgaatttggtgccaggatgatcacaattgataacaagccaatcaagttgcaaatatgggatacggctggtcaagaatcattcagatctattacaaggtcttattatagaggggctgcaggtgcactgcttgtttatgatataaccaggagggagacatttaatcacttggctagctggttggaagatgcaagacagcatgcaaatgcaaatatgactattatgctgattggcaacaagtgtgatcttgctcatagaagggccgtaagcacggaggaaggcgagcaatttgcaaaggagcatgggttgatctttatggaggcctctgcaaaaactgctcagaatgttgaagaggcattcataaaaacagctgcaaccatatacaaaaagattcaagatggagtttttgatgtatcaaatgagtcttatggaataaaagtaggatatggtggaattcctggaccttctggaggtagggatggcccttctgcttcggctggaggctgctgcagttgaagagaacctatcagaacccatctgcacccatgtagtcctttatgtcttctcttcttttattttgggtttggatacccccctatatacgttctaaacgtccattcataaaatcagataattgtataatgttttctttttaatcttgactttgtttcgttgacgtgacctgatcatttgtctatatttgtgtgcatagttaattgatctgttgtttcatttttaaaaaaaaaacaaaccccaaaaaaaatcgaggtggtcaagaggcacttgtttatgatgacaacactggacatggattcttttaatgatgttttcgctgggaattctcttgtgaatgatactgatttgaaccctttggagtttttagcttctctattccctggttttgcttcagaaagcctttctgaagttttctttgccaatggatgcgatttacatctgacaattgagatgctcactcagttagagattcaagttgacagtagcttcaatcagaatccgagtccaaagactctgtcatctccgaatctgagtgcaatggactttccagctcttacttcatcaaatgggcagaatgcttcaaaatatgctgcaggatacgttcaacaaagtgggcaatcctacttatcatctgataaagacatgctcatgttcaaatctgggtcttctatcccatctagaggt

SEQ ID NO: 6960 - DNA, 1117 bp, Glycine max
tcagctacgtaggccccccccccgttgtgttggtgcccttctcgctgcactgcttcttcgttcttctctctggcgaccaaactcgaagaatccaaacaggtttgttgtggaagatgagtggtgttgttagggctgcattgagatccaccactagtgtttgtgcacttgtgcagagaagccatggcctcctcccattgaggtgcttctccactgaggcagaacagccacctttgaattcaacaccccctcctcctccgttctttgagactgaccattcaggtttgacatatggtaatctgcttggtgttcgtaaatatgcgctgaaaactgatatcatcaactttcttgaagggtgtaatttgactctggaggatgttaaaatggattatgaccgtagcttttccccagtttcaacgttgttgcaattccctactcgtgattcctttgaccatgctgtaaaagtgattttaaagaagggtcgcttgtacaaattggacagggttaatcttcaccaatgggaccaagtaaaaccatatgacggaaaaactattttaattcaaggaatgcctcgagcaggtacatatgaagatataggacgcatcctctccggttttgaatttgattcctcctccattagcttgtttttaaggcccggaggtacggcaggtgcggatcccattaaactggccacagtacgtttcaattcaaggactcaagcaatgaatgcatacattgcaaaaaatggaacgttttgccaaaacaatcgcatttggatacaagttatccagtaatacacgcgccccttactggcgctagtgttatagtactgctttaatagagtgcagagtagtttaagttgcttttttcttggtaattttggatttcataatgtcttcggtttaaagggatgcaaggaaatggctaccttgaataaaaacacttgatagttgattggtagttgatgaagagtttggtttttcttcgcattgaaatgtgtttttatattaacgatgaagtcaaggttttttaaatgactttgaaaacgtgttgttgattatatgataatgtgagtttagaaaattccatatatcgatgtatctaggtatatgaaagatgc

SEQ ID NO: 6961 - DNA, 1042 bp, Glycine max
acggctgcgagaagacgacggatgcccccgtcgcgccagatcgaagttccactgtcccgaagctgtcaacaatggcgatttccggcgatctcagagtctcagcaacacttcctctgtatcgctcccactcgcctccactccgaacctcttctcagtcttccccaaaggtagactttcatcgtttcttgaacagagcttgtagcatctctgaattcactccaaaatgcccttacctgacaattgtacgatgcaatatgcgtgggtattgcaagccagttgctgcggtccttggaggtcctaaatttacatcaaattcagttagccaagaaaccgagaactttctccttgatgctgttaaaatgaacttctttgagcggttaaatttggcttggaagataattttcccatcggcaacatctagaaaaaactccaatgctaggattgctaagcaacgcttgaagatgattctgttctctgatcggtgtgaagtaagtgatgaggcaaagcgaaaaattgttagcaatgttgtgcgtgctctatcagattttgtggaaatagaatcacaggataaagttcagctgagtgtctctgctgatacagatcttggaactatttactctgtcacagtgcctgtacggcgggttaaaccagaatatcaagaaatggatgaatttgggacaataacaaatgttgagtataaggacaccggagagacttctggttctgttgatgttacatttgatttctatgttccagacgaaaggtcttgattttgagttgaaagttcttgaattttgatttctttgtcaaaagttagtgtctgaaatgcctaccagtgaaagctaatctggatttctgtatatatttttaaattgaagcttacattagggtgacactagattttgatgagaagttttgtttttgtactatctatatctgttagtttggtttgttgcatcattgaactaaatttggtatgttgtcttttcttagcatttatgataagcttatgattgtatgaatcattattattcaaaaaccc

SEQ ID NO: 6962 - DNA, 1618 bp, Glycine max
tcagctacgtaggccccccccccatcatattcacatctccatcttctctctctctctctctctctctctaactctcttctaaaacttaccaacacaacaaaatcgagtttccaataaagagttttgttgaaatggaaaacgttccggcggtgtgtaaggaagatgatcagatggatttgcctcccggatttcgattccacccgacggatgaagagctcataagccattacctctacaagaaggtcattgacaccaagttctgcgccagggcaattggagaagtggacctcaacaagtccgagccttgggatttgccatggaaagccaaaatgggagaaaaagagtggtactttttctgtgtgagagacagaaaataccccactggcttgagaaccaacagggccacagaagctgggtactggaaggccacagggaaagacaaagagattttcagaggaaaatctttggttggaatgaagaaaactctggttttctacagaggtcgagcacccaaaggagagaaaagcaattgggtcatgcacgagtaccgactcgagggaaaattctctgctcacaacctcccaaaaactgcaaagaacgagtgggtgatttgcagggtgtttcagaagagttcagctgggaagaaaactcatatctcggggataatgaggttggactcttttgctaatgaattgggttcttctgctctgccacccctttcagattcttcgccttctattggcaacactaaacctctgaatgattcggcttacgtgccctgcttctccaatccaattgatgttcaaagaaaccaagaaggtgtcttcgattccttcaccaactctatgtatggggtttcttcaaatcctatggacattcttcccagaatgccaccttctggctccttctactccactcaaggtgttcaagctgcgcctaattttgcatttcctggttctgtttacactcttcaggaccacaccatcctgagagctttgtgtgaaaacaatggttacaagccagagagggacatgatcagtgtttcgcaggaaacgggtctaactactgacatcaacgctgaaacctcttcaaattttgatgtgggttggaggccctttgagaatcacaatcatgcatctgtttctgttgccccattggatcttgatggtttgtggaattactaaaagtttaaataaaaggaacaattacagtgaaaagtgaaattaaccccacttttgagctgaaaggaagaggaacaacaagagcctcgggtggggttgatactgttgttgtttctctgaatagattttatctaagacatgtaattactgaagcatatgttgttaagtgtaagaattaagaaatgttgtggcccccggctggtctgatcttttgacactttgggcttgtggttggcatgaacacgagcataattattttgtttcagcttggattaaaaatcatagtagattgagcctggtggattaaaattaaaatttaaaaagtcatgatgatgattatgtaccgtagcttgttgatcttgcttttctggattggattatcagtccacgccccatccagctaatactgagaccatgaccaagagcttgattcggtt

SEQ ID NO: 6963 - DNA, 690 bp, Glycine max
ttccgtaagccattgctcaaacttaatgttatatttctgattctgatttctcactagtgaatttgaggatcagcagtagtgatgaattccacagaagaagagtgtcgtggctgcgagattatggagaaagatgctcatgtcaggtttctcgagttaatgtactatatgctcccatctccgtacgagtcccaagagatcaaccatctcaccctcgcttactttgtcatctctggacttgacattctcaactcactccacaaagtcgcgaaggatgctgttatcagttgggttttgtctttccaagctcaccctggtgccaaggctgatctcaatgatggacaattctatggctttcatgggtccaaaacttcgcagtttcctccagatgagaatggggttttgattcacaacaacagtcacttggcaagtacttattgcgccatttccatattgaaaattgttggttatgaattgtccaatcttgattctgaaacaattgtgacttctatgaggaaccttcaacagcctgatggaagtttcatttctattcatactggaggcgaaacagatcttaggtttgtgtattgtgcagctaccatctgtttcatgttggataactggagtggcatggacaaggagaaaaccaaggattacatattacgttgccagtcttacgatggtggctttgga

SEQ ID NO: 6964 - DNA, 1261 bp, Glycine max
ttttttaataagctcatcatcttgactttaaataattcctgatcgaaagctttgcgtaacgtctgtatttcagatcattaaattgaccttgaattattcctcgtcccgtaacttatatgcatatatatatatatatgccactgccggaacctggtcatcaataatccactccgaaaattattttgaacacccttcatcgatctaaatgggtttggcaggatttctcagaaaactccaagatatctattctaaacataagctcatatccactgttttcttctgtctcttggtctcacctccgtccttcttctataccttctatgccacaagtcatttatccagtgtttttctcaccagtgaaggtgccgacaactctgtaggcgcaacctttcactatatcatagttattgcacaagttgaatgttttgccgttcttggcatatccatgttttccttgctaaagccactgctccatatcttagcctcagagcagaagatagacccagaagcggagttgagcatcaaaaacctcattttatcattgaccaaacccgcgagaagcttactttttacctggttcttcgtaaggctattcaaattgggttatatattcttaggaatattgttcgtgttccatcagcgcgtgatgtttgttgttaattcaagttgtgaccagcaagctgaacaaagttccttagccagcagcatcgacacgataatattcgttgcagcaggtgtcttagtcttcgcgtatttggccacttatgggaatttggcaattgagatctcgattcgtgaagagattagtggaaccgaggcattgaagaaggcttcagagcttttagagggaaagaggaagctagttgcaggatttgtggtgaatgtagtgctcggggttatatctgtagggttgtttgtgagttgcgtgtacttgaacacatgttccaaactctcgatggactctaagaaaagcatcatgagccagatagggaattttggtatatttcaggttgagttttacacatggggatgcttctcaatcttgtattcaatatgcaagaagtctcgcggtgaaacaacaacatttcatttccaaccctatgggagcttgcaacgcatgctgcaaaaggaggaggagcccttgcttcccttataaaattaagagtatcgattgtaaactttcatttaatttgtaatttaggaatatataagtgaaagtaagtatttcgtttttcacaaaaaaaaaaaaaaaatttgtttt

SEQ ID NO: 6965 - DNA, 1498 bp, Glycine max
cccacgcgtccgcccacgcgtccggtttcacgtgcatcattttgttgatggagtcaaaatgtgacgcaagaaccatttaatttcggctgcgagaagacgacaaaagttcaccgaatcacagttgtatgtagtctaaaaagttggcggaatataactctgttgtgtgcagtggtctctcacaagggaataatagtctcacatacattcacaaaaacctgagctttattgcgttgttgttgctgtagatggagaagggtagaaccgtggtggtgtccgctctgcagtttgcttgcaccgatgatgtctcaacaaatgtcgccaccgccgagaggctagttagagctgcacataaacagggtgcgaacatcattcttattcaggaactctttgaaggttattacttctgtcaggcacagagagaggagttcattcaaagagctaagccacataaggaccatcccacaatcctcagaatgcagaaacttgcaaaagagttaggtgtagttataccagttagcttcttcgaggaggcaaacaatgcacattataattcaacagccataattgatgctgatggaactgatcttgggatttatagaaagtctcatattccggatggaccaggttacgaggaaaagttctattttaatccaggtgacactggatttaaggttttccagactaaatttgcaaaaattggagttgctatttgctgggatcagtggtttcctgaggcagcccgagcaatggtgcttcaaggtgctgagattctattttatcctaccgctattgggtctgaacctcatgatggaagcattgactctcgtgaccattggaaacgagtaatgcaaggacatgctggggccaatttggtaccacttgtggcttcaaataggataggaaaggagattattgagactgagcatggaaaaagtgagataacattttatggaaactccttcatagcaggacctactggagaaattgtttcaattgctgatgataaagaggaagctgttcttattgctcaatttgatttggacaatatcaaatccatgaggcattgctggggtgtattccgtgataggcgtcctgatctatataaggtgcttttaacattagatggcaacaatcccgtccaatgatagataaacatcttaccttgtaactgttatagaattatacctggaatggtttaagcctttacaaacttccagagcgtttatcactcaccaagaaggcaagaacaaggtacaacgcaagaatatcatctgcttattccatgcaatttaataaatatgtggaattaatgatcaatcagctaagtaacttgatgttttgtagtgctcttattcataaacaattcatctgaatcatttgacaccatgtatgaacattgtatttcattttatgctatttcgacaccgaagttttctgtagtgttctaaatttgctgtttgcttcgggaagtgatttgttcctgggtttagtatagatc

SEQ ID NO: 6966 - DNA, 1318 bp, Glycine max
tacggctgcgagaagacgacagaagggtacggctgcgagaagacgacagaagggtcccgcccgggcacgaggacagaccgggacggctaaaagctaaaaatcatcgaagtactcaaattagcatggctgtcacggttgcattcttgaatttgatcatcatgttttcagtagtctctacaagcaagtcactgagcttaaactactattcaaaaacatgccctgatgtggaatgcattgttgccaaggcagtgaaggatgccactgctagggacaaaactgttccagctgcacttctgcgaatgcacttccatgactgtttcgttcgggggtgtgatgcctctgtgctgctaaattcaaaaggaagcaacaaagcagaaaaagatgggccaccaaatgtttctttgcatgcattctatgtcattgatgcagcgaagaaagcactagaagcttcatgcccaggtgtggtctcttgtgctgacatccttgctctagcagcaagggatgcagtttttctgtcaggaggacctacatgggatgttcctaaaggaagaaaggatggcagaacatctaaagccagcgaaaccagacaattaccagcgccaaccttcaacttatcacaactgcggcaaagcttttctcaaagaggactgtcaggggaagacctggtagctctgtcaggggggcacactttgggtttctctcactgctcatctttcaagaacagaatccacaacttcaatgctacacatgatgttgacccttcattaaatccatcatttgcaacaaaactgatatcaatttgtccactaaaaaatcaggcaaaaaatgcaggcacctctatggacccttcaacaacaacttttgataatacatattacaggttgatcctccaacagaaaggcttgttttcttctgatcaagttttgcttgacaacccagacactaaaaatctggttacaaagtttgccacctcaaaaaaggctttttatgaggcttttgcgaagtccatgatcagaatgagtagcatcaatggtggacaggaggttagaaaggactgcagaatgatcaattaataagtcttaaatcaattcaagttaaattgatgttccaaacaagttggatcaaatttcctagatgccaagaatattatgtctttttcctctattaaagaaatatgtatatttatctgaagttaataaaatctcaagcatgtcttgggaaattaatttagagctcagtaacgaaatataaaataaaaaaaataaatttataatttaaataacataaattgaggtgaactctataaaaaaaaattgaa

SEQ ID NO: 6967 - DNA, 1184 bp, Glycine max
tacgggggccggatgtccccgttaggggacggctaaaagctaaatatcatcaaagtactcaaattagcatggctgtcatggttgcattcttgaatttgatcatcatcttttcagtagtctctacaacaggcaagtcactgagcttaaactactatgcaaaaacatgccctaatgtggagttcattgttgccaaggcagtaaaggatgccactgctagggacaaaactgttccagcagcaattctgcgaatgcacttccatgattgtttcgttcgggggtgtgatgcctctgtgctgctaaattcaaaaggaaacaacaaagcagaaaaagacgggccaccaaatgtttctttgcatgcattctatgtcattgatgcagcaaagaaagcactagaagcttcatgccctggtgtggtctcttgtgctgacatccttgctctagcagcaagggatgcagtttttctgtcaggaggacctacatgggatgaacctaaaggaagaaaggatggcagaacatctaaagccagcgaaaccagacaattaccagcaccaaccttcaacttatcacaactgcggcaaagcttttctcaaagaggactgtcaggggaagacctggtagctctgtcaggggggcacactttgggtttctctcactgctcatctttcaagaacagaatccacaacttcaatgctacacatgatgttgacccttcattaaatccatcatttgcaacaaaactgatatcaatttgtccactaaaaaatcaggcaaaaaatgcaggcacctctatggacccttcaacaacaacttttgataatacatattacaggttgatcctccaacagaaaggcttgttttcttctgatcaagttttgcttgacaacccagacactaaaaatctggttgcgaagtttgccacctcaaaaaaggctttttatgacgcttttgcaaagtccatgatcaaaatgagtagcatcaatggtggacaggaggttagaaaggactgcagagtgatcaattaaaaagtcttaaattaattcaagttaaattgatgtttcaaacaagttagaagtatgaacttgttggatcaaatttcctagatggcaagaatattatgtctttttcctctattaaagaaatatgtatatttatctgaagttaataaatatatcattttgataacc

SEQ ID NO: 6968 - DNA, 1935 bp, Glycine max
gaaaatagtggtgacttcattcttgggttaagtttgtgactttgtcaaaatgcagaatatccctctcaatcacagaatcccaaacgacacctattaattttataaaatatgtatttaattcacatcatttcccccaaaatccctataataatatcttttcacagtcatgctcagatgaaagtcctacctatgaagcaattgtttacattttccgtcaaccaaaatgctacaaacgaaaccagagattcgtaattgcacattctcttttgttgtctccagctcatagaatattataaactcagattcattcagaatttcagattcacctttttcttttcttctctaccttctttttcctctgacagctttttgcagaaagttgtgatttttccttgaaagatggcatctttgagcatgatccagatcagaactgggaattgtgcatctgggtttggtttgaattgtgctgggaaggttaaggttggtcccagcagagttgggtttaaggtgtttgcttcagagactcaggctacagagcctgatcttagtgtaactgttaatgggttgcgcatgcctaacccctttgttattgggtcaggtccaccagggaccaattacacagtcatgaagagggcctttgatgaaggttggggtgctgtgattgcaaaaactgtatcacttgatgcggcaaaagttataaatgtaactcctcgatatgcccggctacgggcaggtgcaaatggatctgcaaaaggagaaattattggatgggagaacatagaacttatcagtgataggccacttgaaactatgttgaaagaattcaagcaattaaaagaagagtatccagacagaattctcattgcttctatcatggaggagtacaataaggctgcatgggaggagcttatcgatagagttgagcaaactggagttgatgcatttgaaataaatttctcatgtcctcacggtatgccagaacgcaaaatgggtgctgctgttgggcaagattgtgctcttctggaagaggtttgtggatggataaacgctaaagccacaattcctgtttgggctaagatgactcccaacataactgatatttcacagccagcaaggattgctctaagttcaggatgtgagggagtatctgccataaatacaatcatgagcgtcatgggaatcaacctcaatacattacgtcccgagccttgcgttgaggggtactcaactcctgggggttattctgcaagggcagtccatcccatagcacttgggaaggtgatgagcattgcaaagatgatgaagtcagagtttgatagtgagaactatacactttctgccattggtggtgttgagacaggcggtgatgctgctgagtttatccttctcggggcaaacactgttcaggtgtgcactggggttatgatgcatggctatggacttgtgaagaaactatgtcttgagcttcaagacttcatgaaaaagcacaatttcacatccatagaagatttcagaggggtttctcttgagtattttactactcacactgacttggtaagaaggcagaaggaagcagttcagaagaggaaagccataaagaaagggttgcaatctgacaaagactggacaggagatggttttgtgcaagaaactgaaagcatggtttcaaactgaaataaaatgtgcagttaaattatattagcgtgtttggaaatggaccatgggcatggtgtttcacatcttaattaatgttactagttctaccttttacatttccaaacacatttaagtaacctttcatatgcaattgcaaatgttgtccaaacgttaagtataactatagacattatgttttattatcaatgatggatattaatcttttccaaaacagtatgatgaattttatttcaagaaataatgaaagtaatttgcttc

SEQ ID NO: 6969 - DNA, 919 bp, Glycine max
ctcgtccccctcgacccgcggggtgtgtgagcgtcaacaatggcttcttcgtcttcagaatcggcggtgtcggagcgaagaggaataccaggggctcagttcgtagaggatgtccaaacttacctcactcaatcgggtctcgatgttggttcagccctggcttttctccaagagagacttcagcagtacaaggtagtagaaatgaagcttcttgctcagcaaagggatcttcaggcaaagataccagatattgaaaagtgcttagacgttgttgctacattgaaagctaagaagggtactggtgaggaacttattgctgattttgaggtatcagaaggcatctattcacgagcacgcatagaagaaaccaattccgtgtgtttatggctgggagctaatgttatgctggaatattcattagaagaggctactggtcttctacagaagaacctggataatgctagagccagtttggaagttcttattgctgatttacagtttttgagggaccaggtgacaattactcaggttacaattgctcgtgtgtataattgggatgttcatcaacggagagttcaacatgctgttgctacaactgctcaagactagttaaaaaggagagtttattcaaacctagatccaaaattgaaaactcataccttttgcttagagtatgatttttatctcttgccaatttctgatttagataaattgtgggttgctcccttaatctagttccggttttaccacagtagacactagtaggagctttttcgtatatttatgttattattgtcttggtctcttgtaaaatgcccatatgttaggttgatgggaaagttttggtttggtgtgaccatatggatatattctactctgcaacattttttacttgtttaagttttctgttgctgttgct

SEQ ID NO: 6970 - DNA, 1413 bp, Glycine max
tacctagaacatcctaatcgaaaataaacacccacatgacatggaaaagacgctaacgccacccgtcttcgagcattaaaacccgcgaaacttccaggcagggttacacgccgcattgctctcagcttcacaacaccatggaccacgttagggaaacctctgcttgggtagctagccgctcctcccacgttctcgttgactctgcaggaattgagaaagtggtgagcaccattgattccattcccaaggttgagtgggatttcgaagggattcactactttgataatggaccactcaccgttcagtacctgtttgtgttggacgctttaaatttttgcttctggcctgataaggatttgaattatgatgatttggcatctgggctaaaggcagctcttcaaaatgataaatctgcatttgatgctgatcgtctgcaaaagtacactggtccacaactgcgtgagcttttgaggtggcctagaccccttcctctggaagatgaacgagttaggttactacatgaggttgggattgaattagaaagaaactttgagggtaaagcatccaatcttgtggagtgctgtggaaaatcagccatgaatcttgttgctcttgttgcacgccattttcctggttttagagaccatacagtgtacaaaggacgccaggtatttttatataaaagggctcagatatttgcagcagatttgtttggtgcatttaggggccaaggatatggtgagttcaaagacattggctctctaactataatggcagactatattgtcccagctgtgcttcgacagcttggtgttttaaaatatagtccaacacttgccagtactattgaggccagtggagaaataggtccagggactgaagaggaagttgaactgcgtgcttgctctgtacatgcagtggagaaaatgagggagctaataagtgtaaagtcaggaagacaggtgctcagtgtggagctggatctttggctctgggcttctggtgttcagtccacatctctgcagcaccaccgtacactttcaatatattactgagcacatgatatatggtaacttctagctatcaacaatttagttgttgaacaagaaaattttggctgttttaaggtaattatttaggataatgtgtgaataactacctccttttgcactaaagttttggaatcagcttttgtaattttggaaaagtgatacttaaccagatgctttcaaacttaattttgaatagccattgtattcggattttaggaccttaaatagtttacagggtgaacaattaggctcatggttgttttacaatgggaggttgttaatatttactttgtcaaatataactgttggtatagccgaggttgtaaaaaaaaaaaaaaaaaagaaaaaaaaaaaaaaaaaa

SEQ ID NO: 6971 - DNA, 1194 bp, Glycine max
tcgacggccgccggaggccccccccccattacatcacgtcacgtaacaatactaatatacacgcccgcacctctctcacaagtctcaccaacttccactctcatcaatgactctcaccaatgctttcctcgctccttccttcgccgttcacggtggtagggtttccgatccgcgctccattcctcttttctctcttccctccgacgccttcttccgctccccaacctccctctccagggacaagaacattctatatgcttctgcttatgatttgaatgcagttggttcagcttcactgcaatctggtgacaatcctgatagtcttcctatgccaatagttctaatagatcaagaatcagattctgaagcaacaattgtgcagcttagctttgggaatcgccttggagctcttcttgacacgatgaaagcattaaaagatttgggattggatgtttcaaagggaactgtctccacagagggattagtcaagcaaacaaaatttttcattacacaatcagacactggacgcaaagttgaagatcctgatatgttagagaggattcggcttaccattattaacaatctgttgaaatatcatcctgagtccagtgaactactagcgatgggtgaagtgtttggcataaaggctccaaagaagaagcttgatgatgatatcaaaactcgtatacaagttaaggaagatgggcccaagaggagcttgctgtatatagagacagcagataggccgggattgctggttgaaatcatcaaagtcattgcagatgtaaacattgatgttgagtcggctgagattgatacagagggtttggttgctaaggatacatttcatgttagttacggcggggctgcattgaacagttcaatgtctcaggttttggtgaattgtctgcgttactacctgcggacgccagagacagatattgatagttactgaaggaaccacccttgtaaaataagccaatgcaatggttctttcctataccaaatcgccagttactgctaccacattatggaatgagttatgagtacctgtaactaactatggaatgaatacgtgttgcctgtggtatggaatctatgaatacctgaaactcactgaacgtccgttaaatctgatatgaaagctaaaaaaattgaaaatgaattttgcctcatttcccaaaaaaaaaaagc

SEQ ID NO: 6972 - DNA, 2515 bp, Glycine max
  misc_feature (2497)..(2497): n is a, c, g, or t
ggctcgaggtcttacctcttacctacgaacgaggcaaagaccttttcaaatggtcaaacgcaaaacctctccatgtcttaatcttaaataaacactctttcttcaattctttccaatttcaattccattcctttactttcatttcatcctccacaattttccaattccatttctctttcccaaattctccctaaacaagtaacaccaataaacacaagcttctctctttcagctcttggagggtttcaattctccattgtgatccctcatctgggtacctttcaaatttgaggcaccttcgatcctgtggtccaagtttgcagctttgactttttttctcaacatgggtgggagcgagagctcgaagggtgtggttatgggtcgtttggttgagtgcatcaaggagatttctgggttgccagagtgtcagaacttgtgcaagagggtgtatgggaatttggttcgcagggtgaagcttttgagtcctctctttgaggaattgaaggatggtgatgagtccctcagcgatgaacagcttcaaagctttgagtctctccgcgcggctcgggagtctccgatcgcccttttgaaggatgtgaaccaagggagtaagctttatcaggctttgcggaggaatgatacagcagataagttccaaaaagtaactgaaaaaattgaagctgtgctcagtgaaattccttactgcaaacttgagatatcagaggaagttcgagaacagattgaactggtgcatgctcaattcaaaagagccaaagctcaaacagaatttgctgatatacaactagacctagatatggcagtggcgcaaaaagaaaaggaccctgatcctgctgtactgaagagactttctgagaagttgcatctaaggacaataaatgacctaaggaaagagtctagtgaattacctgaattgttgatcacaagtggtggagaactaggcgactcttttgaaatgatcacatcccttctcagcaaactgagggaatgcgtgctcacagaaaatcctgaagttggctccggtgaatgtgaaaaattgtcagttaagcacaggtctcccatgatcccagatgattttcgatgtcctatatctcttgaactaatgaaagatcctgtaattgtctccactggtcagacatatgaaagatcttgcattcaaaaatggcttgatgctggtcacaaaacctgccccaagacacagcagacacttgtgcatacagcccttacccctaactatgttttgaagagtttgattgctttgtggtgtgaaagcaacggtattgagctaccaaagaaacaagggaactgtagaacaaagaaatgtggtggcagcagtctttcagattgtgatcgaactgctattagtgctttattggataaactaatgagtaacgatatagaacagcaaagggcagctgctggtgagctcaggctgttggctaagaggaatgcagacaaccgagtatgcattgctgaggcaggagcaataccacctcttgtagatttgttgtcttcttcagaccctcgaactcaggagcacgctgttacagcacttctcaatctttccatcaacgagagtaacaaaggaactatagtaaatgctggagccataccggatattgtagatgtactgaaaaatggaagcatggaggctagagaaaatgcagctgcaactctcttcagtttatcggttctagacgagaataaggtgcaaataggtgcagctggagctatccctgctctaataaagttactttgtgaaggtactcccagaggtaagaaggatgctgctactgctatctttaacctatctatttatcagggaaataaagcaagagctgtaaaagctggtatagtagtcccactgatacagtttctgaaggatgctgggggtggaatggtagatgaagcactagctattatggcaatccttgcaagccaccatgaaggcagggtagcgatcggtcaggccgagccaattcatattcttgttgaggttatacgaaccggctctccacgcaatcgagagaatgctgctgctgtcttgtggtcactatgcaccggagatccactgcaattaaaactagcgaaagaacatggtgcagaagcagcactgcaggagttgtcagaaaatggaactgatagagctaagagaaaagctggaagcatattggaactcttgcagcgaatggaaggggttgataatctgcagagttcatagtctcagtgttgcttcgttatatagctcatagatggtctgaaaattatgtgttataaaccatgccattattgccacatcataatagtgtattcatcttttttgttttaaatcctgtgcaggaactttgcattatgtttggctgtcatttgtctgtataggaaattctgtgaattgtctattgaagatgttatgctaggattataaatggaataagtttctgccattgtctgtccaaaaaaaaaaaaaaaaaaccaaaangaagggcggccgccgact

SEQ ID NO: 6973 - DNA, 948 bp, Glycine max
ggataagcaaatgggcactgtttttagatcacgcccaccactccacatcgtctaggtgtttttttttttttttttttacagaaatttttttctcactaaagccaaataaaagaaacataagatgatgtacaatgctaaaagtatatgtttgtcgttaattagataccctgctaacttaaccatattcaaacggcaaaccaaattgatatttaacataaaaactgaacggaaagtgctttttcatttgatactgaaccagattaccagcccatcagtgttcttctaactttgtcaacaatctgagttcttgcttggcttctggtcaatggaaagtcacggctttcctccaacaaaaatctatacacttcccattgacgttcttgtgttgaatgtctaacaacttcagccgagaaaatgcctactcccaacgcttttaaagtcaacgtaacatcatagaatacacggggtctcccctttccactcagctccacaggattagcaaccagaagttctgtgtctggaccccggttcactatcgtcacccgcaacggatgaagcatctcttcttttaagcatgaacacaaggttttctggctttcaggatctatgatctttttcccatcgttgtgctggacaaacaagtctatattccgaaagcctttcacacttgaagaaaatcgaccaaaagcaaccttaatatcagagtctttagaaatcctcataatgtcataacacaagcccttctgatcaacgcattgtatctgaagcagggtatgaactgggctcagtgagttatccacagtaacagtaggtgtcttcagtgttgtcatatcttggctgagaggatgcaaagacaacttgtctaacagctcagaactaaatggcgcggcggcctacgtagctggaagagaagaaaacaaaaaaaaaaaaaaaaaaaaaaaaactcga

SEQ ID NO: 6974 - DNA, 702 bp, Glycine max
ggtttttttttaaaatgaaagttgtttttctcttgcaccacattttttaagatatcggtggtttagtaaaaagaaaataggataagcaaatgggcactgtttttagatcacgcccaccactccacatcgtctaggtgctgaacacaaaaccaatatacagaaatttttttctcactaaagccaaataaaagaaacataagatgatgtacaatgctaaaagtatatgtttgtcgttaattagataccctgctaacttaaccatattcaaacggcaaaccaaattgatatttaacataaaaactgaacggaaagtgctttttcatttgatactgaaccagattaccagcccatcagtgttcttctaactttgtcaacaatctgagttcttgcttggcttctggtcaatggaaagtcacggctttcctccaacaaaaatctatacacttcccattgacgttcttgtgttgaatgtctaacaacttcagccgagaaaatgcctactcccaacgcttttaaagtcaacgtaacatcatagaatacacggggtctcgtgcgaattcttgattccacaggattagcaaccagaagttctgtgtctggaccccggttcactatcggcacccgcaacggatgaagcattttttcttttaagcatgaacccaaggtttttctggcttttaagaatctatgaacctttttccc

SEQ ID NO: 6975 - DNA, 1827 bp, Glycine max
ctgtcatatgatggagattggattatgatctaaatatatattatttagtattttaattttgatttcatatttaggaatcaagtgaattgcaatcagaagaaaataaagtctccaatgagaaaaataagaaaagaaagctgaaaacaccggcccagcttaaggccttggagaatttttataatgagcacaaataccccacagaggaaatgaaattagtacttgctgaggagttaggattgacagaaaagcaaatatctggatggttttgccacagaaggttaaaagataaaagattgatgaaagatgaagctgttgctaatgggcgacaagatcgttcaagtggtgtcatccaagatcgtggcagtggacttgggcaagattcatgcggaagcagtaagcatgctgatcacaggtatctggatcctaaggaggttgagagccatggcctctacaatcacgaattgtcagttgcagatatgacccacagacgtaggaaccattatcctgaaaatgttagtggggtggatgacacatcatctgagagcagctcatttttgcaagaaaggttttctcaaggtcaggatccgtatgatatggagccttctagacatcttacacctaatggagctcttccacccctaaatcccaaaggtgcagttaagatggggcacaaaccatcaggatatttgaaagtgaagggcgagatagagcatgctgctataactgctgttaggaagcaattaggaaggcattatctggaagatggtccactacttggtatagaattcgatctgcttcctccaggggcatttgaatgccaaactgcagatccagctaatgaaccatactctgctacaaatcctctgcttctgaattctccagaaatctctgctgcaaaaagacaacccagtattagctctagatatgattcatattatactaaatttagttcccaagatccgcatatggaaggagctgactttggttccttgcacgaaactgatttccaggataaacaagataagaaagcgcgccagaatataaaacaaaggcaacctttatacggttataccaatcattttcctggaaggaactctttcccagatttgtatgaagactctactggagaagcatctgcttataatagcaataagagtcatagaatgagcactaaacatggtgttgaggggatgcgatctgattctgcttctaaccatagtgatcactatgaagagaagcttacagttaagcagaaaaccttgatgctgcatggttatgataacatcaatccaaagaatatacaaaggagtgaacatgtaaaatctaaaccttctagttcaatccataattcccgtgttcctatggatactgaagaacgggggttatctgctaggatggcaaaggaagagatgtttaaggggaacaggaaagcaaaaaatacatactgcgatgtagatggagcagggatgctttcaaatgaaatcatggttgcaaaacgagctaaagttgacatgcttcaacaatacaatgtgaaaaaatcacctgttgctgagatggaacaaaggaaaattcagagatctgctgcagacttgccttctagctttagcgaggatgaaactgctgacaccaattcctcactggattattaagtgatgttgataaatgctaacaagtgtgtgggatttctctaagccattgggtatgtacagcctaaaatgacacatacattttctctgtaacgtgggaaccattgtttctggcagcaatggcagtgactcgctccatttgctgttttttgtgctcacctatttgcctttgtaaaaaaaa

SEQ ID NO: 6976 - DNA, 1332 bp, Glycine max
tcgagtcagctacgtaggccccccccccgaagtgtcagctcttccatcctacttcaccctctcacaataaaatcattgcaatagagaagtcccttaaataaatctgaatttccctgctttgcttcaccaccccccttgcttgcgtgggtagaaatgcaagaagcagggctgggaatgggaatgggaatgatgagcggagaagtatccgccgccggggaccaccaccgtcaagtgaaggcggagatagccaaccacccactctatgaacagcttctatctgcacacgtgtcatgcctccgcgtcgccacacctatcgatcagttgccgctcatcgacggacagttatcgcagtcccaccatctcctccgctcttatgcctcacaccattcccattccctctcgccccatgaccgacaagaacttgacaacttcatggcacaatatttgattgtgttatgtacgttcaaagagcagcttcagcaacatgtgagggtgcatgccgtggaggctgtgatggcctgccgtgatattgaaagtaccttgcaagctctgacaggagtcagtttgggagaaggaacaggtgcaacaatgtcagatgatgaagatgatttgcagatggatggctctttagatcagtctagcgctgacgggcatgacatgatgggatttggtccattgcttcctacagaatctgaaaggtccctgatggaaagagttcgtcaggagcttaagattgagctcaagcagggttttaagtcaagaattgaagatgttagggaggaaatattaaggaagcggagagctgggaaattaccaggtgacacaacatcggttttaaaggcctggtggcagcaacatgctaagtggccctacccaactgaagatgacaaggcaaaacttgtggaggagacagggttgcagctgaagcaaatcaataattggttcatcaatcaaaggaaacgcaactggcacagcaactctcaatcggttaactctctgaagtccaagcgcaagagagagtatgcccactaaggattccagtctggtgcagaagataacaggtgatgcactacaacataagatggcttacaatagtgatggttgtaaattcttggaatacataacggatacaaactattcttgttgtgcacggtcgcctccatttctttcaagtgtttttttatttgtaaatttgtttgctatgatttgactggctgaagaagtatttttagcagctgaaagcctgaaagtgtttcctatacttgatatgtttgcatgtactattatgtatattttgtgttgtgctttaaaacaaaaaaatttacaagtact

SEQ ID NO: 6977 - DNA, 1836 bp, Glycine max
  misc_feature (1619)..(1620): n is a, c, g, or t
  misc_feature (1678)..(1678): n is a, c, g, or t
tacggctgcgagaagacgacagaaggggattcttcactgtcctctctcgccgccagatctcagacacacactctcactctctctccctcaccttccataatgcagctcctccggccactgctcgcggcggcgctgctcctcctcgccaccctctccgacgcgcacaacatcaccagcatcctcgcaaagcaccccgagctctccaccttcaaccactacctcaccctcacccacctcgcccccgaaatcaacggcaaaaccaccatcaccgtctgcgccgtcgacaacgccgccatgtcggaccttctctcgaagcacccctccatctacaccgtcaagaacgtcctctccctccacgtcctcctcgactacttcggcgccaagaagctccaccagatcaccaacggcaccgccctcgccgccacaatgtaccaagccaccggcaccgcccccggatccgccggcttcgtcaacatcaccgacctccacggcggaaaagtcgcattcgcccctgaaaacaacgacggcacactctcctcaacgttcgtcaaatcggtggaagaaatcccttacaacatctccgtaattcagatcagtaaggttctcccctctgccgcagcggaagcccctgcacccgcacccacccaacaaaacctcaccaacattatgtcaaaacacggttgcaaagtcttcgccgacactctctctgctcaacccgacgctctcaacaccttcaatgacaacctcgacggtggcttaaccgtcttttgccccctcgacgacgcgtttaaagcctttctccccaaattcaaaaacctaacaaaatctggtaaggccgcgcttcttgaattccacgctgttccggtttaccagtccaaagctactctcaaatccaataacggacttcagaacactctcgccactgatggcgccaacaagtttgacttcaccgttcaaaacgacggtgaagatgttactctgaagacgaagcttacaactgccaagatcaccgacactttgattgatgaacagccgcttgcgatttttgctattaataaggtgcttcagcctaaggagttatttaagggtgaggcggaggctccggcgccggcgccggagccttctgccgccgacgctcctgcgccggcgaagaaggggaagaagaagaagaaggcggctgatgcgccggcggatgattctgatgctcctgctgattctcccgatgacgctgccgatgtgaccgccgatgatagtaacgacgccgttagacgtaacggcgggaggtacggtggtggtgttgttgccttggttttgagtttggtttttgggttaccgttaatgctttgatgtgagttaattaaaaaaaaaaaaagagtttagggttttttttcaagggggattcgaagtgatattcctttttttttttctctgtgttttttaatatttttatttgattattgtcgtatttgataatgttgtgtaattttgctggtggtgagagagagcgggaattgatacactgatgtgaatgtttttataatgtaaacaatttgtttaatttcctccaatgagcgttaattagagatctgttatggtaatgtagatcttaattttctggnngggaggaataattattaaggattaaagaacttcgggggggggcccggtacccatttcnccttatagtgagtggatatacccgcgcttactggccgtgttttacaacgtcgtgactgggaaaaccctgccgttacccacttatcgccttgcgcaacatccccctttcccagctgggttaataggaaaaggccggacccgttccccttccaaaagttg

SEQ ID NO: 6978 - DNA, 1630 bp, Glycine max
  misc_feature (8)..(8): n is a, c, g, or t
cggtccgnattcccggtcgacccaactccgctgtcctctgtcgccgccagatctcagacgagactcagtcacactttctctctttctcttccacaatgcagctcctccgggcggtgctcgcggcggcgctgctcctcctcgccactctctccgacgcccacaacatcacaaccatcctctcaaagcaccctgagttctccaccttcaaccactacctgaccctgacccacctggccccggaaatcaacggcaaaaccaccatcaccgtctgcgccgtggacaacgccgccatgtcggacctcctcagcaagcacccctccatttacaccatcaagaacatcctctccctccacgtcctcctcgactacttcggcgccaagaagctccaccagatcaccaacggcaccgccctcgccgccaccatgtaccaggccaccggcagcgctcccggatccgccggctttgtcaacatcaccgacctccacggcggaaaggttggcttcggcgccgaaaacaacgacggcacactctcctcaactttcgtcaaatccgtagaagaaatcccttacaacatctcagtaatccagatcagcaaagttcttccctctgccgcagcggaagcccctgcacccgcacccacccaacaaaacctcaccaacattatgtcaaaacacggatgcaaggtcttcgccgacgctctctctgctcaacccgacgcgcttaacaccttcaatgacaacctcgacgggggcttaaccgtcttttgccccctcgacgacgcgttcaaagcgtttctccccaaattcaaaaacctaaccaaatccggtaaggtcgcgcttctcgaattccacggtgttccggtttaccagtccaaagccactctcaaatccaacaacggacttcagaacactctcgccactgatggcgctaacaagttcgacttcactgttcagaacgacggtgaagatgttactctgaaaacgaagctcaccactgcgaagatcaccgacacgttgattgacgaacagcctctcgcgattttcgctattagtaaggtgcttcagcccaaggagctgtttaagggtgaggcggaggctccggcgcctgcgccggagccttctgccgccgacgctcctgcgccggcgaagaaggggaagaagaagaagaaggcggctgatgcgccggcggatgattctgatgctcctgctgattctcccgatgatgctgctgatgtgaccgccgatgacagtaacggcgccgttaaaactaacggcgggaggtacggtggtggtgttgttgccttggctttaggtttggttttggggttaccgttagtgctgtgatgtgagttaattaattaaaaaagggagttttagggtttagttttttaaggggattcgaagtgatattcctttttttttttttctgtttttttaaatatttttatttaattattgtcgtatttgataatgttgtaattttggtggtgagagagcgggaattgatacactgacgtgaatgttttttataatgtaaacaatttgtttaatttcctccaatgagcgtggttagttgttttattcatgataatgtagtagatgttaaatggttattagagatttgtgatggt

SEQ ID NO: 6979 - DNA, 1591 bp, Glycine max
  misc_feature (14)..(14): n is a, c, g, or t
gtacccgggccccnccctcgaggttcgacggtatcgattattttttttttttttttttggcataaaggtctccaattgctatagcatcaactacatgtattatacttgaatcccagacttgaaatagaaaaaccacttaaatgaagtgcataatcattactggttcagttcatccacttcaacccgtatccgtatgcacgcattaagaataatcttaacaatcagaccgaaaataaaatgatgccttccgcccacattattattgggaaaatttgcatgcaattttcatgaaagaatatgcctaagtacaaaaaaattctaaagaataatttacaagatccttctattatctgtggtttttcataacaataagctttctttcgaactgggaaccaagaggttggcatcttccttttgccctataaacaaaaatgcgttttttcccgctcattctccattgggtatggtttgcttcaaccttactaacttaagaagagctagcattctccgaagttgtatcatcaatggctaaattggatacctcgtcaacggctaaatgggatacctcatcaactaaatctgtttcgctttcaccatctactgaagctttaggcgatgcttcaggggtgatgttttcttcaggtttcttgaggctccaatacattatactagcagctaaaatgagaatcatcttctggttgacctctattatgtcctcaggtaacaggaaaatggaacacccaagttttcgggcgacactgattatatatgttgcattcaacttcttatcttcaccagtctcccctttagtaacaagactccagttgacaacccttggctccacagcactcaaaagctcaaggaagaaaacgccaccagaaagattcttatccttgaaactatccatttgagaagttcttcctgctcttttcactttattgtttgcccagtttagaatatcagcatcagtaatctctttaccttgtgagtgcgatctcaaatttctcagaagttgaagcatagtaaacctcatcagctgccacaaaaatgccaataagagcttcttattcccttgtacaatatcattaccagcaacattcactaatgaaaagtttagttccttcccaatctttataacttggttgcagttctcaactttccgaaacggcatctttataggaggctttgtggccaacttccaattgacagatgcaggtgaaaccttgtcaagaacttctaatagaacccatccatttctgacatcctcaaaaacattattgacataagtggcaattccaagactgttaatccatagtctaaagcatcgttcttcccgagatgtctctgcatcatcagtcatcatctcagcaaaggacattttctggctgtcaactgttgtaaggccattcctatgctggaaaatttgagcaacaaatgcaagattaagattaggtgacccctccactatgtcctttggagtgaggtatctcttgcaatctaatttctctgcctgctccagaaccgggggggccccctccgttgggtctcgtgtggctagggcagatggacctgccacttctggggcaagagc

SEQ ID NO: 6980 - DNA, 2785 bp, Glycine max
ccacgcgtccgctcctccatttctcagaaaccctctcgaatgactgagtcaatgcccgccgtggaaccgtcgccggagcctccggcgtccgatatcgtgttcgatgacttctccaccgacttcagcgccttccccatcccctccatggactcgctcttcaacactactgatgggctccccttcccctccgatctcgaattcggcatggatttcaacaacaacaacggagaattcgaaatcaccttcgacgacctcgatgacatctacatcccctccgacgccgaggatttcctcctccccgacgcctgtaaccctaattacgcctccgtttcgccgcccatcgacgattcctccgcgaagaattccgattccgacgcatccgcggtttccggcgacggcgtttccaggtttttcaattcgcaagtgtcggaatctgattccgccgataatgttagggttccgagcgttccttcgccggaggctgaattctgcgaacgggaggagtcttccaacggaccggtttcgtcgcagggttccggcaacggcggatcgggtgtatacgaggccatgcactcgccctcacctgattctggcccttacgagagagacataacatcgtttcatgcacatgcagctacaaacaatggtgtgaaaatggaggaagttccagcttttgatctgaagaggaagaaagggagttgcgagggaagtgctaccaagcacagaaggttctcttcctctgtggagaataataataataataagactgagaaacagtttcaatctgatttgaatggaattgaagacgaggatgagaagaggaaggcgaggttgatgaggaacagggaaagtgcacagctttctaggcagaggaagaagcattacgtggaggagcttgaagagaaagttagatcattgaattccatcattgctgatatgagtagtaagatgtcgtatatggtggctgagattgctactcttagacagcaagtgggtgctgctgctggtgtgatgtgtcctcctcctcctcctcctgctcctgggatgtaccctcatcatcctccaatggcacccatgccttatccatggatgccatgtgctccttatgttgttaagcctcaagggtctcaggttcctttggttcccattcctaggttgaagcctcagcaacctgcttcagcccccaagagtaaaaagagtgagagtaagaagagtgaggggaaaactaagaaggttgctagtattagtttgttgggtttgtttttctttatcatgctttttggtgggcttgttcctgttgttgattttaggtttgggggtttagtggacaatgttcccggtactggtagttctaattatgttagtgatagggtgtatggtcatggtggagggaaggtttggtctttgaatggtcctaggaatgggtctggaagagatggggatgtaggattttctaatgggaggtttagtgtttctgacagagtgaagaattatgagaagagaggccggaatttaagagaagaaaggcatgatcggaaaggcccagatgattccagtcgtcagggcaatgctagtgagccccttgttgcttctctgtatgttcctaggaatgataagatggtgaagattgatgggaacttgattatccattccattatggccagtgagaaagccatggcatctcaaactgctgaggcaaagaaggacaagagggaaactgggttggccattcctaaggatttggattctgcattggctattcctggagttggaagaagcagagatcaacatccacatgtgtatagggtttctcctgaacagaggaaggctcttggctctggttcaaccaaagctttgaaggaccatatgaagtcctctgcaactgatggtaaaatgcaacagtggttccgtgaaggtcttgcagggccaatgttaagttctggcatgtgcactgaagttttccagtttgatgcttctccaagtcctggagcaatagttcctgcaacatcagtagccaatgtttccaccgaaaaccatcagaatgctaccagtgttaagaagaccaggaatagaagaacccttcatgagctcccagagccgcttaatgggtctagtctgaacataactgaagaacaagtgaaaaatttgcagaaagaccacttccatggtaacaagtcttctatggtggtttcagtccttgttgatcccagagaggctggtgatggtgatgttgatgttgatggcatgatgaggccaaagtcactctctcggatttttgtggttgtgctaattgatagtgtcaagtatgtcacttactcgtgtggtctgcctcgtgcttctcctcatttagtgactggttatgtatgacaatccatccttcggtaaaaagttttgatgcagccgaagcatctaacctgagttgttctagtttctgtaacaaaggatgtgggggactgggaaggaaagaaactcatctccagttttgtacatattaacatatttaaagtagcagtcttaaaaatgtacctgagagaatttagaagctgggcttgaccaactgcgtgtactgagttgagacctttcttagaaacttaataatatatgcccaccttaagtttaaaagtggatcccttgtcatgcgttgttgaatttatagttgaaatgtgtttggcttgattttggataattatgattttacacagttgatttttttttatcaaagcacgagcttgattttatgatggttatttttctgtaaaattgatttagattaaaaaaaaaaaaa

SEQ ID NO: 6981 - DNA, 1139 bp, Glycine max
  misc_feature (1109)..(1109): n is a, c, g, or t
  misc_feature (1115)..(1115): n is a, c, g, or t
  misc_feature (1122)..(1122): n is a, c, g, or t
  misc_feature (1134)..(1134): n is a, c, g, or t
gggccggattcccgcgtcgacccgcccctccacgcgtcctccgagaacaaaaaaaaaaaaaaaaaaaaatccgcgattcgctcttctcttggaaaagtgaaaaccagaagtacgaacgaaagagaagagcgatttagaagtgagagaagatggggttgtcgttcacgaagctgttcagcaggttgtttgcgaagaaggaaatgaggattctgatggtaggtctcgatgctgctggtaagacaaccatcttgtacaagctcaagcttggagaaatcgtcaccactatccccaccatcggatttaatgttgagactgtggagtacaagaacatcagcttcactgtgtgggatgttggtggtcaggacaagatccgtccactgtggaggcattatttccagaacactcagggtctcatttttgtggttgatagcaatgatagagatcgagtggttgaggcaagggatgagctgcacagaatgttgaatgaggatgaacttagagatgctgttttgcttgtttttgccaacaagcaagatcttcctaatgcaatgaatgctgcagaaataactgacaagcttggacttcattcactccgtcaacgccactggtatatccagagcacttgtgcaacttctggagagggtctctatgagggtttggactggctttctaacaacattgccagcaaagcatgagacatttgaaaaattttggtcttgtctggtgatttcatgcgagtctggcggttcttggagaaagatgcttatcttttctagcgaatgttgtaatagcagaatgcttgctagaagtattctcttttgtgtaacttgggtttgtatgattgcttaaattagctaatacttttagctataattggaactcttgcaccctcttgtgcgtgcgtgctgtgttgcttacatcttgtttgtttgatttttgattgaatatatttccatgcgttttgttcttgaaaagttcactaatttttcagtttaaaagatcggttttgtccggttttccaaacattgataattaattgtgtaaaccaaactgttgggaccttaattctgacattgcccaggatttttatttttacctgtctccctttnattttnctcctcntttatagtagcncagtg

SEQ ID NO: 6982 - DNA, 1223 bp, Glycine max
  misc_feature (26)..(26): n is a, c, g, or t
gtacgccctggcaggctacccgggtncccgcgaattcccgggtcgtctctctctcactctttctccgagaacaaaaaaaaaaacgtgattcgctcttctcttcgaataaaccacaaaaccaacaaacgagaagaggagtgagagaagatggggttgtcgttcacgaagctgttcagcaggttgtttgcgaagaaggaaatgaggattctgatggtaggtctcgatgctgctggtaagacaaccatcttgtacaagctcaagcttggagaaatcgtcaccaccatccccaccatcggatttaatgttgagactgtggagtacaagaacatcagcttcactgtgtgggatgttggtggtcaggacaagatccgtcctctgtggaggcattatttccagaacactcagggtctcatttttgtggttgatagcaatgatagggatcgagtggttgaggcaagggatgagttgcacaggatgttgaatgaggatgaacttagagatgctgttttgcttgtttttgccaacaagcaagatcttcctaatgcaatgaatgctgcagaaataactgacaagcttggacttcattcactccgtcaacgccactggtatatccaaagcacttgtgcaacttctggagagggtctctatgagggtttggactggctttctaacaacattgccagcaaggcatgagacatttgaaaatttttggtcttgtctggtgatttcctgctgagtatggcggttcttggagaaagatgcttatcctttcttgtcaatgttgtaatagcagaatgcttgctagaagtattctcttcttttgtgtaacttgggtttgtatgattgcttaaattagctaatacttttagctataattggaactcttggaccctcttgtgcgtgccttgtttgtgttcattttgttagtttgatttttggttgaatatttccgtgcgttttgttcttggagtgcttgttggtgatgatagttgaatgaggattagaaaattgcgccagtttttgctcttgggccaagagtcacctgttcaaatattgtctttgcgaaattccagttcagatagacttggtacctgtttgttttaaagttgagcagacctaattttgatagaattggttaattatttattgtgattcagatgtgtgtctaaattaattatagtaataaagtttatattgaaacatgcaaaaaaaaaaaaaaaaaa

SEQ ID NO: 6983 - DNA, 1069 bp, Glycine max
  misc_feature (22)..(22): n is a, c, g, or t
tttccggtccggaattcccggngtcgacccacgccgtccgaaaaaaaaaaaaaaaaaaatccgcgattcgctcttctcttggaaaagtgaaaaccagaagtacgaacgaaagagaagagcgatttagaagtgagagaagatggggttgtcgttcacgaagctgttcagcaggttgtttgcgaagaaggaaatgaggattctgatggtaggtctcgatgctgctggtaagacaaccatcttgtacaagctcaagcttggagaaatcgtcaccactatccccaccatcggatttaatgttgagactgtggagtacaagaacatcagcttcactgtgtgggatgttggtggtcaggacaagatccgtccactgtggaggcattatttccagaacactcagggtctcatttttgtggttgatagcaatgatagagatcgagtggttgaggcaagggatgagctgcacagaatgttgaatgaggatgaacttagagatgctgttttgcttgtttttgccaacaagcaagatcttcctaatgcaatgaatgctgcagaaataactgacaagcttggacttcattcactccgtcaacgccactggtatatccagagcacttgtgcaacttctggagagggtctctatgagggtttggactggctttctaacaacattgccagcaaagcatgagacatttgaaaaattttggtcttgtctggtgatttcatgcgagtctggcggttcttggagaaagatgcttatcttttctagcgaatgttgtaatagcagaatgcttgctagaagtattctcttttgtgtaacttgggtttgtatgattgcttaaattagctaatacttttagctataattggaacgcttgcaccctcttgtgcgtgcgtgctgtgttgcttacatcttgtttgtttgatttttgattgaatatatttccatgcgttttgttcttgaaaaaaaaaaaaaaaaaaaaaaaaaaaacaagactagttctctcccaaaaaaaaaaaaaaaaaaaaaaaaaaaaaaaaaaaaaaaaaaaaaaaaaaaaaaaaaaaaaaa

SEQ ID NO: 6984 - DNA, 1526 bp, Glycine max
aaaatgttagaaataggaaataaaataaagcgagtcggctgcggagggcaataaagaagtaaagagagagagagagagagagagggaaggggatgagagagggaggatgaggggcggtgaggagcgatcgacagggattcgaaagaagggaagcggagtgagacaatggctggtcctggacggcagaggagagacggaggtggtggaggccgggaagcacgccatcatgaggaggacgggactccccgcgcgtgacctgcgtatattggaccctctcttgtcatacccttctacccttctgggtcgtgagagggccatcgtcatcaacttggagcacatcaaggccatcatcaccgcccacgaggtcctcctcctcaactctcgcgacccctccgtcacccccttccttcaggagctccaggccaggatcctccgccaccaccaccagactctggccgatgccaaccccaaccctgacgacgccatcaagattctccccttcgagttcgtagcccttgaggcctgtctggaggccgcttgtagcgtcttggaaaacgaggctaagactttggagcaggaggctcatccggccttggacaagctcacctccaagatcagtactctcaatttggaacgcgttcgtcaaattaagagccgattagtcgccatcactggccgtgttcagaaggtcagggacgaattggagcacctgctcgacgacgacgatgatatggctgagatgtatctctctgaaaagctagccgaacaagatgacttggagaaggcggaggatacctcttctgccgacgatgttgatgatcacattgacaggaccgctcctgaaatatcgttggacaatgttgttggtagggacagccatggaactcgcgatagcgccacctacagcgccgtcaccaagcaacttgatgtcgaggagcttgagatgctcttggaggcttactttgtgcagattgatggcaccttgaacaagctctctacgctgagggagtacgttgatgacacagaggattacatcaacatcatgctggatgacaaacagaaccatctcctccaaatgggagtcatgttgaccacagcaactctggtagtgagtgcctttgttgttgtggccggtatttttggcatgaatattcacattgagctatttgatgaccagaaagctgggatgacacaattcctctggactgttggtggtagcactgcagggaccatattcttgtatgtggttgccattgcctggtgtaagcacaaacgcttgctagagtgaccaggcgtcaaatagtgtttcataaacaaatgtaatttaacttgaaaatcaccttttgttcatgtgctataaattttagtagcagacagtgcagtatcttgttgcttcttgtactcgtatgatccttcagcttcaacgatgttgctcatcttgtacattattccgtgcttaaaaacattaattttatggacacttgtctttccaataacagttttgttatttgcacaaaaaaaaaaaa

SEQ ID NO: 6985 - DNA, 1686 bp, Glycine max
aactagtcaactttagaacaactgattcagtgcttggccttatcttcagaatatgcatgcagttcatataatacggatctctcattgctacctttaacagcattagcctctggaagcacttgatcaagactcgagtgaacaaaaaaaaaatgatgggtacccttaaggtgtccaacagtagtttatacatattttcgaagttcctagtaatttgtatggtgatgatgatatctttggttgattcaagttattccttgtgtgattttgaggcaatcttcaattttggtgattcgaattcagatacgggtgggtttcatacaagctttcctgcacagcctgctccctatggaatgacttacttcaaaaaaccagtggggcgtgcttctgatggaaggcttattgttgattttctcgctcagggtcttggattgccatatttgagcccatatctgcaatcaattggatcagactatactcatggggctaactttgcgtcttcagcctccactgtgattccgcccacaacttccttctctgtcagtgggctaagtccattttccctctctgttcaactcaggcaaatggagcaattcaaagccaaagttgatgaatttcatcaaacaggaacaaggatatcatctggaacgaaaatcccttctccggatatatttggaaaggccctttacacgttctatattggccaaaatgatttcacttccaaaatagcagccactggtggtattgatgcagtgaggggcacccttcctcacatcgttttacaaattaatgctgctatcaaggagctatatgcacaaggggggcgtagatttatggtattcaatcttggtcctgtgggatgctatcctggatacttggtggagcttcctcatgctacttctgactatgatgagtttggatgcatggcttcttacaacaatgctgtaaatgattataacaaactgttgaaatatacattgagtctaaccagagaaagtttagtagatgcttcccttatttacgtggacaccaactctgctctcttggagctctttcaccaccccacattttatggactaaagtatagtaccagaacatgttgtgggtatggaggcggtgtgtacaactttaaccctaaaattttgtgtggccatatgctagcaagtgcttgtgatgaaccccacagctatgtgagctgggatggcatccatttcacggaagcagcgaacaagattgttgcacatgccattctaaatggttctctttttgatccccctttccctcttcatgaacattgtgatctccaacctattggttgatccaatgcttgcggctagggaggggtctttcttctttaccaattaaactattttgaaatgctcagccatcatattgttaaataatgtttttgatttttggggtgtcactttcatgcttgtgtgtaatagtttgaacaaaaacatggtacttgttggtagcattacaatttgatgaaaaacaaaaatcatatacaagttcaagttaaaaaaaaaaaaaaaactgcttgtcctgaactaattggggttcagagttgtcctatcttcatagaaagattgttatatgttgtaatgttttttatttgagtattcacaaaaaaaatgttttgatttgagttccaataaaaattccatcagatttgagttctaaacc

SEQ ID NO: 6986 - DNA, 1781 bp, Glycine max
aacagaattagattttgcaagaactttagagttctgagtaaaaaaataaataatttcttgaatcatatgaatttatatgttgtaagcttttagctctttatatgcatagtaggtaactatcagcaatccgtttgttaattagtcaactttagaacaactgattcaatggttggccttatcttcaaatgcatgcagttgatcatataatacgggtctctcattgctacctttaacagcattagcctctggaagcacttgatcaagactcaagagtgaacaaaaaaaaatgatgggtacccttaaggtgtccaacagtagtttatacatattttcgaagttcctagtaatttgtatggtgatgatgatatctttggttgattcaagttattccttgtgtgattttgaggcaatcttcaattttggtgattcgaattcagatacgggtgggtttcatacaagctttcctgcacagcctgctccctatggaatgacttacttcaaaaaaccagtggggcgtgcttctgatggaaggcttattgttgattttctcgctcagggtcttggattgccatatttgagcccatatctgcaatcaattggatcagactatactcatggggctaactttgcgtcttcagcctccactgtgattccgcccacaacttccttctctgtcagtgggctaagtccattttccctctctgttcaactcaggcaaatggagcaattcaaagccaaagttgatgaatttcatcaaacaggaacaaggatatcatctggaacgaaaatcccttctccagatatatttggaaaggccctttacacgttctatattgggcaaaatgacttcacttccaaaatagcagccactgggtagtattgatggagtgaggggcagccttcctcacatcgtttcacaaatcaatgctgctatcaaggagctatatgcacaaggggggcgtgcatttatggtattcaatcttggtcctgtgggatgctatcctggatacttggtggagcttcctcatgctacttccgactatgatgagtttggatgcattgtttctcacaacaatgctgtaaatgattataacaaactgttgagggatacattgactcaaaccggagaaagtttagtagatgcttcccttatttatgcggacacacactctgctctcttggagctctttcaccaccccacattctatggactaaagtataataccagaacatgttgtgggtatggaggcggtgtctacaactttaaccctaaaattttgtgcggccatatgctagcaagtgcttgtgatgaaccccagaactatgtgagctgggatggcatccatttcacagaagcagcaaacaagattgttgcacatgccattctaaatggttctcttttttatcctcctttccctcttcataaacactgtgatctccaacctattggttgatccagtgcttgcagctaggggtctttcgtatttaccgattaagctattttgaaatgctcagctatcatattgttaaataatgttttggtttgtgggtgtccggtgtcactttcatgcttgtgtgtaatagtttgaacaaaaacatgttacttcttggtatcattactatttgatgaaaaagaaaaaaaaaatcaaatacaagttaagctttgataaatttctgacactgctgaaaaaattggcattcagagttgtcctatcttcctagaaagattgctaaaagtatgttgtaatgttttgtcctatccaatgattgtcacatttatc

SEQ ID NO: 6987 - DNA, 1252 bp, Glycine max
aaaatcaaagccttaattctgaagtataggtacaatacatgatactactagttaacaaattgaacaataaatgttcgtttctcggttcttcctcattacaacaatatcgttcgatatccccaaagacactgcttcgaaaccctaattcagaaaccaatggaaccagaaaccaaatgcatagagctgaaactaatttcctgcaaggacataagcgccttcaacttcttccaaaaactcaccctttacgcgctcgtcttcatcgagagcgaggatcccaatacggatctaacggcggaacagaggcagatgcagagaacgttaacggaccgagaccccgacggcgatggcagcaacccagagtggaatcaccacgcgcgtttcgatttgtggtggctttcgcactcttcgcgcgattccgatggatcagatctctttctccgcttcgagttccgccatgacggcgtcgttttaggcgacaagctcgtcggagaatgccgcgtgccgctcgccgatctgatccgcgacgccgccgacggtgcggcgaggttcgtgagctacgaggtgaggtccggggaaggtaggcccaacgggatcttccatttctcgtacagcgtgaaggggattggggcccacaggtcgcagattctcgaggggagaatctccgggtacccggttctgcctccggaggattgcgctcccaatcaggtgcaacaatatccatatcctacatgtcaaattgagaacacgtgttgttacccgacggttgcgttgccggtgggttctcccgtctattccgccgcagttccgccacctgtttttactccgtcggatggagagtatcattgttattacccgcctccgcctccgccgccgccggtggtgtatccataccctcctccgcctcctccggtgttgcatgcttactcgccttatgggccggaggcccatccctatccaccaggcccgtattgtaaacgcaggtggtaatgtactttaacaaagagtacgaagcccagcccatattttctgaagagtatatttcctcaacgagacaacgacagtgttcacgtagctgtacagtatttttttttatttaatttctcttctaattttatgtacggaaatttagttgtaaacaattttttggtaatgctcggagtttttttttggtattattgttttggtcttaagtatgtttttcttaaatttgtttttcatcccttcaatatattatcttttcagtttactgtct

SEQ ID NO: 6988 - DNA, 839 bp, Glycine max
  misc_feature (828)..(829): n is a, c, g, or t
  misc_feature (837)..(837): n is a, c, g, or t
tcgtacggctgcgagaagacgacagaaggggacactaacactacaagttcccatcttcaccacgaagcattcttagcattctacagagagaaaagtgacactctacaatggttccaaagcttagtggtgacgtggatgatggtggaactgggcttgaaactaagcctatctgaacaataccctcctcttccttcttctattaaggttgaagttcttagataagaagaagaagagagcataagatagccttttgaagctgaaagcaaattttgtgaagtagcatatatactttcaatttgtttagttcttctgggtggagttccttcatttggtgtttgtagtcatggaggtttcttggttctataccttttgcagctttttatggatccaaccatcccaaatgtgccaatggttcaaaagaaatgatatgataacagaagctcatctcctttgttaccagattgacctgattgagtgttagacttatttgtagaggcagatctcctttggaagtgtaaccctcaatattggaaaatgaagcttcatctatttcagatatctatttatgattgaagattcagctgtactgggcaaatcttctttggcaaaagttacttaattttcctttggttggatacttggattccaagtagtaaaaatatatcaacattattttttgccttcttaaaatattaccattcagagataatttctctaggaactccaccctttcttggggggcaaatctcctttggcatcttttgcttatcttggtctgtttcctccaatagccagaatttttttctttctgtaaaccaccaaaaaaannaaaaaaanaa

SEQ ID NO: 6989 - DNA, 1561 bp, Glycine max
gctgtattgtactctttattttctatttggtctgaccgaaacaaaatgataattgcaccgtcaaccatgccagataccacccaccacactacactcttttagttcctttttatttgtacaaaaaataaacaaacactagaacttaggggaagaatcatccatccaagtgtaagaatacagaagagtgcacaatgcgcataccctaccacaagagtgtgcatgctgtactatactatctgcctacgaatactgtacataataaccatcaacccaatcatcatccaaactcataatacgtcaccgtatcgtatcataacaccccaaacacatagccacgtcaccctttatccaggaatacacatctcactcacactcgcgtgtccttttacgtcatttcacatcacgaggagcaagcggcagcaatcgagtgacgcactccccacggcaaaaaaccatgcacccgcaccaaaaccctggctgcgattctacgaatcggagaacagtgacggcgagtggcgaaagagatcgtacggagcccaaagactatccaacggacacggcttcttggaatcgattcgcagccacggcttccccttgccgctccagtgaagtaaactcaccggaccgggatgcagatctcggcagagaccttcgaggttatcgccgcccaggccgtgctggttccaccggtgctctacgcgctccacgtcaccggcgaaaacaagcagaaacggtggcaacgaacctagttcatagatccggttccgcttctggatccgcatccacgtctcaagcttctccgtgtatcttccctcgcgccatttccacagatcgatcaccattacgccagtgttgaagtagcacgcgtcgcgtctcttaaatgacgccgcgtagctagggtttgaccagaagcggtgcgtgaagtagttggtgaagttcgcgtggcagtactccggcgcgccaagcacgcgcgcgtggagatcgatgctccagagcttcgccacgtcatcaacgacgatgaggtcggagtcgaagtaaatgattcgccgcacggtcgccggaagaagatctgcgaggtacatgcgcgcgtagtttagcggttgatccagcgcgcgccggatcgagtacgagatcttgccgcggacgaggttcgcatcgaagtggtagaggtggaaggagaggtacgggaacgtcgcggtgatgatgcgacggagctccgtccggcggtgcgtggtggcgatgaagtggaacacgacgttctccggacacgacgcgtgctgcagcacggagaacactccggcgacggagcctcggaggtaggtcgcgtcaagcgtcatcgcgatgtggatcacggagtcgcttcgcgggcggttgcggcattctcttccgttgcggaatgccggcgcctcgcggaacgttggaagctcgccggtcgccggaaaatgcgcgtccacggcggcgaaaaacagcaccaccaacactagtgagagtgagagtgtcggtggcatggtgacgaaaggggagaatcgaaaaaaccagacagcgaagagtgttggagagt

SEQ ID NO: 6990 - DNA, 1218 bp, Glycine max
cccacgcgtccgtacggctgcgagaagacgacagaaggggacaatcaaattaaaataaacctgagagatcagatacaaagagatcgagcaatggcattagtgtcttcactttctcctgcgaccccttcttcggttcaaaccaacactttgaacccattgggttggactgatgatcagatcctggagaaggtttacattacccacgtccacaccgctgaaaggtacgatgtggaatcgcttttcaacgttactgcaaacatcatcaagcgttctactgcacttgctgacagtgttgctgttaagactggcacacccgttggtcttattgaagacaaggttcctttgtccactttcgacccaccgttcctaaaacttaagcatattgcttctcagatgatgaacacaccgcacggtgagcatcatgcacacagcacagcaatgtcgatccttgaccagctgagaacgtacacatgggatggaaaagcgatattggttctggcggctttggctttggagtatggaaacttctggcacctcgtccagactccgagtggagaccatctgggaagatcactggcacagatgagccgagttcacatcgtggagaggaacaggcaagccgtggctgactacaacagcttggtcaagaacttgctcatcgcggttgagtgcatcaccgagttggagaggctttccaccaaaggttatgacttgaaggacgtcccagccttggcagaagccatgcaagagatccctgttgctgtctactgggctatcgtcaccactgttgtctgtgctaatcactttgatttcctccttggtgaatcggactctagatacgaaatagccaattttgacgacaagcttgcagctgttatcagcaaattaaaggcgaatctcaccaggagcagaaagaaaataggtgacctagaagactactggaggcgtaagaagttgcttcaaacccccacagaaattgtagaggttctcaaggttctgatctaccacaacgaagttcacgacccccatgtctacgatggactcaccagacaaatggttagcatcgaagtgttcaagaagaaacacgtgttactgttcatttcggggcttgacagcatcagagatgaagttcggcttctgcaatcaatctatgagggattacaggaagatccaagggaagtgaaagggtacaggaaagaagatttcaagattctgtgg

SEQ ID NO: 6991 - DNA, 1807 bp, Glycine max
cggtccggattcccgggtcgacccacgcgtccggtgacctgaacactacccttctcgctctgtttatgttactaccctaacaagtttgacaaaccccaaaaaagaatcaaactttccctcaaattttcactcttttctgcaccgccagtgatgggagatgggtgcgcggttgagggcaccacggggaattccaattctaataacaataataacaataagaagaagaacaagaagaagaagaacaggggtgggagcaagaagaagatgacccacgaacaggtcttggccttcaagttagtgagtgagtgggttttcttggatcacccttctgcttcgtcttcatcttcttctgctgcttcctgtgttgtcgatgattttggtgttcagaagcctctagggagaggcggggaaaagctcctctttgaattgcattcgcactccaaattcagcgatggcttcttctccccttctaaagttgttgaaagagctcacatcaacggcgtgaaagttcttgctctgacagatcatgacactatgtcaggcattcctgaagctgtagaatcagctcgtaaatatggcatcaagataatcccaggtgttgaaattagtaccatattttctccaagaggagactctgaagtagaggaaccagttcacattttagcatactacagcagtattggaccatcaaggtttgaggagctggacaagtttctatcaaatataagggatggacgttttcttcgtgcgcagaacattgtcttaaaaactgaacaagctcaagttgcctcttaaatgggagcatgtttgcaggattgccggcaagggggttgcccctgggaggcttcatgtcgcccgtgccatgcttgaagctggttatgtagagaatctcagacaagccttcgctcggtatctctttgacggtggacctgcttactccacgggaagtgagcctctggcagaagaagcaataaaaatgattagtcatactgggggtgttgctgttctggctcatccatgggcattgaaaaatccagttcccattgttagaaggttaaaagaagctggtcttcatgggatggaggtctacaaaagtgatggaaggctggcagcatatagtgacttggctgatgcctatggacttctaaagattggagggtcagactatcatgggagaggagggcacaatgaatctgagctgggaagtgtgaaccttccagtgatagtgttgcatgacttccttaaggtagctcggcctatctggtgcaatgccatcagggagatattagagtgttatgctgaggagccttctgattctaacctagcaacaattactaggtttgggagaacctggagttttaagggaggttcaccctttagttgtggacaggacttgattgatcattgtttacctctctggttgtctagccaggagatggaaaatgcagagtttgaagctatcaagttaaagctttccaatgtttcagttagtcagggaggaattcaggttctcatagagactaaataaaagttgtgtaacttgatatgtcaccttaaatcattctcagtattgttggcagccaaatcttaatattaaatttgttagtcaagttcaaatgtctattgattctttttgaaaattttctatgacctttgagcaaacatttctcatattattggtttatcttctacactgatgtatttttcttttctctattttttcttaatgcaaacttgtcagaaaaggttgtatgtacaaaaattgaaacaggagggtttccttcttcaatgattgatacatgtttcg

SEQ ID NO: 6992 - DNA, 2115 bp, Glycine max
tcgaggtcagctacgtaggccccccccccccccacttcattttcctgtgttcaattcacataatctctctcgctctcatattctccctatcacagtctggttcagtgccactcctgctgacatttcacctacaagttccattcaataagccatcagttaattggaaaggtagttcaccccctcattgttttgtgggggaaaacccacaatacaaaatgggaaggcactcttgctgttacaaacagaaacttaggaagggtctttggtcaccagaagaagatgaaaaacttctgaggcatattacgaagtacggtcatggatgttggagctcagttcctaagcaagcaggtttgcagaggtgcggcaagagctgcaggcttaggtggatcaattacttaaggcctgatttgaagagaggtacattctcacaagaggaggaaactctcatcattgaacttcatgcagtgctagggaacagatggtctcaaattgcagctcaattgccagggaggaccgacaatgaaataaagaatctgtggaattcttgcctaaagaagaaactgaggcaaagaggaatagaccctgtgacacataagccactgtcagaggttgagaatggggaagaggacaaaacaagaagccaagagttatccaatgaattgaacctcctgaattcagagagcttcaagtcagatgaagggtcctatgagcagagagcatcatcatcaattgcccccaaagcctatgagatggaaggctcttgcagctccaagattaacaccaccaaaaatgacaccaacttgatgtccaattgttccaacaaagacatgttcttagacagctacaccactagttgccaaccctcagatttgatgggaaattaccctcttcaaatcactgacactctcccaaccaattcaaactcttgccattggttcagccaaactgcaagaccctttgatatgaactctgagtctacaatcacttccaatgttatgtccattcttccacctacaacaacctcatttctcccaagcacttctttttgctacaagccatcacttggtgtcccttcagaagatatttcaacagcatcttttgctttgaatggtcccaattactgggaagccagtgcctccaacaacagcaatggaagcaacaacacaagtgatggcagcagagagttgacaactacaagtagcaagaacagtgtactctcttcttggggattgacagaagaaacaaagtggtctgagtacctccaaaacccaatgctaatgctggcagctcctgaatcattgtgcaaccaaattaggccagccacacatttggtacctgataacactttagggtcaataatagtgcctgattccaaggaccaacaacaacaacaacaatctcaaaattctagcatcttctccaaggacacgcagaagctaacagcagcctttggacatatatagcaccaggctttgacacaatgaaatactattttagaagggctccaagggatttatttgtgttcttagtacaggtgtgtgaaacaacagattaattttgctcttgtatatagataaggtctgtaaaaaaaaaaaaaacattttggtaatacatttgtgagccaaatcatttgttttttttaccttctcgggtgtgggtggaatagaattgcagaataaggattgctctgctttgttctttctactctttcttttcatttccttgctacactgttgactgcattgcaacggtgcattcattaacttccaatacttttacaccatccacagatgtttattagcacacgggaagtatcacttttagttactttgaccacacactatttaccgaatctctttcatccgttatgatcttctattcttctctcaccgcactatcttttagagtactcaaaatggcatcaaacttgtgcagccaaaactttaccctatccaatatcctaagggttgcccatcattttcttgacacaagaatgatttattctattttatttatttcacttccataaataatagcctaagtttcaagactttcccatctaagcaagttttaattttacttgcacaaggaggtgaccgggtgttgttatctctc

SEQ ID NO: 6993 - DNA, 2216 bp, Glycine max
cccgggctcgacccacgccgcccgcccgcttccccgctcctcccccccgcccgctctgtcgtttactcttcttcttcttcttctctgtgtgtttttccgttttcgttcttccgagaaaccaccgtcgctcgccgccgatcacgacggagatttccccagtttagtttttgtttgtttttccgattccatgtattttccgtgctctgccgccgccgccgtaagccgcctcacgtgaccaatgggttgcgtgctcgggacgccggccggtgccggacatcagcgccgccgccgccgccgtagcgagaagcccgacggagcagccgacgaagctaataatgcagttagggttcgagaaaaggagaggaaccggcacaccggcgattttccggggactcttccggcggcagagcgccggaaacctagactcgatccgtgcgccgtcacgcaacagggatggccttcgtggctgatggccgtcgccggcgaagccatcggagactggactcctcgtcgcgccaacaccttcgagaagctcgctaagattgggcaagggacgtatagtaatgtgtataaggcaagggaccttgtgacggggaagatagtggcattgaagaaagtgagatttgataatttggagccagagagtgtgaagttcatggcaagagagatacttgttttgaggaggcttgatcaccccaatgttgtgaagcttgagggtttggttacttctagaatgtcgtgtagtctctatttggtgtttgagtatatggagcatgatcttgcagggcttgctgctggtcaaggtgtcaagttcactgaacctcaggttaaatgctttatgaagcaattactctctggtcttgagcattgtcacagccggggggtgttgcaccgtgatatcaagggctccaatctgcttattgacaatgaaggaatccttaaaattgcagattttggactggcaactttttatgatcctaagataaaacaggcaatgacaagcagagttgtgaccctttggtatcgtccccctgagctgcttctaggggctacagtttatggtgttggtattgatctttggagtgctggttgcattttggcagagctgcttgctggaaagccaataatgcctggccgaacagaggttgaacaactgcacaaaatatttaagttgtgcggctctccatctgaggaatactggaggaagtatagattgccaaatgctactatctttaagccacagcagccatataaacgttgcatcttagaaacatacaaggattttcctccatcttcactacctctaattgaaacccttcttgcaatagatcctgatgatcgttgcactgcctcagcagcactaaatagtgaattctttaccacagagccctatgcttgtgaaccatcaagtttgccaaagtatcctcccagcaaagaattggatgtaaaactgagagatgaggaagcaagaaggcaaaaggctttaaatgggaaagctagtgcagttgatggtgccaaaaaagtcagagtacgtgagcgtggcagggctgttccggcccctgaagccaatgcagagatccaaacaaacttagataggtggagagttgtgacccatgcaaatgcaaaaagcaagagtgagaaatttccacctcctcatcaagatggagctgttggatacccacaagatgcatcaaataaaggacctgtttcatttggcgcccctgacacttccttttcttcagggatatttaattcgaaaccttctggaacggttaggaatcatggtgctgcagggcttcacagagggaggaaaactaagaaagatgagtcccagatggcgtcatcatggaaattcatgcgtccattcaagccatcaacagttggactttccatggatttattatttaggagcaaataatcaatcagtttcttttgattttggcatcctagaatgaggatagtgatgatttaggccttgatacatcttttttgcatttcgaaatggttttcatttattttttttcgtgtcagttcctattttttgtatttcatttggcataaagttgttgtataatctacaacggggatccttacatttgtatatttagaggattaaattctctgctgtacagtttctgggaggacttagttcttaaggaccttggaaatgttttaatttagctagtaaattattttttaaaaaaaaaaaaaaaaaa

SEQ ID NO: 6994 - DNA, 1220 bp, Glycine max
  misc_feature (1203)..(1203): n is a, c, g, or t
agtaaaccaaaaacaaacgaactctattatttcaccatcatgtcgaatcaacccattgacccctatcaatacctccaaatcttccgcaaccccgacggcaccttcactcgcctaaacgacgccgttccatgcaccccaccctcttccgaccccactctctccgttctcaccaaagacataaccatcaaccaacaaaacaacacctggctccgtctattcctaccccgaacagcactatcctcaaattccaatcccaagaagctacctctcatcgttttctttcacggtagcggcttcgtgcgactcagcgcggcttccacaatgttccacgatttttgcgtcgaaatggcgaacaccgcggaggccttcgtggcctccgttgactaccgcctcgcaccggagcaccggcttccggcggcgtacgacgatgccgtggaggcgctgcggtggatcgcgagcagcgaagaggagtggttgacgcaatatgcggattatagtaagtgttatcttatggggaatagtgctggggctactattgcttaccacacaggtctacgtgtgtgtgaagtggcgaatgatctcgacccactgaagatccaaggcttgatattgcgtcaaccattctttggtggaactcagagaaacgagtcagagttaaggcttgagaataacccgattcttccattgtgtgttaccgattttatgtgggaattggctctaccaattggtgttgatcgtgaccatgaatattgcaatccaacggcagagaatggggttgagaaattattggataagatgagggagcattggtggagggtattggtgagtggcaatggtggggacccattggtggatcgtggaaaggagctggcacggttgatggaagaaaaggggttgcaagtgatgaaggactttgaagaagaagggttccatgggatagaaattttcgatccactgaaagcgaagcaactcattgctttagtgaaagatttcatttacatgatcggtgcttagggtcaacgttgtaccaaacacaagtttcagtgtgttgttgtcattgttagcatagcatgttatcttttttattaacaataattataatcactcgatttgtaacgaataaaaaatgacttatgtgaataaatacgttctgtgataaacaagttatttttaaaaaaaaaaaaaaaaaaaaaaaaaaaaaancaaaaaaaaaaaaaaaa

SEQ ID NO: 6995 - DNA, 917 bp, Glycine max
aatactcaatctagtaaaataactatgaataagtttgtgctggtactatttactgtttcctgggtccttctctttggtttgctagatggtaaacctcccataggcagtggtcgagtaatatgggacactggtggccaacagctgttcgcatcttatgcatactacattacggcaaggcatcctgatttaggcagtggtggcctcaaactcatcaagactggaaactcaacttgcccaaatactattttgcaatattttcccaagtacacccatggcctgccaatgtatttgctcatatctgtaataagcaatttcatcgtctatgaaggtaccccactggctatttttatggcaaagaagccaaattgtgttgaatcgttggttcctgatcctatgaagggatctccggatccaccaagtccattgaatcccccaaactcctctagattgttggtgtttgtggacaattcaatccacaagacatgtgtgggtactgctggtcctgaagctcatccaggcctactaacgtatagtggcacttttcacattgagatcctagaaaacgttcgatttggatacagctcttacaagcttgtgttttgtttcgatggctcagactaccaaaattgttcctatattgggacctatgataatggtgagggtggaagacgtttgattctcactgagactaatcccttcttattttcttttgttcatgcacttaaatttgatgggactattaagtccgtaggttgaatgatatatctcaagactagattagattaagattagatggtcttgagtgaatgtaatcacatactttgttgttttgatctgcattaactctgctccaaataaaacctcaatgcaaacattgaataagtgaaatgaataattaatggttatgctttcttgta

SEQ ID NO: 6996 - DNA, 1080 bp, Glycine max
tcagctacgtaggccccccccccactatcaatccaggcccatagaaagaagcagttcagtttttcggattcgggttgcgttctcattttggatctgaactgaagcacactccgttatgtacgaggcatcataatagcattgaagcaacggcggcggaaaccaccgttcgacgccggagacacgatctgtttctacctctgatttcttctcttcagtgtaggtatgggaatcagtaaaacagaagtaaacttgaggaggttgcttgcagctgctcctcaacagcaaaatcaagcaaaacttgtgcattatgttgctactttgcgtgaacaattagaacaattggctgaagaaaggacactggaaggcttacccaggatttcaaaggctatgttgaatgattattcagagaagattgaagccattgcttccaaattggttaatcatgtgattgacacacaagtacccgagaaggacttcgaaaggaattttgttaaagaaaaacattctgaaattgaggaaaaaaagcagatactcctttcttctggattgagaagaaggcctgtacctgcctcaagtacggaagatagagcgcatgagcctgctgagactgaccacacatcacctattaaactggatgctacagcacatgcacacattgaaaagcacagaaagcttcaagaagatttgactgatgaaatggtggtttttggcaaaacaactcaaagagagtagtctcacgatgagccagtccctgcaaaatactgaaaagatacttgattctacagagaaggctattgaacatagcttggcaagcaccggtcgtgccaatgtgcgagcaacggcaatctactcggagagttctaagacttcttgcttaacatggcttgtcatgtttgtcatgacatgcgtatttgtcatggttattcttctagtccgtgtcacatagtgtaaaagaaataactcccaacataacttaccacaatttttttttggtttgtagaaatcgaagacagtagtgtgagggagtttacaacaatttacacatctttgctcaattaagtgagctagattccttgacgc

SEQ ID NO: 6997 - DNA, 1967 bp, Glycine max
agaaaggttgaaaaagagttccttcttggtcccaccgagcaactaacaaaacccggaagaaagtattggtctgttacattacttgcttcctctcttcttcttcttcctctcttcttcttcttcttcttcttcttgtcatggctgctgcgtctaatctctccactctctcctcctcttccctctccaaacccccgtcctctttccctttccgcaacacaccaacaaacaacaacgcttcttttctacacaacaaatcccttccaaaccaaaactctctctctcacaaactctcttcccctctgcctctcgcatgcaacccaaaaaaccaaaacacttgtgtcttcttcgacgacgaagaccaaaagccccgtgaagagtgcggcgtggtgggcatctacggcgacccggaagcctcccgtctctgctccctggccctccacgccctccagcaccgcggccaagaaggtgccggcatcgtagccgtccacgacaaccacctccaatccgtcaccggcgtcggcctcgtctccgacgtcttcgacgagtccaagctctcccgcctccccggcacctcggccattggccacgtccgctactccaccgccggccaatccatgctcaaaaacgtccaacccttcctggccgactaccgcttcggctccgtcgccgtcgctcacaacggcaacttcgtcaactaccgctccctccgagccagactcgaacacaacaacggctccatcttcaacaccacctccgacaccgaggttgtcctccacctcatcgccacttcaaaacacaggccattcctcctcagaatcgtggacgcctgcgagcatctccaaggcgcctactccctcgtattcgtcacggaggacaagctcgtcgccgtcagagaccccttcgggttccgacccttggtgatgggtaggagaaccaacggcgctgtagttttggcctccgagacatgcgcgcttgatttaatcgaagccacgtacgagagagaggtgtacccgggtgaagttatcgtggtggaccacactggaatccaatccctctgcctcgtgtctcatcctgagccaaaacaatgcatcttcgagcacatatacttcgcgcttcctaactctgttgttttcgggaggtccgtgtacgagtctagaaaaaaattcggagaaatactagcctctgagagtcccgttgagtgtgacgttgtgatcgcggttcctgattctggcgttgtggctgcgcttggttatgctgcaaaagctggggtaccctttcagcaggggttgattaggtcccactatgtagggaggactttcatcgagccttcgcagaaaattagggattttggagtgaagcttaaactgtctccggttcatgctgtgcttgaagggaagagggttgtggttgtggatgattccatcgtgagaggcaccacgtcgtccaagattgtgaggctcttgaaggaggccggtgccaaggaagttcacatgaggattgcatgtcctcctattgttgcttcgtgttattatggagttgacacacccagttcagaggagttgatatccaaccggatgagtgtggaggagataaggaagtttattgggtcggattcgctggcttttcttcccttggataagttgaagacattgttaggggatgatgctcttaactactgctatgcttgcttctctgggaagtaccctgttgagcctgaggaacttcaaatgaagaggcttggtgttgctcacttcaattgggacgacgacttcaatgggaatttcgaatctattgatgtggggggttgggttacaaatcaagatgggtttaagattggtagtgtctaagaatgcttttgtacttagataactggccaatcaaaatattgggtaaataaatgtcaaactatccatacaactaattatacaataaaatagttcgcattctatttcggaattctggattct

SEQ ID NO: 6998 - DNA, 1738 bp, Glycine max
  misc_feature (26)..(26): n is a, c, g, or t
cctttcttatatgattctatgtaatntgtgggacccccactacttgcaagattgttgttagcacggaattgtagtctttgcagaaaattaactacaaaaagtgaccacactaagtgcaaaatagggatttaacatagcactacgtctccacccactcttattcaacacaccacatattctctccatagacaaacattgatacagaaattccttctttcttatctcttattttagcttcgagttattatctttcatcaaaagcaagagtattttaaccgagtgagtccaactcttgcgaatgcgactcgtggttcagtaagaatctgattagaattgaaagttaaaggttaattgtgatcactagctactatttggtgcactgtgaaaaataaacacatgttgatgaacttgaaaagagccccttgttcactataaattagttgtggtagtttccactgccttagctgcaaactaaaccaattttcttcgtctgtgtaacaaacacttcaacaatctactctatacccgatttacaagatgagttcatttagccaaaatccctatgttttagttctgttcctcgttctcactgtgtggatatcccgtgtaatgtctcgcgggctcattacatctgagagacatgagaaatggatggcacaatatggtaaggtttacaaggatgctgcagagaaggagaaacgtttccaagtattcaaaaacaatgtgcagttcattgagtcattcaatgctgctggggacaaacctttcaaccttagcattaaccaatttgcggaccttcatgatgaagaatttaaggctttactaattaatgttcagaaaaaggcaagtagggtggagacagcaacagaaacatcgtttaggtatgagaatgtaactaagattccttctaccatggactggaggaaaagaggtgctgtcactccaatcaaggaccaaggctacacatgtggaagttgttgggcatttgcaactgtggctactgtcgagagtctccatcaaataactacaggtgaattggtgtccctatcagagcaagaactagtagattgtgttagaggtgacagtgaaggctgccgtggtggttatgtggaaaatgcctttgaatttattgctaataaaggtggaataacaagtgaagcatactatccttacaaaggaaaagatagaagttgtaaggttaagaaggagactcatggtgtggcacggattatagggtatgagagtgttccttctaatagtgaaaaggcactcctaaaagctgtggcaaatcaaccagtttcagtttatattgatgcaggagcaattgctttcaaattttactcaagtgggatttttgaagcaagaaattgtggaactcatctagaccatgctgttgcagttgttggttatggtaaacttcgtgatggtacaaagtattggctagtaaaaaattcatggagcactgcatggggtgagaaagggtacatgaggatcaagcgagacatacgtgccaagaaaggcttatgtggaattgcttcaaatgcctcttatccaatcgcttaataagtgttcttgataattcatataaatctgaaaaggtcattataatcgtatatatgcacgcatctaccaaaaaataaataatcgtatatgcacgcataggttgtgctagtactaaaattgcgtgtaaacttttatttcaaccatatataatgagaataagatattgctagtatgg

SEQ ID NO: 6999 - DNA, 1755 bp, Glycine max
  misc_feature (1754)..(1754): n is a, c, g, or t
tacgtcagctacgtaggcccccccccccggagtatggacgtgtgttagttggctaatgaggagtcctcatttttcttcatctgtatctgaaccctaatcccttcggaattggaaagaataagaatcatcaatggagggagtgctgtccgcgaatgagcaacagagcatggtctcttctttcctggaggtcgctcagggccagaccgccgagactgcgcgccagttcctccaggccacaagttggaagcttgaggaggctcttcagctgtttctgatagggagtgaaggtggggccgtgccgttgccggtgccgccgcctccgttgttgcacactccgcctttggaaaatgtcgattcctggaccgatcaacagcctttgagtgaaccgaggaaggacgctgcggctgcaagtgaaagtattggcctcaatgatgcggaagaggtgcgccctcccttgcctgtaataagggaaactctctacgacgacgcgatgctgtatggagcatcaagggctgggcatcgttcacatgaaccgagctccctagttgcatttcgtaactttgaagaggaaatgagacaaccaggggtttgggagtcggaacaaggtgctgcttctacagcagaggcttctcgagataatcttgcttcactttatcgccctccatttcatctaatgttcaatggtgcttttgataaggcgaaagatgctgcttccatgcagaacaaatggttgttggtgaacatacaatctaccaaggaattcagctcacacatgcttaaccgggatacatgggccaatgaagccgtttctcagactattagtacaaactgcatattctggcaggtatatgatgatacaactgaaggcagaaaagtctgcacttattacagactggattcaattcctgttgtacttgttattgatcccatcactggccaaaagatgcgctcttggattggaatggttcaacctgaaagcttattggaaggtctactagcattccttgatgcagggcctaaggatcatcatattaccatgtctcacaagcgtcctagaggaagttctagcccaccaaaatctaaagccttggtagaatcagatgagaataaagaggagtatgaggaagttcaaagagctctggcagcttctatggagagcatgaaagaatcaactgctatggctggaagagacaataaagatgcagatgttgcagtcaatgggcaagaaacacccatggctaagagacccacatatccaaccctgcctgaagaacccaaggttgaaagaaatctcctatgcagagttggtgttcggcttccagatggacgccgggttcagcgaaacttcttacgcactgatccaattcagctgctgtggtctttcatttctgctcaactaggggaagatgaaacaaattcatttagattaacacatgcaattcctggagcatctaaaattctggactatgaaattaattcaaccttccaggaatcaggccttgccaactctatgatttcggtgacttgggactgagttcgggttcattactgggtgaaatttgcagactgagaacttcagattggtcccatctatatgatcccgtttttcatcttttcatgaggttgtttatgttcaaagaaaaggttattgaaacttttttgtgtatagactacaaatccgaacgatgggttaagcgatgttaatggaaatatattgatgttattaataaaaaaaaaaaaaaaaaaaaaaaaanc

SEQ ID NO: 7000 - DNA, 1078 bp, Glycine max
  misc_feature (1076)..(1077): n is a, c, g, or t
gatcttgcttctttctctctctagcatggaagaaagtctagtaaagaaacatgagcaagaaagagtaacatggggtgtttatagtgaagaaatgagaagggtatgccatatagcagggcctatggtggcagtggtttcttcacaatatttgttgcaagttgtctcaactatgatagttggtcatttgggtgaactctatctctctagcgccgcccttgccatttctctatcaggggtcactggtttcagtcttcttatgggaatggctagtggactggaaacaatttgtggacaggcttatggagctcaacaatatcaaagaattggaatgcaaacatacactgctatattctctctcatattggtttctattcccgtgtctatcctttggatcaacatggaaagcatactagttttcataggccaggaccctctaatttcgcatgaagcagggaagttcacaatttggcttgttccagcactttttgcatatgcaattcttcagccgttagttcgatatttccaagtccaaagtttgcttcttcccatgtttgcaagttcttgtgtcacactcattattcatgtacctctttgttgggccttggtattcaagacaagtctgagtaatgttggtggagcattggctgtgagcatttcaatatggtcaaatgtgatttttcttgtgttatacatgagatactcttctgcatgtgcaaaaacccgcgcacccatttctatggagctgttcaaaggaatgcgggagttctttcgtttcgctatcccttcggcagtaatggtttggtgattattcttcctgttcaatcaatattttacatattcatgttatcagataacaaaaagtttccttgtccaacaaattttctataatgtattgtattgtttttccaaaactagtatttaacataatttttgtattcatgttgatgatggtagccttgaatggtggtcatatgagctgcttgtattgctgtcagggctgttaccaaatccccaacttgaaacttcagttctatctgtttggtatgtatgctccattattttggttttctttatannc

SEQ ID NO: 7001 - DNA, 2800 bp, Glycine max
agtttttctgaaggggtggtgatcaggtggttgaagacaggagtggcgaattagaatcagagagaaagaagcggtttttatatttctcgcgcgattcgtttcaggcaagtgcagtgcagagtcgaaacgacgtcgttcattgtgcgatgaaagtagctcaacaagtgttgaatctctgaactctttgggattcgaatcttgagtcgttgatcgtttccggcaatggattcgtggctcaaagccgctgaaggtttatttgaagttgtagatcgacgagcgaaggctgttgccagtgacttatcagaggagcagggtgattctaagtctccagcatcaaatgggcaaggatctcagggcaagaggacaaaatcaaaaccaaaggctcaaaaggcactatccgactcaccaactataattagtgatactactcacgagaaaagtggatctccatcagcacctgtggacatagcaacttcaatagacaaagttgatcctgaaattgatgtgagcgcttccacgtctacaaaccaaccaaaggagccacaacctagcgatgcaacatcacccttgttaggctcttcattatcaaaaattctaggcgatgatgttggtaaacatgacacagatgatgcggaagcattagtaaatgatgctgatattggagttgccacaattgctggtaatggtgatcctgtccaagagagtgcttcagacatttgtgagatggatcctcctccagctcccaaaggaattgagggctccagtgatgaacccactagtactggccaaattatcaaatctagagatttagatgccagtaaaaatgtggatatagagaaatctgattctgtggcttctgacacagctcctaaaaatgatcctatactcaaagattctgatgtaaaagttgaatctgttgtggacgagaaaagccaagaggatcacaaagctgacatctcccccgaaaaagtacaggatcaacttgatgaggctcaaggattgcttaaaacaacaaaatctactggtcagtctaaagaggctaggttagctcgggtctgtgctggattgtcatcccgtcttcaagaatacaaatctgaaaatgcacagttggaggaacttctcacttcagagagagagctgagtaaatcatatgaagctagcataaaacagctacagaaggatctgtctgaaagtaaaagggaagtgacaagagttgaatcaaatatggttgaggctttggcagcaaaaaatgctgaaattgaggcacttttaagttctatggatgctgttaagaggcaggctgcattgtcagaaggaaatctagcttccctgcaggcaagtatggaatcaatgatgagaaatcgagaactaagcgaaacaaggatgatgcaagctctaagagaggagctagcatctgctgagcgaagagcagaagaggagcgtgtcgcacataatgctaccaaaatggctgctatggaaagagaagtggaattggagcacagagcagttgagtcatccactgcacttgcaaggatacaggtaatagagtagcagatgagaggacagcaaaagccacagaacttgagcagaaggtggcacttctcgaggttgaatgtgcatctttaaatcaagaactacaagatatggaagcccgtgtgcgccgggaacaaaaaaaggcaccagaagaggcaaatcaagtaattcagaagcaggcatggcaggaagaattggagcgtgcacgtcaaggtcagagggaagctgaaaacaagctatcatccttggaggctgaaatgcaaaaaatgagagttgaaatggctgccatgaagagggatgctgagcattactcacgtcaggagcatatggagttagagaaacgctatcgggaactgacagaccttttgtactacaaacaaactcaattagaaaccatggtcagtgaaaaggctgccacagagtttcaattggaaaaggaaattaagcgtcttcaggaagcaaaggcagaggctgaaagaagtagagtttctcgtcgagcatcatcatcttgggaagacgagactgaaataaaatcccttgagccgcttcctttgcatcaccgtcatttggtcggtgcaagtattcagttgcaaaaggcagtgaaactattagattctggggctgtcagggccacaagatttctctggcagtatccaacagctcgagttattttatttttctacttggtgtttgtacatctcttcttgatgtatctcttgcatcgccttcaggcacaagctgacacattggccgctagagaagttgcagaatctatgggactttctaaccagaatttaccgtgactcttcaaaaatattccatctagggcatgtgtcaggtgttaataatatcttcctggctacatatattttcaagtgtacatttccaatgccactgcttagggtggcttgataatggtccagcaaatgactcgagcattgcaaaccaaaagaggaacttacgtacaggcatcttatgtctcaagttgatcttttgagaaactgctgcaagatggagttgggaagattggaatttgctttagccaatgattaatgaatgggtggcagcttctgtttcttgtgtagactgttctgaaaattgaattggttgattatatgtttattcgttttttcttctctgaaaatgtatttcgagtggaacgatgtagataacaatatattttgtgatatcctttttcttcgttccaagggcaattgccaaaactaaagaatacacagcgcttgaatgaagaaaagttaggtactaa

SEQ ID NO: 7002 - DNA, 1277 bp, Glycine max
  misc_feature (56)..(57): n is a, c, g, or t
ccttgattgaagtattaaatattcctatataaatataaattgcccgctcgaggccnnggccgggcccgcgaaatccaaagcgatatctgtgattcatcaaatttgtgtttccccgaccccgattgcaagcaatggacgccttcaattccttcttcgattcaagaaaccgatggaattacgatactctcaaaaacttccgtcagatttctccggtcgtgcagaatcacctgaagcaggtttattttactctgtgttttgccgtggttgctgcggctgtcggggcttaccttcatgtcctcttgaacattgggggttttcttactacagtggcatgcatgggaagcagcttttggttactctccacacctccttttgaagagaggaagagggtgactttgttgatggccgcatcactgtttcagggttcctctattggacccttgattgatttggctattcatatcgatccaagccttatctttagtgcatttgtgggaacagctttggcctttgcatgcttctcaggagcagctttggttgcaaggcgtagggagtacctgtaccttggtggcttggtttcttctggattgtccatccttctctggttgcactttgcttcttccatctttggaggctcaacagctctctttaagtttgagttgtactttgggctattggtgtttgtaggttacattgtagtagacacccaagaaatagttgagagggcacacttgggcgatctggactatgtaaagcatgccttgaccttgtttaccgatttggtcgcagtttttgtccggattcttgttattatgttgaagaattcgactgagaggaatgagaagaaaaagaagagaagagattgattttcttaccaatctgctcgattaacacttcacctcgcttggtctgtaatacataaaaacagccgtctatacagtgttttccactttttaagcttgctcctcctactgtgcagttaagtcgtttgtttaccaatagtacatgttgacatgttttgagctctctaataagagaaatgtttacattacatttgttttaaagatgaaaaggggagtggggaagaagtcgatggtgaaggtccctaataaattcttactcccaagactcagaatttttcttggggaggaagtggaattcagggaaacacttttttttcacacattattgagtatattttatactagactcgccgaatcacgaatttcattatctatttagcttcttttttttccccctgtaaaaaaaaaaaaaaa

SEQ ID NO: 7003 - DNA, 1741 bp, Glycine max
tcagctacgtaggcccccccccaccaaccgttgatcgttttcatttgtatatttatatgtatatgtatatgcgccaaagtgcaccgcttcatcactatcaccatcccaaaaactgcatgtgcttctgttcgttttccaaatctcctctttgtttctgaatcttcccttcgctgttgcagagatggcttcgcggtgctggccttctgatgctgagctaaatgaattgagagagagagtttcgaaaatagtggatctgaataaagaggaagttcgagttgtggtatctccctatcgaatatgtcctttgggggcacacattgatcatcagggtgggaccgttgcagctatgacaatcaataagggaatacttctggggtttgctccttctggcagtaatcaggttgtaattcgttctggacagtttgagggagaagttaagttcagagttgatgagattcagcagccaaaagataagactttggacaaagattcatcagagctacaggaacaatgtaactgggggcgttatgctagaggagccgtatatgcactacagagtagaggaaacaatctttctaagggtatcattggatacatatgtggttctgaaggtctggacagttcgggtttaagctcttctgctgcagttggagtagcttgcctcatggctttgcaatatgcaaatgatttagtaatatctcccacagaaaatattgattatgataggttgattgagaacgaatatttgggtctgaaaaatggcataatggaccaatcagctatattactttcaagccatggttgtttgatgtgcatgaattgcaagaccaaagattataagcttgtttaccgaccaaaggttctagaatacaacgagagtggggaaccaaaagcaaccagaatattgttggcactttcagggttgaagcaagctttgatgaataaccctggatataacaagcgagtttcagagtgtcgagaggctgcacaaattcttcttgaagcatctggagattacaaaacagagcccatcctatctaatgttgatccagaagtatatgaggctcacaagcacaaattagaacctgatctagccaaaagagcagagcattatttctctgagaatatgcgagttttgaaaggagttgaggcttgggcgatgggcaggttaaaagattttggaatgcttattacagcttctggtcggagttccattcaaaattatgaatgtggttgtgaaccactgattcaactgtatgagatccttttgagggctcccggtgtattgggagcgcgcttcagtggtgctgggtttagagggtgttgccttgcatttgtggaggctgaccttgcaactgaagctgcatcatttgtcaggagtgaatatctcaaggtacagccagagttagcaagccaaataagcaaagacacagcagttttgatatgtgaatctggtgattgtgcacgtgtaatttaaacagcattgttgccgttaatacttctatttcatcatcgttcttataaatagcaatcgcagctgtcaatatcattgtaattcatcaaatcttttagttctgtccttgtatttcatggcctggaataaactcacgttacattattagatttgaaagaggtgtattttagatggtgaaatgtagttataatcctttgattataaaattaatataacttattatttattttaaaaaaaaaaaaaaaaaaaaaaaaaaaaaaaaaaaaa

SEQ ID NO: 7004 - DNA, 627 bp, Glycine max
aagttgatgttgttgtaaatgtcgtcgtcgttgtctttttgggaatacacggtgctcctccttctgcggcccctcttcgccgtagcgttcgttctcttcttaatatccctcggttggtttgtggcgtggaaactggtgctggtgcacgtgccattggtgcaagaggttttcggcctcaagaagaaagctgttcgagtgaagcccccaactggtcgcttttccaaaatctacagcacccttcacgcccaaaaatcaccttccacctcataagatcattaaattgtaaaatatgaagtgacatgttggagatggttagcatgggatcttggacagtagaacacccgttgaaataaatgaagaaattccaagcagcaggcaatcgtttgaattgaaaaggaagcttcagcggctcacttcaaaaacttttatacaccttgtacataacattagaaaactaagccatgaatgctcttacttcatatagtgctctgtataactagattatcaatttcaattggtgatgaattatgatttattcttatgatagtttttggctatatatattgtatgcaggaggtgcaagcacctatataacatgatgcttaattcttaaaaaaaaaaaaaaaa

SEQ ID NO: 7005 - DNA, 1047 bp, Glycine max
ctttttctagggtcttctagctcctctcaagtcccaacccctcccctccgatcacccactctcactccccatttccctgcacaaagattttttcccagcttgctcatcaagtccaagaaccaacctaccttttgcaatctcaattcaatggcgtcctctctcattgcgaagcgcttcctctcctcttccctcctctccaggtccctccttcgccccgccgcttccgcttcccaccgctctttcaacaccaacgccatgcgccagtatgacaaccgcgccgacgaccacagcaccgacatcgatcgtcactccgaacgctctttccctagcactgcgcgccgcgacgatatcttctcagatgtgttggatccattttttccgactcggagtttgagccaggttctgaacatgatggaccaggtcatggacaatccgttcctctccgcgtcgcgcgggatcggagctggcgctggagtgcgtcgcggatgggacgcgagggagacagaggatgctctgcatctgcgcgtggacatgcctgggctcggcaaggaagacgtgaagatctccgtggagcagaacactctcattatcaaaggtgaaggtgctaaagaaggcgatgaagaagagagcgctcgtcgctacactagcaggattgacttgccggacaagctctacaagattgaccagatcagagctgagatgaagaacggtgtgctcaaggtcgttgtgccgaaaatgaaggaggaagagaggaaagacgtgatcagtgttaaggttgagtagaacaacccaagctgatttggccattttgcatcgacactactctttagttttcttttattaggtggtgatgaatctagttagtagatataacagcttaatagtattgttgctgtgtttggttttgaaacttcaaacgtatctgtaataattgttatatagagttgtgaatgagcttgttgtttagaagtctactgcagtctgaatttgacttgtcaatgaaattcgtgtcattttaaattcgttaaaaaaaaaaatataaataaa

SEQ ID NO: 7006 - DNA, 705 bp, Glycine max
agtcattgcaaaatgaaaaggagtgagtgagtaggcctggtttggttatatatttggagagagagagagagagagagaataaaaatggaaggaggatcaggtggcgagaggaacagtagtgtataccgagagtgcttgagaaatcatgcagccagcctaggaagctacgccacggacgggtgcggcgagtacacggtggacggcgcggggggactacaatgcgccgcgtgcgggtgccaccgcaacttccaccggaaagtgaagtacctggcggcggctgaaagccctcccacggagtatgggggcagcaacagcaagaagcggttcaggtctaagttcacggaagatcaaaaggagaagatgctagggtttgcggagaagcttggttggaagcttcagaggagggatcttgatgatgagatagagaggttttgccgaagcgttggggtgagtaggcaagtcttcaaagtttggatgcataaccataagaactcttcctcctcctcttctaccgccgccaatgtctcctccctcacccagtaattcactctctcctcttgtaattgtttctcattaattatcactttcatctttttagattgactagtttacttcaatattgtaagaagtcaatgaaatcacttaattgtcaggattatgtatgctatcactatctatttataacctataaagtttctgaacctc

SEQ ID NO: 7007 - DNA, 1879 bp, Glycine max
tcagctacgtaggcccccccccccgttttctcagccaaccctctctccctctctgttcgcactctgtctttcccctgtttccgcgtcactgagtcatggcgattcgcaactcgctcaccggccaattcctccgccgcagctccgtcgccggagcaaggctcatgtcttcttcgtcctcatggttccggagcatcgagcccgctcccaaggatcctatcctcggagtcactgaagctttcctcgccgatcagagtccaaacaaagtcaacgtcggagtgggtgcgtatcgcgatgaccacggaaaacctgtggttttggaatgtgttagagaagcagagaggagggttgccggaagtcaattcatggagtatcttcccatgggtggaagcataaaaatgatagaagaatcgctgaagctggcatttggagacaactctgagttcatcaaggataaaagaatagctgcagtgcaggctttatctgggactggtgcatgtcgactttttgctgcatttcaacagagatttcatcctaatacccaaatctatataccagtgcctacctgggccaaccaccataacatttggagagatgctggagtgcctatgaagacattccgttactatcaccctgagtctagaggattggatttttcaggactgatggatgacataaagaatgctccagatggttccttctttctgcttcatgcttgtgctcataatcctactggagtagatccttcagaagaacaatggagagagatctcttcccagataaaggctaagggtcatttccctttctttgacatggcatatcaaggttttgctagtggtgatccagagagagatgcaaaagccataaagatttttcttgaggatggtcatttaataggacttgctcagtcatatgcaaaaaatatgggactgtatggccagcgagcaggaagcctgagtgtgctttgtgaagatgagaaacaagctgtggctgtaaaaagtcagttgcagctgattgctagacccatgtacagtaacccacctctccatggagcacttatagtttctactgtccttggtgatccagatttgaagaagttatggcttaaagaagtcaaggttatggcagaccgcatcatcggaatgaggactacactacgagaaaacttagaaaagaaggggtctactttgccatggcagcatataactaatcagattggtatgttctgctacagtggattgacacctgaacaggttgatcgtatgacaaacgagtttcatatttacatgacccgtaacggtcgtatcagtatggctggtcttaatacgggcaacgttggatatgttgctgacgctatccatgaggttacaaaatcattctagattattcaatcacccaacaggtgaccaaatttttgtctttggagacaaacatctcagaagtagtacccttatccaggggagcaaaataaatttaataaagtctgacaaattttcaacttgtttcggggtaagatagtgatactcttcagggtttaccttgcatattgaagacccttattgcaatacgtatccgatttatcatatccatgcaccatagattatatccatttttacagacatcttgtttagcactttaatgagcataaccctgtatcatcattttttttataaaataatttgagtagtagattgaataagggctttatttatggtgaacaggaagtacgtagcttcattcttactacactattattcctgttagtgaaactttgcgattgttgaagctagaaaggatatttaaacgctaatttcttttatcccccccgtaaaaaaaaaaaaaaaaaaaaaaaaaaaaaaaaaaaaaaaaaaaaaaaacaaag

SEQ ID NO: 7008 - DNA, 931 bp, Glycine max
tacggctgccagctgccgacgccccccccctgattacagatcttccaagcttcagagcgcaggcaaacaacttcttctcagacatggcatctcaaggtttgtgtccttcgataaaaaatattcttcttttggactctgaagggaagcgtgtggcagtcaagtattactcagatgactggccaacaaacaatgcaaagttagcttttgagaagtttgtatttactaagactgttaagacaaatgctcgtacggaagctgaggtaacactacttgagaacaatatcattatttacaaatttgtacaagacctgcatttctttgtcactggtggtgaagatgaaaatgagctcattctagcatcagttcttcaaggtttctttgatgcagtcacccttctgttgaggagtaatgttgacaaaagagaggcacttgagaacttagatctcattctcctgtgtcttgacgagattgttgatggagggatgatacttgaaacaaatggacctcttattgccgaaaaggtgacctctcatagcttggatgctgatgcccccttgtcagagcagacactaactcaagcttgggctacagccagagaacatttgacaagaacccttttaaaatgatgcttgcatacattgaaaacgagctacctattgttgaatagttaaatttttgtctgttaatgagagttgtttcatcccctaatttgtgagttattgtaatgagcaccatatcatttttctgggaattgtgttccccctgcatctagctgttatttgtcaaattcagggaagaagttattaatcgaaatattgtgatattcaatgtacgggtgagatttggttccatagaatttgctgttcaagtatgtaacaatccaatatcgagatattctttcgtcaataagtatctgacttgacatatacac

SEQ ID NO: 7009 - DNA, 967 bp, Glycine max
cccacgcgtccgcccacgcggcccttccaaacttcagagcgcaggcaaacaacttcttctctcagacatggcatctcaaggtttgtgtccttcgataaaaaatattcttcttttggactctgaagggaagcgtgtggcagtcaagtattactcagatgactggccaacaaacaatgcaaagttagcttttgagaagtttgtatttaccaagactgttaagacaaatgctcgtacagaagctgaggtaacactacttgagaacaatatcattatttacaaatttgtacaagacctgcatttttttgtcactggtggtgaagatgaaaatgagctcattctagcatcagttcttcaaggtttctttgatgcagtcactcttctgttgaggagcaatgttgacaaaagagaggcacttgagaacttggatctcattctcttgtgtcttgacgagattgttgatggagggatgatacttgaaacaaatggacctcttattgctgaaaaagtgacctctcatagcttggatgctgatgcccccttgtcagagcagacattaactcaagcctgggctacggccagagaacatttgacaagaacccttttaaaatgatgtttgcatacactgaaaatgagctacttatagtcgaatatccaattttttgtctgttaatgggagttgtttcatcccccattgcgagttattgtaatgagcaccataccatttttctgaaaagtgtgttccgcgtgcatcttagctattatttgtcaaattcgtggaagaagttattgatcgaaatattgtgatattcaagttatggttgagatttggttccccagaatttacagtaaattctaaatattttttaatcaatatattttaaatttatcaaaaaaaaaaaaaaaaaaaaaaaaaaaaaaaaaaaaaaaaaaaaaaaaaaaaaaaaaaaaaaaaaaaaaaaaaaaaaaa

SEQ ID NO: 7010 - DNA, 967 bp, Glycine max
cggtccggattcccgggtcgaagggatgcttgagttgacagaagttgaaaattttggttgagtgagaggcttgtctttgttccgctaccatgtctcatgagacatgcccttctgtaaagaatgtccttcttttggattccgatgggaaacgtgttgcggtcaaatacttctctgaagactggccgacaaatagtgccaaggaaaattttgagaaagttgtattcaacaagactcagaaaaccaatgcccgcacggaagcagaaatagcaatgtttgagaataacattgttctttacaagtttgtccaagatcttcacttctttgttaccggtggtgattatgaaaatgagcttatcttagccacagttctgcaggcattttttgattctgtgggccttctgctcagaggcaatgtagacaagaaggaagcactagagaacttggatctcattctattgtgcattgatgaaattgttgatggcggtatcatacttgaaactgatccaaatgttatagctgggaaagttgctagtaatagtatagattctggagctcctttgtccgaacagactctaagtcaagcattggccacagccagggaacatcttgcaaggtcccttcttaaatgattcatatggcatttcacaatgacggaggaaacttgtctttaggtttttcctataaacgtttataagaaagaacctcattgcattctcgagaagtcgaacctggatgttgatgttacttgcgtagtgaaagttaatattgacatgctaatacaggctattctagcagtacttttcttctggcgatttgttattttagttacctattaaatttcaggatggtggcatattccgtatgttccaaaaatttcataggaatcaattttagtgcatactaattctaaaaaaataggtcgcccccccccgcctcgtgctgtgctcacagtacgcggacagcgtgc

SEQ ID NO: 7011 - DNA, 1918 bp, Glycine max
  misc_feature (1837)..(1842): n is a, c, g, or t
cttgcctttacctttcaacttggaattgtttgaattgcagtgatcacttggttggaagcaaactcacaagcagataatgaaccaacacacttcacgccttcatcctccactggttgctggggcaaggaatttgtaccaggatcaaagctacgtatccaacctgacataaatccaaatgagaatgagagaaaacacacctagagaaacgacaagagttcagcctcctcttctatctggtcttcctgatgatcttgctattgcttgtttgattcgagtaccccggattgagcacaggaaactacatttagtttgcaagagatggcaccgccttctgtctgaagacttcttttattcactcaggaaaagtcttggaatggcagaagagtggttatacgtcatcaaagcggaccgtgctggaagaatttcagtccatgcttttgatcccatctaccaactatggcaaccccttccccctgttcctggagattttcctgaagcaatgtgggttggtagtgcggttcttagtggttgccatctatacttatttggcggagtagatctggaaggatctagatctattagacgtgttattttctacaatgtctgtacaaataaatggcatagggcaccggatatgctgcagaaacgtaatctgtttcgttcgtgtgtgataaataattgtctttttgtggctggtggggaacttgaaggaattcaaatgactcgatctgctgaagtttatgaccccagccagaacaggtggagttttatctcagagatgagaacatccatggtgcctttgtttggttttgttcacaatggaacatggtttttcaagggaaatgaaattgggagtggtaattccatgtgtgaagcctattcacctgaaactgatacttggaccccagttactaatggaatggtcaatggaaggggtaatgattgtatctcactgaatggacaactctatgcattaggttgcccggatggatgcaagctcactgtatatgatagagcaacagattcatggaaaaagcttattgatagcaagcttcacgtggataaatttccatctctagtagctgttgcacctgtttcccttaatggaaagctctgcattatccgccacaatatgagcatcagtttagttgatgtttcaagtcctaaccaaccaactggaaagcaatcctcgggacctttgggaaaatattgctggaaaaggtcatcacattcgcaggtctttagttagaaagttatggtcaactatagcaaggcgtggttgttcaaagagttgcattgtttgctgtcaggtgctacaagcctgagaagaaaatcccacctgataatattagttatgcagttaaggagattgttctctttggaaattaactgaaatatgtttgtccactttcttgcaatggacatgtaggagaaattatgcttcttcctttaaaatgaggttagttgtagatttttggcaatagaacgaagtctttcttatacaatcttgaatagggggcagatgttgtatatgctatttcgctctaaggcagggccttttcctttgttactggatataaagttttttaggctattagagatatagtaagttgaagattagcagtaagtttgttagcatatataaagatttgatgcactttgaactcacctttctcattatcaatacattctactttcgttctataaaaaaccccaattatctcttctgtcttagggctgaaccatgaattataatagcggatgtacatgatttattagaactaagcatataacagatgtaccccttttaattaatgagcaagtttctatgaacgtnnnnnnctatattatgcttgatcacaagaaacaattacactgttgactgttgagtcatttgtacttgacgagcaaactgcag

SEQ ID NO: 7012 - DNA, 962 bp, Glycine max
ctggagtaaaaaattaaaaaaaaataagaaataataaatattattaaataaataaataaataaaaataaaacggaagtctcaagtctcgcggctgaaatagttgagttgacggaagttgaaaattttggttgagcaagagccttctctttgttccgttccgcgaccatgtctcatgagacatgcccttccgtaaagaacttccttcttttggattctgatgggaaacgtgtcgcagtcaaatacttctctgaagactgggcaacgaatagtgccaaggaaaattttgagaaagttgtcttcaacaagactcagaagaccaatgcccgcacagaagcggaaatagcaatgtttgagaataacattgttgtttacaagtttgtccaagatcttcacttctttgttaccggtggtgattatgaaaatgagcttatcttagccacagttctgcaggcattttttgattctgtgggccttctgctcagaggcaatgtggacaagaaggaagcactagagaacttggatctcattctattgtgcatagatgaaattgttgatggcggtatcattcttgaaactgatccaaatgttatagcggggaaagttgctagtaatagtatagattctggagctcctttgtctgaacagacactaagtcaagcattggccacagccagggaacatcttgcaaggtcccttcttaaatgattcaaatggcatttgacagaggaggaaacttgtcttttagcttttcgtatagacgtttataagaatcaaattgcattctcgaacattcgaacctggatgatggtgttatttgcgctgtgaaagttaactttgacatgcttatacgggctattttggcactaccttatgacgatttgttcatttaattaccaaaaaaaaaaaaaaaaagtggcatattgcgtatgttccacaagtttataataatcaactttagtgc

SEQ ID NO: 7013 - DNA, 1056 bp, Glycine max
ttctgctccatgtaagacttttacttgtttctcatcacacgtggcacgtgcgacgcttcagtattatttttccgtcattgttatgttacgtggccccccccccttggtggattcgccatggctgctacggcttcagcttccgctgcttctctctcccttcgctcttctcccttcaaactcaaccctccaaaactcaactccgttacgctccgtttccctcaccttaatcgccgttataacagcgccttcagagtcgtcgccgcttccgtttccgtctccaaccccaacgtgcaaaccggccccgacgatctcgttgcttccattctctcaaaggtggtgcaaacggatggaggagtattgctgaaggaggaagagcataaagaggtggccgaagtggctcaggaactgcaaaagtattgcgtgagtgagccagtgaaatgccctttaatatttggagagtgggatgtggcatactgttcacggccaacatcaccaggtggtggctataggagtgccattgggcgccttttcttcaacacaaagcaaatggttcaagttgttgaagctcctgatattgtgagaaacaaggtctcactttctgttttaagctttctggatgtggaggtttctctgcagggaaaactcaaggctctggatggtgaatggatccaagttatatttgaagcacctgaattgaaggtaggatcatggcaggtccagtatggtggccagagtgaagttaaactcagaatcacttatgttgatgagaaaatcagtggcaaaaataattctttttggggggtgcctttgtagctgaaatttggtcaggggatgaagaatgtgggatggtttccaacctctagccttggtggggctgtgaaccctatttgagactcaacttaagtgtcaaggacattaaaattaagtttaattatactttcaggctctatttggaaaaaaaactagtgtatggcagatagtggatgagtttatagttaatacttgataaattagctaattgaatttgtagtgtttgacaaaaaaaaaaaaaaaaaa

SEQ ID NO: 7014 - DNA, 2173 bp, Glycine max
cctcgcgccccccgtcgcgtgcggtgacgcacatcacagcagcagcggcaccccgtaccgtagactttgaatatggaaaatctttgccacttcggcaactaacacaaaaagtctgcatttttatctttattttcttcctcgcagactgaggcccccataacaacaacaatcttccatcctttttacccttcatggaatcgcgtccataacgccacctatttcatttccgtttcccttcttttcattgcctttttttttcctctctttcgcgcaattttgatcgatgggtctcgtgtcgaatctgcgaggctcgagaacggaagcagcgccacaacaagaagccttacccgtttcggcggtttccggtggcgcaccgaagaggaaatggaccaatctaatgccgctggtcgtcgccctcgtcgtcgttgcggagatcgcgtttctcggaaggctcgacatggccaagaacgccgagatggttgacaccctcgctgtcttcttctaccgccctcgcgcagtggttgaaggcgacgatttggggctgggtacggtgggttggtggcggcggcggtgatgggaattcagaatcggagagttgtgaggaagtggttggagagggaggatgccgtgacttattcaagggactttgccgaagaacctgtttttgtttctggagctgaccaggagtggaagtcgtgctcggtgggatgtaaatttgggtttagtggggataagaaacctgatgctgcatttgggttacctcaaccaggtgaaacagctagcgttctgcgatcgatggaatcagcacaatactatgctgagaacaatcttgccatggcaagacggaggggatatgacattgtaatgacaaccagtctatcatctgatgttcctgttggatatttttcatgggctgagtatgacatcatggcaccaatgaagccaaaaactgaagctgctcttgcagctgcattcatttccaattgtggtgctcgaaatttccggttgcaagctcttgaagcccttgaaaaatcaaacatcaagattgactcttatggtggttgtcataggaaccgtgatggaagagtggataaagtggaagccttgaagcactacaaatttagcttagcatttgaaaattctaatgaggaagattatgtaactgaaaaattcttccaatcccttgttgctggaactatccctgtggttgttggtgctccaaatattcaggattttgctccttctcctggttcaattttacatattaaagagatagaggatgttgagtctgttgcgaagtccatgagatacctagcagaaaatcctgaagcgtataatcaatcgttgaggtggaagtatgagggcccatctgattccttcaaggcccttgtggatatggcagctgtacattcttcctgccgcctttgcattcacttggccacagtgagtagagagaaggaagaaaatagtccaggcttcaacaaacgcccttgcaagtgcactagagggccaaaaactgtgtatcatatttatgtgagagaaaggggaaggtttgagatggaatccatttacttgaggtctagcaatttaactctagaggccttgaagtctgcagttgtttcaaagttcacatccctgaatcatgtacctatatggaagacagaaagacctgaagttcttagagggggcaatgatttaaaactccacaaaatatacccagttgggttgacacaaagacaagctctttataccttcagcttcaaaggggatgcagatttcaggagtcacttggaaagccatccttgtgcaaagtttgaagtcatttttgtgtagcatgtgctagtggcctctctgctctacatgaatagcttcttcacttaactgagcggtagagttttagggatgagtatggcaatgaaactggcatggctttatttatgcatagcttcttgaccaactcattgatgatttatattcaaaagataatcttacttttgaactcttttgtgtacaagaggtgaggttccatatttaatgcttagttttagttatagagtttctatctgatcatctagaaaagccacatgatgatggacaattggtcagcatgccagttcttgtataccgtgggtgaaaaactaaaatttaaatggaagcagcagatgtttccctc

SEQ ID NO: 7015 - DNA, 898 bp, Glycine max
attcttcaaagtcccattattactattagaccctccgagaagttccaatctttttcggtcttttctccaccgcactgaaacccgtcttcattcgatccggtgagagagggttccccttggttgcgtgaatcttcagaaaagggttgtccttgtaatataatagtttgtgaattggagtttgtgtttatagcaagagaatggatgagtcaaaaaacaggcataatgataatttgggtgtgaacaaaatggggaaaaacattaggaagagcccattacaccagcccaattatggcaacaacaacaacagcagcatgaatgggggtagacagcaacagcaacagcctcagcctcaggtttacaacataagcaagaatgatttcagggatattgttcagcagcttacagggtctccctctcagtctcaggatcatcctcaatccaaacctcctcagaatcagaacaattccccaaaacctcaaagtatgaggttgcagaaaattaggcctccccctttgccctatgtgaggcctccattgcacaccaccttgccagcagctagacctgctcactttagacaacaaccatcaccaaaccctaataatatagctgagtcaccaatctctgcctacatgagataccttgaacattcaattacagatcccacttcaaggggtgcccaatttcaaccccatcatcatccagcttcttctgctttgcttcctaaccctcctatgatgcctttgaatgccacaaaccctcttcctcctcctcctgctatagctgctgttccttccccacaaccaaatggacctcctattttacctttaccttctccaacctctcagtttctcttgccttcaccaaacggctacatgagtttcctctccccccagtctgg

SEQ ID NO: 7016 - DNA, 1312 bp, Glycine max
atttttctaatacccctgaatataagcacccggcccgctgcgtgggccccccccccccagcaaagatgctttcgaagcatttggaggcagtaatcaagtccaaaattcctggtatccaatctcttatcagtaaaacaattgctgaacttgaagctgaactgagtcgtctgggaaagcctgttgcagctgatgatgggggaaagctgtatgcagtcatggaaatatgccgctcatttgatcatatattcaaagaacatcttgatggcgtgcgacctggaggtgataaaatttataatgtctttgacaatcagctgcctgctgctttaaaaaggctgcagtttgataagcagctttcgatggaaaatataaggaaacttatcacggaagctgatgggtatcaacctcatctaatagctcccgaacaaggatatcgtcgcctcattgaatcttctctaactactgtcaggggtccagctgaggcagctgttgatgtggttcattccctattaaaggacctagttcacaaagctattagcgagactctggacttgaagcaatatcctggtctgcgtgttgaggttgggaatgctgccattgattcgctagaaaaaatgagggaggaaagcaaaagagcaacgctacaactagttgatatggagtgtggctatttgacggttgattactttcggaagcttcctcaagatgttgataagggtggcaatcctacacattcaatttttgatagatataatgattcatatcttaggagaattggaaccaatgttctgtcttatgtcaatatggtctgtgcaagtctgcggcattcaattcccaagtcaattgtctattgtcaagtgagggaagcgaaacgaggcctactagatcactttttcactgagctaggcaaaattgagcccaagcgtctgtcctcattgctgaatgaggatcctgcaatcatggaaaggcgaagtgccctctcaaagaggcttgagttataccggagtgcacaagctgagatcgatgcagttgcatggtctaagtagatatgatatagatgtgtatgctacattgcgttattgttaatattgattgagaaatctctctctctctcctatttttgttgggcttttttgtattgtaaaacgcatactgtcattgtcatctttacaagtcagtctggttgttgaagggaaaaaaagggagagagggtttttggtgagataatttgagtgtcttcatgccttttgtgtagatatttcatttttgtaattctgtccccccttttcactcgtttccaaaaatgtttctcgcg

SEQ ID NO: 7017 - DNA, 2349 bp, Glycine max
cccgtgggcttcaggtccctattcaaaccaaattccacatacaaaagactccgcgtttccccttccccgcttcccccgtccccagacactgcaccaaacaccaacaacgctttagctctctctcttctctccataaccgccaccggcgatctggcactaacagatcgccgctgctacatctgaacccgatccagccaacagatctctccaattcaaatggagaatctaatctctttggtcaacaaaatccagagagcttgcaccgccttaggtgaccacggcgaaaacagtgcactccccacactatgggactctctccccgccatcgccgtcgtcggaggccagagctcaggaaagtcctccgtcttggagagcgttgtcggcaaagatttcttacctcgtggatcaggtattgttacgcgacgaccgctcgtgttgcagcttcacaagattgaagagggaagcagagagtacgcggagttcctccacctcccgaggaagaggttcaccgattttgttgctgtgaggaaggagattcaagacgaaactgatagagagactggacgaaccaaacaaatttctactgttcccattcatcttagtatatactctcccaatgttgttaacttgacactcgttgatcttcctgggcttacgaaagtagctgttgagggtcaaccggatagtattgtgaaagacattgaggatatggttcgctcctacattgagaagccgaactgtataattttggccatttcaccagccaatcaagatcttgcaacatctgatgcaattaaaatttcccgtgaagtggaccctactggagataggaccattggagttttgacaaagattgatcttatggacaagggtactgatgctgttgatatattggaaggaagagcatataggttaaagtttccctggattggtgttgtgaatagatcacaacaagacataaacaagaatgttgacatgattgctgctaggcgtagagaacgtgagtacttcaatagtacccctgaatataaacaccttgcgaacagaatgggttccgagcatctggcgaagatgctctcaaagcatttggagacagtaatcaagtccaaaattcctggcattcaatctctaattaacaaaacaattgctgaacttgaagctgaactaactcgtttaggaaagcctgtagcagctgatgctgggggaaagttgtatgcaatcatggaaatatgccgctcatttgatcaaatatttaaagaccatcttgatggcgtgcggcctggaggtgataaaatttataatgtctttgacaatcagctccccgctgctttaaaaaggttgcagtttgataagcagctttcaatggaaaatataaggaaacttattactgaagctgatgggtatcagcctcatcttatagctccagaacaaggatatcgtcgtctaattgaatcttctctaataactattaggggccctgctgaggcagctgttgatgcggttcactcgctgttaaaggacttggttcacaaagctatcagtgagactttggacttgaagcagtatcctggtctccgggttgaggttggggctgctgctgttgattcactagaaagaatgagggatgaaagcaaaagagcaacactgcagctagttgatatggagtgtggctatctgactgttgatttctttcggaagcttcctcaagatgttgataagggtggcaatcccacacattcaatttttgatagatataatgattcatatctaaggcgaattggaaccacaattttgtcatatgtcaatatggtctgtgctacactgcggaattcaattcccaagtccatcgtctattgtcaagtgcgggaggcaaaacgaagtctacttgatcacttttttaccgagctaggcaaaatggagaccaagcgtctgtcatcgttattgaatgaggatcctgcaattatggaacgacgtagtgcgctcgcaaagagactagagttataccggagtgcacaagctgaaatagatgcagttgcttggtctaagtagatatatgtatgtcagatcacgtttatacgagagccagcagtgtcattattcattgtttccctatttccagttcattattcatactcattttttgttgtcatcttatccacttgtattgtcatcttaaatagatgagacgattctgaaaagggaaaaaaatgattttttgggttatacaattgagtgtccccgtatatttcatttttcagaccttccaaatctccactgcccattgttatttgtatgagattctgatgcgttcacaatgagaataatctttatacatttttgggttatata

SEQ ID NO: 7018 - DNA, 1377 bp, Glycine max
tcgagtcagctacgtaggcccccccccccccctctctctctcactttctgtatctgaatctgcgtgtgtttgtgaattgttgttgagatctgaatcaaaatcagaaacgataatggctacaccggaccacctcttcaacctccgcaacaacttctacctcggcgcttaccaagccgccatcaacagcagcgacgttgccaacctctcccaagaagataccctcgagcgcgacaccctcgtccaccgctgctacatcgccctcggccagctccagttcgtcatctccgagatccacgacgatgctcccacaccactccaagccgtcaaactcctcgccctctatttctcctctcccgacaccaaggattccgccatcgcgagtctcaaggagtggctcgccgatcccgctattggaaacaacgccacgctgaggctcgtcgccggtctcgtcttcctccacgagaatgatttcaatgaagccctcaaacacaccaacgccggtggaaccatggaactgcacgcgttgaatattcagatctttattaagatgcataggtcggattacgcagagaggcagctgcggatcatgcagcagattgatgaggatcacactctcactcaactcgccaatgcttggctcaatttggctgtgggtgggtcgaagatccaggaggcgtatctgatcttccaggatttgtcggagaggtatcagtccaccagcttgctcttgaatggcaaggctgtttgctgcatgcacatgggcaacttcgacgaagctgagacccttttggttgaagctcttaacaaggatgccagggatccagaaactctagccaatctagttgtatgctgtcttcatctcggcaaaccatctaacaaatcattcagccagctgaaactttctcacccagagcatgtattggtcaaacgggtatcatcagctgaagaaagttttgatagagcgctacaatcattttcctcatgagtgtcgatgattgaatttctttcaagagttgaatggtgtgaggtcttcccgtgcaatttttacaccttatcgtggctattgtattggttgcgtatcttagaacataatcaactgggtaatgtgtcatagtattcaaatttgttatgtttttggtttacttgagtcttgatgttgtaaaagctacatctgacattaatttttaaacatgttcatttacatcgtctattttactagaaaagggagaaataccaataggtattaagtaaacaagattacgattgtgtggatggatagggaaaactctattcaattttatccataattttacattctcgcaattgtatttttcataaaaaacaaaaaattaaaaccaaaaaaaaaaaaaaaaaaaa

SEQ ID NO: 7019 - DNA, 1909 bp, Glycine max
tacggctgcgagaagagggaacgaaaatgggtggtagatctggcggcttggtttgttctacttcctcttacactgggattagaacaaggcgtttgtgcacttctaacaacaccacctttcccttcccccaacaacctcaatcactctctttcgctaaacctctcaaactcatgtctcaacctttgaccaccaactctgttcttgttgaagaggctgctgctgatggtgattcctccgccgccgcacctcccctcttcgattatcatcgtatcgaccaaaaactgctccaaaacatagtttacgatgctcttgtctggagcaccctcaactgcctccttgttggtgacaaatctgttcagagatcaggaagagttcctggtgtgggcctggtacatctcccactttccttattacctgggccatttcctgaaagtcattggaagcaagggtgcgaattagctcctatatttaatgaacttgttgatcgggtgagtttggatgggaaatttctccaggaatctctctccagaactaagaatgcggatgaatttacctcaagacttttagatattcattctaagatgctacagattaacaaaaaagaggacatacgcatgggaatagttcgttcagattatatgattgatgagaagactaaatcacttttacaaatagagatgaacactatttccacttcatttgctttgattggttgtcttatgactggacttcataagagcttactttctcaatatggaaaattccttggactaaattccaatagggttcctgccaataatgccgttgatcagtctgcagaggccttggctaaagcttggagtgagtataacaatcccagggctgcaattctggtcgtggttcaggttgaagaaagaaacatgtacgagcagcattatatttctgcacttctaagagaaaagcatcatattagaagcatacgcaaaacgttgaccgaaattgatcaggaaggaaaaattctgccagatggaacactttctgtggatggacaagcaatttcagttgtttacttccgggctggctacacgccaaaggactatccttcagaatcagaatggagagctaggctactgatggaacaatcttctgctatcaaatgccctacaatatcttatcatttggttggcaccaaaaagattcaacaggaacttgcaaagcctggtgttcttgagaggttcgttgaaaacaaagaccacattgccaaattgcgtgcatgctttgcagggttgtggagtttggaagactcagatattgttaaaaaagcaattgaaaatccagagctatttgtgatgaagcctcaaagagaaggaggaggaaacaatatttatggtgatgagttgagggaaaccctccttaaattacaggaagcaggttctcaagaagatgcagcatacatccttatgcagaggatatttcccgccacttctccagcaattttggtgcgtgatggtaattgggatacgggtcatgtcatttcagaagctggaatatttggtacttatttaaggaataaggacaagattatcattaataacgaaagtggctatatggtgcgtacaaaaatatcatcatcttatgaaggaggagttttgcctggttttggagtggtagatactgtatacctaacttgatggagctaaccccccaagttatcaaagcaattcaaaacattatgtatggtttatatatcaccactcaagtctcctcactcctgattttctttgtatggaggcattgctgtttcttttaattgttcctatgggatggtgtctaattattaactgtactcaacgacctgtttgattctaaccaataaagattgatgaactgttctaacatgctctaataaaagaaaactgtctgtgcccct

SEQ ID NO: 7020 - DNA, 2137 bp, Glycine max
ccacgcgtccggttaaaacagaaagaaaaaaaatccagagtgacagagtaaagatgcaggttgggaaataataactggcggatttaatccatgttatcgcgtcagctacgtaggccccccccccgctgattgcaatatatagtaatatataataagaatgaaaatgggtagtagatctggcggcttggtttgttctacttgttcttacactgggattaggacgagacgtttctacactaacaataatacctttccctctttctcctttaccttcccccaccaacctcaatcattctctttccctaaacctctcagactcatgtctcagcctttgaccaccaactctgctgatggtgattcctccgtcgccgcacctcccatcctcttcgattatcatcttatcgaccaaaaacttctccaaaacatagtctacgatgctcttgtctggagcaccctcaactgcctccttgttggtgacaaatcagttcagagatcaggaacagttcctggtgttggcctggtgcatctcccgctttctttattacctgggccatttcctgaaaatcattggaagcaagcgtgcgaattagctcctatatttaatgaacttgttgatcgggtgagtttggatgggaaatttctccaggaatctctctccagaactaagaatgcggacgaatttacctcaagacttttagatattcattctaagatgctacagattaacaaaaaagaggacatacgcatgggaatagttcgttcagattatatgattgatgagaagactaaatcacttttgcaaatagagatgaacacgatttccacttcatttgctttgattggttgccttatgactggacttcataagagcttactttctcaatatggaaagttccttggactagattccaatagggttcctgccaataatgctgttgatcagtctgcagaggccttggctaaagcttggagtgaatataacaatcccagggctgcaattctggtcgtggttcaggttgaagaaagaaacatgtacgagcagcattatatttctgcacttctaagagaaaagcatcatattagaagcatacgcaaaacattgacagaaatagatcaggaaggagaaattctgccagatggaacactttctgtggacggacaagaaatttcagttgtttacttccgggctggctacacaccaaaggactatccttcagaatcagaatggagagctaggctactgatggaacaatcttctgctatcaaatgccctaccatatcttatcatttggttggcaccaaaaagattcaacaggaacttgcaaagcctggtgttcttgagaggtttgtagaaaacaaagaccacattgccaaattgcgtgcatgctttgcaggattgtggagtttggaagactcggatattgctaaaaaagcaattgaaaatccagagttatttgtgatgaagcctcaaagagaaggaggaggaaacaatatttatggtgatgagttgagggaaaccctccttaaattacaggaagcaggttctgaagaagatgcagcatacatccttatgcagaggatatttccagccacttctccagcaattttggtgcgtgatggtaattgggataagggtcatgtcatttcagaagctggagtatttggtacttatttaaggaataaggataaggttatcattaataacgaaagtggctatatggtgcgtacaaaaatatcatcatcttatgaaggtggagttttgcctggttttggagtggtagatactgtatacctaacttgatggagccaacccccaagttatcaaagcaattcaaaacattatgtatggtttatatattaccactcaagtctcctgactcctgattttgtttgtatatctccgaaaacagtgaaagaagaaaagaggcattgttgtttcttttaattgctcctatgggatggtgtctgtactcaacgacctgtttgattctaaccaataaaaattgatgaactgttcttctaaacaaaaaaaaaaaaaaaaaactgtctgtgctctcccccttgcttcttccatccccacgctgcacttttctgcctctttttggtaatgtgaaaaggaattgttgtttgagatacc

SEQ ID NO: 7021 - DNA, 1226 bp, Glycine max
acacggcaagccccttgagcaagaaagctaccgctcgcagtatcccctgactcacccaaacaaaaaaacaaacggacgcttctcattctctctctactcgttcagaagatgtttctcacaaggactgagtatgaccgaggagtcaacaccttttctcccgaaggccgtttgtttcaggttgagtatgcaatcgaagccatcaagctgggatcaactgcgattgggttgaagaccaaagaaggagttgtccttgcagttgaaaagcgcatcacatcgccgctcctggagcctagtagtgttgagaaaattatggaaattgatgagcacatcggttgtgcaatgagtgggttgattgcagatgctcgaacacttgttgagcatgcacgggtggaaactcagaatcacaggttctcctatggtgagcctatgactgttgagtccaccacccaagctctttgtgatctagccttgcgttttggtgaaggtgatgaagaatccatgtctcgaccatttggagtatctcttctcattgctggccatgatgagaatggacctagcttatattacactgatccatctggcacattttggcaatgcaatggaaaagctatcggttcagggtcagaaggtgccgacagttctctgcaagaacaatacaacaaggacctaactcttcaagaagctgagactattgctttatccattttgaagcaagttatggaagagaaggtcactcccaacaatgtcgacattgccaaggtggctccaacatatcatctttataccccctctgaggtggaagctgtgataagtcgtctatgattttcttttcgtgactttctctattcaacatttgtgtttcctatcattcctgcctgacgtctaattattgagtattatgcggaaacttttttggtgggtgatgtttacatgtgctacacttgtggccaagttgtacactgtacgagattctggtgtcatttgctgcattcggtctagttgaaattgagtactataagggtttcaatgtttttgggaaaatcgtaatctattacccgaataccgagctagatttttactgtatgagatattaaggaacggggagacgatggaggaaaaaagaattacacaaagtatctatatgcattatgtgtatactattgaaagaattaggatttattttaaccatcttttattcctcgtagtcaaagcaaattgctcacctc

SEQ ID NO: 7022 - DNA, 1105 bp, Glycine max
  misc_feature (1088)..(1090): n is a, c, g, or t
tcggaaattcggcctcgagcctcatttcgcgccgatttgttttcccggtgcgagaaggcgacagtagggggaacaagcaaaattaagcacaaaagcccaaccctctctctcgctgctggtctctcctatttggcattcgcagatcgattacgaagtaatttcactgaatcttattgaagatgtttctcacaaggactgagtatgaccgaggagtcaacaccttttctcctgaaggccgtttatttcaggttgaatatgcaatcgaagccatcaagctgggatcaactgcgattgggttgaagacgaaagagggtgttgtccttgcagttgaaaagcgcatcacttcgccgcttctggagccaagtagtgttgagaaaattatggaaattgatgagcacataggttgtgcaatgagtggattgattgctgatgctcgaacacttgttgagcatgcacgggttgaaactcagaatcataggttctcctatggtgaaccaatgactgttgagtccacaacccaagctctttgtgatctagccttgcgttttggtgaaggtgatgaagaatccatgtctcgaccatttggagtatctcttctcattgctggtcatgatgagaatggacctagcttatattacactgatccatctggcacattttggcaatgcaatggaaaagctattggttcagggtcagaaggtgccgacagttctctgcaagaacaatacaacaaggacctaactcttcaagaagctgagactattgctttatccattttgaagcaagttatggaagagaaggtcactcccaacaacgtggacattgccaaggtggctccaacatatcatctttataccccctctgaggtggaagctgtgataagtcgtctatgattttcttttcgtgactttctctattcagcatttctttcctattcttcttgcctgtacgtcttattatttagtattatgcgggaacttttttggtggatgatgctgtgttgtgctacacttgtggccaagttgtacactgtatgagattctggtgtcatatttgctgcattcagtctagttgaaattgaggactannnaaaaaaaaaaaaaaa

SEQ ID NO: 7023 - DNA, 1511 bp, Glycine max
gccataaagaagtttaatgttgcgaagaatgccctcgcccacgttgccccccccccccttaatgatgggctgaggacatcgctctgcctgcaatttaagccacatcatattgcggcaggtgccattttccttgctgccaagttcttgaaagtgaagcttccatcagatggtgagaaggtttggtggcaggagtttgatgtcaccccacgccaattagaggaggttagcaatcaaatgttggaactctatgagcagaatagacttccaccagcacagggaagtgaagtagaaggaagtgctggaggaacaagagctgcttcaaaggctccttctgcaaatgaggagcaggcctcaaagcaaatatcatctcaagccccccagcactcatctgtagagagaactgcggtaccacaaagaggaactgagaaccaaagcaacgatgggagtgcagaaatgggcagtgacatcactgatcacaacttggatattagggagtcacataattcagaacagttgactcatcaagataacaagagagaagtgtcaaatagatctaaatctggtactgaacgtgaccaagacagaattgttgggactaaggagggtgcagaagtaggaaggagagatgaatctgcattaaacaattctggcagcaatgttggccgaaatctggagcgtcgggaaggcccactaggtcattcacccaatgaagcaatcaagattgacaaggataagttaaaggcactggcagctatgggaaagaagagaaaggaacaacgaggcgaaatggcattaaagaaagatgtaatggatgaggatgatctcattgagagggagctggaagatggaattgaattagcagtcgaggatgagaaaaataagcgtgagagaaggcagaactggtctaagcctgatggtgaagatcaccatgggggggagaaccatgaggaaactagagacgggcggtacatgaacatgaaggtgcagtttcagaaagacatggacgaagacaatgctgaagaaggggagatgatagacgatgcttcatcctcgttgaacaatcgcaagagaaggatggggagccctccaggtaggcaaccagagatgaaaaagcatcttgattccagttatcacaatgatcttgccgaataaaggaacttgccgaataaaggaacttgctgaataaaggaactgggaagggggagagttggttatgtaggcagggaaaacacaaggaatggggagcaaaatcattgttgaggtgaatattctgctgtcctttatttgtttattttgatttggctaatcggttgctaaagaattgatgattctggatgctcttgtttgccttatacatttcttctttaaggaacgggatgcctcagttttggtagtgccattaaaggcttattattattattattattatttccgggctgggagggggttgtatgagaaccttatgctatatatttaatttaatacatgtgaacataattctgcaaaaacac

SEQ ID NO: 7024 - DNA, 2761 bp, Glycine max
tcgggaccaaaccttcccgcgcctccgctgtcttcggcgcgtggtgaattctgctctttgatcatcatcatcttcttcttcttcaatttaagcaagcatgtctcagcaaggcgaatcatcggacccgaaatcggggaagaaggacttctcaaccgcgattctggaacgcaaaaagtcgccgaaccggcttgtcgtggatgaggctgtcaacgacgacaactccgtggtcaccatgcatccccaaaccatggaaaagcttcagcttttccgaggggacactatcctcatcaagggtaagaaacggaaggataccatttgcatagctcttgctgatgagaactgtgaggagccgaagatcaggatgaataaagttgtgaggtcaaatttgcgggttcggcttggagatgttgtgtctgtgcaccagtgcccggatgttaaatatgggaaacgtgtgcacattctgcctattgatgataccattgaaggtgtcactggcaatctgtttgatgctttcttgaaaccctatttcttggaagcttaccgtcctgtcagaaaaggagatctatttcttgtccggggagggatgagaagtgtagagttcaaggtggttgaaaccgatcctggagaatattgtgttgttgctccagacactgaaattttctgtgagggggagcctttgaaaagagaagatgaagagagactggatgaagtcgggtatgatgatgtgggtggtgtcaggaaacaaatggctcagattcgtgagttggttgagcttccattgaggcatccacagctttttaaatcaattggtgtgaaaccacccaaaggaattttactttatggacccccaggttctgggaagacattaatagcaagagctgtagctaatgaaactggagcttttttcttttgtattaacggaccagagattatgtccaaacttgctggagagagtgaaagcaatctcaggaaagcgtttgaagaagcagaaaagaatgcaccatccattatcttcattgatgaaattgattccattgcccccaagcgggagaagacacatggtgaagttgaaaggaggattgtttcacaacttttgactcttatggatggattaaaatctcgtgctcatgttattgttattggagctactaatcgtccaaatagcattgacccagcattgagaaggtttggtagatttgatagggaaattgatattggtgttcccgatgaagttgggagacttgaagtccttcgcatacatactaaaaacatgaagctatctgatgatgttgatttagagagaattgcaaaagatactcatgggtatgttggtgctgaccttgctgccctttgcactgaagctgctttgcaatgcattagggagaagatggatgtaattgacttggaggatgagactattgatgcagaagtactgaattccatggcagttacaaatgagcatttccagactgcccttggaacaagcaacccatcagctttacgtgaaactgttgttgaagtgcctaatgtcagctgggaagacattggaggccttgaaaatgtcaagcgtgaactgcaagagactgtacaatatccagttgagcacccagaaaagtttgagaagtttggtatgtctccatctaaaggagtacttttctatggtcctccaggatgtgggaaaactttgttagccaaagcaattgctaatgaatgtcaagctaacttcatcagtgtgaaaggtccagaattgcttacaatgtggtttggtgaaagtgaagctaatgttagagaaatttttgacaaggccagacaatcggctccatgtgtcctcttctttgatgagcttgactctattgccactcagagaggaagcagtgttggggatgctggtggtgcggctgatagagttctaaatcaacttttgactgaaatggatggcatgtctgccaaaaagactgtgttcataattggggcaactaacagacctgacatcattgacccagcacttcttcgaccaggccgtctggatcaattgatctatattcctctccctgatgaggattcccggcatcaaatctttaaagcctgcttgaggaagtcacctatcgcaaaaaatgttgatttgagagcattggctaggcacactcaagggttcagtggtgctgatattacagaaatatgccagcgagcatgcaaatatgccataagagaaaacatagagaaggacattgagcgagagaggaagagtagggaaaaccctgaggccatggatgaagataccgtcgacgacgaagttgcggagatcaaggctgctcattttgaggagtcaatgaagtttgcacggaggagtgttagtgatgctgatattcgcaagtatcaggcatttgctcagaccttacagcaatcaagagggtttggaagtgaatttaggtttccagagtctggagataggactactactggatctgacccctttgcagcttctgctggtggggctgacgaagatgatctatatagttaggctttattatcacagtgatgtatgaaatcacatgtctacctcacctctcaggagggataactttgaagcctgtcttatattttgcttttcttgtactcaattatcctgaattgttaccgggttaaccttaaataccatatatggatcgtatcttcattttatggaaagatattgtagaaacgggctgtgcagtgcagctcacggataacgaagcacttagaagttagaaaagcatacgaa

SEQ ID NO: 7025 - DNA, 976 bp, Glycine max
  misc_feature (1)..(1): n is a, c, g, or t
  misc_feature (17)..(17): n is a, c, g, or t
  misc_feature (26)..(26): n is a, c, g, or t
  misc_feature (28)..(28): n is a, c, g, or t
  misc_feature (31)..(31): n is a, c, g, or t
  misc_feature (41)..(41): n is a, c, g, or t
  misc_feature (54)..(54): n is a, c, g, or t
  misc_feature (56)..(58): n is a, c, g, or t
  misc_feature (69)..(69): n is a, c, g, or t
  misc_feature (80)..(80): n is a, c, g, or t
ncgattgggtaccgggnccccccctncngtncagctacgtngccccccccccanannnaattgcaaaanatactcatggntatgttgatgctgaccttactgccctttgcactgaagctgctcttcaatgcatcagggagaagatggatgtcattgatttggaagatgagagtattgatgctgaagtgctgaattctatggcagtttcaaatgagcatttccatactgctctgggaacaagcaatccatttgctttacgagaaactgttgttgaggtgcctaatgtcagcggggaggatattggaggccttgagaatgtcaagcgtgagctgcaagagactgttcaatatcctgtggagcacctagaaaaatttgagaagtttggtatgtcaccattaaaaggggttctcttctatggtcctccaggatgtggaaaaactttgttggccaaagcaattgctaatgaatgtcaagctaacttcatcagtgtaaggggcccagaattgctcactatgtggtttggtgaaagtgaagccaatgttcgagaaatttttgacaaggccagacaatcagctccatgtgtcctctttgatgagcttgattccattgctactcaggtctatttttgtacttcgcatccatgcaggccaggttgaattaaattatgaggctgggttgaaaggaattgtatgattttgttgccaaatctgtagatgatttaaggagataatgttacacgatgtttttcctatgtctaagttggtttttcctagaaatattctaaagtatcatcaacgcatgttgcgtgcacctgggaggctaagacaaactcatcaaaacattgtatctcaagagaatagtgcaccaccatttccatcaaagaaggattttggacgatttaaaaaaaaaaaaaaaaaaaaaaaaaaaaaaaaaaaaaaaaaaaaaaaaaaaaaaaaaaaaaaaaaaaaaaaaaaaa

SEQ ID NO: 7026 - DNA, 1680 bp, Glycine max
  misc_feature (126)..(126): n is a, c, g, or t
gttctccctgagcacaacagaggctcgactatctttgttgtcccaattcatagacttctatggtggaaagatgtctcaattgttttgctcaaacagcccaacaagggctgacaatatccttagttnggaggatttgccagattctatgttggagaagttgaaatgcatccatgaagttttgactaaacaacagaacagtcttgctggtttcagttttgaattcctatcaggcagtctctcgaggaatgctgatattatgaaatttatacggaatgctgtcttactttgtttaactgttttcccacgtaattatatgttggaagaagctgttcttatttctgaagagctttatgttacaaaaatgaattcttctaatggtatgattacaccatgtcgatctttagcaaaatctcttctaaaaagtgatcgacaggatttgttgctatgcggtgtatatgcacgaagagaggctacttatggtaacattgatcacgcaagaaaagtgtttgacatggcattgttatctgtagaagcgcttcctgtggaactacagtccaatgctcctcttctatatttctggtatgctgaggtggagcttgcaaataactctgctaatgatcgtgaatcttcatctcgtggaatacatatattatcatgcttaggaagtggtacaaagtacaacccatttaaaagtcaagcatcaagtttgctactgcttagagcacatcaaggatttaaagaaaaactgagaacagtgtggtcatcttgggttcgtggtataataaatgaccagtctgtagctctaatatgttctgctgcattgtttgaggagctaaccactggatgggatgcgggcattgaagttttgaatcaagctttttcaatggtgcttccagaaagaagaagtcaaggttatcagcttgaatttttgtttaattattatataaagatgcttcaaagacatcagagacaatcaagtctgatgaaagtttgggagtccatcttgcatggcctccagatatatccctttagtcctgaacttctaaaagatgtggtggaggttggccattattacactacatctaataaattgcggcggattctagatgactgtagttacaagaaaccatctgtagttctctggctttttgcgttgtcatacgaaatgtttaaaggtggttcacaccacagaatccgtggattgttcgaaaaggcattgggtaacgacaggctttgcagctcagttttgctgtggcgttgctacattatgtttgagatggaaattgcacatgatccttctgcagctcgacgtgctttcttccgggctatccattcctgcccctggtcaaaaaggctatggttggatggctttctcaagctgaactctgtccttactgcaaaagagctatctgatctacaggaagtcatgcgtgataaggaactgaatttgagaactgacatttatgagatccttttgcaacagtcgtgacattcgccctcccactactgctagaatccgactgtatgtaagacaggtccatgatgcagtactcatagtattggacttgtatgtaagatagttacatgatgtatattgtgcttccatataccctttgtgagaaaaaagattcttgatatagaaattttgtcactcatcttttcgattagtatgattactgc

SEQ ID NO: 7027 - DNA, 1114 bp, Glycine max
tcgagtcagctacgtagtgcccccccccccccctcgaggtttaagatgtgaaaaacctcgtccatttgagcctctatatataggtgtctcgtatgctcaaccctgacaagccagtgatagttgctttcagataactgatagttgtgtgcaattatttgaattcaagaatgtctcaacccgactcgttggtggctgagattgaggtgaaaacctctgctgatcacttttacgacaccttgaagggtaagaaacagcatcgtattcatgatgttgcccctcatcatatccataaggtggaagttcatgaaggtgagtgggataaatctggcaatatcaaggtgcttacattcgctgatggggacactgttgagaccttaaaggagagagttgattttgatgatgaaaacaagaagataacctacaccatattggagggtgtcatgttgaagtactataagagctacaaggttatcgttcatgttttaccaaaaggtgatgagcacagccttgtgaagtggactttcttgtatgagaaggtggatcacactgcccctgagccaaccaagtacaaagatttggtggttaaactcaccaagaacgtggaggctcatcttgttgaggctcgttaaaatgatccctaagtggttcacgctaaataaagttgtgatgtgtgtggtgtgttgcatgtggccccttggttaattatcagccattatgtttgctttaaattgccgtgcgtaatatgttgttggttaacttgttaaaaatattggttctcaaccataagttgtgtaatgtgttgttggtttattcaaaatattggccggggatcacagggagggctacatgcctttgtatgtctgtgatttgtaatcttcgaccagctattgattaattgatgttaagggggatttatccttgtttgtctcaaacattttgccaaatacttttgataactagaaggtttgtggatagccggtttttcttcattgggaagcttacaggcatgcattggctaaaaaccagaagaaattaaatgtcaaaatgcttccacaaaagttgtttaatttaaattaaacacttgaatatgttttaatccctgaaaaatttacag

SEQ ID NO: 7028 - DNA, 1407 bp, Glycine max
  misc_feature (10)..(10): n is a, c, g, or t
cccacgcgtncggacgagctacgtaggcccccccccccccacaccaaacccacaaaacactatagcaatagaaacatttgcttttgaaaaacccctcactcttcatcactacactagctagccacatacaatgtcgaccaaatttaaggtgtttcgtgaattcacaagcgatgactcattcctaaaccaagttatccctgaaaacatcaccgaattccaagtgactctgtccctcgctagagactacgatggcaacaactcaaccaacggaaagttcattccttactgggacactgaaaaggtcactcccgaagtgataaaaaaattcaagaaaaaatacgaacccaccgcactgagggttaaggttcttgtcagcattggaaacaaaaacaaacaatttcctttcaccattggctcggactcgaacagcgaagcatgggtctccgaggccactgcttcgctgaagagcatcattaaaacctacaaccttgatggcatcgatgtcagctacgaggacatcgccgccaacgaagccgactttgttaattccgttggggggcttgtgaggaacctgaagcagaacaagctcattactgtggcttccttcgcaacaagcgctgatgccgccaacaacaaattctacaatctcttgtacgcagaatatgctactttctttgacactgtggtgtttctgagctgggtagggtttactccttctcgcgccaacccagttgcgagcttggaggagaagatccttgccgtggccaacgagtataaggccgtgaaggcctttctggtcgcttacagcaccgttgctgaggattgggctaatttttcgccacctatcttctttatcactctccatggccttctgggtaactctgcggttaagggagcgtccattaaggtcattagtgacgccaccgcctcctttcccgccaagtggatccctgaaattttattgttggctgcctctaaatgaatgaggtatgacatgaagggtgaacacgtatctcagaagtgttatgtgatatgtatgatgtgtgaatcttgaaataatatcttaagggcaagaagttattagttaaaattattagaggtagttttatgaatgggtcataataataaatgctagctatatgtaccactatggaataagattgggtcataataataaagctagcttgctagctatatgtactatacgtaactatggaataagacccatactagtgctataggggcttgctatatgtatgtgtttcatctgcaaattaagagctgagacgcttgccatgcaaggcagacaactattatatatattatgttatgtgtttgaaaaaataatgcatgtgtgtgtcttgtgaataaaatatatttttaagttccaaaaaaaaaaaaaaaaaa

SEQ ID NO: 7029 - DNA, 1710 bp, Glycine max
ttttaattaaaactttggtcactggactttatttttgtctactaattcaacaaagagcttcaaaaaagcctccataagaaataccataatcctatttgtacaaaaaatacaccttgttagatcacaacatctcgccagagaaatgactggtgagatgttgcatgaaacagctgaaaggaattttagaaggaaatggtgccttgcttgcaacctgcaagatcttgaacaacttcatcaaccaaaatttgaagtatatccccatctatatcaacaccagcctcaaatgcttcaatatcaaagtcagtccatttccccaaggagtggctcatttcccattctattatttcatcaggcaccatcccaaccatagataaccacttgttgatctccctcttcacctcttgagccaacatctcagcttccatgcacaagggcagcttcgtccatttcttgaatccagagttaaaatattggcagcaatttgattctagatattctataacacaatcaagaagaaacccctttagctcctttctctgtttagaatcctcacaacccacgatgccattagcatcagtccacatagcatcactcgccatactgtcaagatcatcaccaagaaaccgataaattagaagttgtggcccttgatcctctctgcggtcagttgcaattccaagcactaactcagcatgcaagagaatatccttcatatggccaagcttgcttcttgtcaattctgtccccaaagtgagcaaactttctaatgccctgggaatttggttgataagatcactcagcatctcacctgtgcttccttttttaaaggatgttgcagaatctgaaagttcagtatcatgttccagttgaccataatatgagtaattcatggaatcagggtgaaaaccatgccctgagctttcatcaagactactggaagaaaaagaagcttccaaaacagatccaggactcagatgattaccattgcaagaggttcctaataacctttcttgttttgccccataatggaaaccaacattttcattaaacatgtgatgatcatcatgacagatcagattctcggaacttagagcagatatcagctcttgaagaatcatggcactcgattttttaggtggagcacctgtagccaactcctcatctctttgagaggttaattccttcaatttttgttctagaaaggcacctaaagcatcaactctcagaggcgaaggccttcggaaatacctcatactctcattatcactgcttgtctcttccctcttgccatggattcctatcttttgcttcaaggggggattaaatgacactacattgatcttattgtcattaaccttaataaatctttctccttgaccaacttgtttattttttacaatagaattgttcagggaggaagcattgaagtcccttattttgccacccattccaccagaatggagatttctctgttttgcatcaactgaataaacagaacccgcgccttccagttgtgtgacattagggatccttctttttctctctaatgtccttccatgagacaaggaactctgctgtcgattgtaaggttttttctcggggggggggcctacgtagctccccgtggtaggtgacctcatccttgatcggccacttagacttctattcatagcaacaaagtctttagttccattcacagcactcatagat

SEQ ID NO: 7030 - DNA, 2123 bp, Glycine max
aaagaaatgatatttgtattgaagcaataataaaccaatgacaacagagttggggtagaactagaaagcatccctagcaaaagtcaaggttggccccttgcgtcaatcgccggcttcgaaatcgctgtcaattatggcatcacactgtgtaatggccgtgacgccctcaacccctcttctctccttcctcgaacgcctccaagaaacagccttcgaaaccttcgcccattccaacttcgatcccaaaacctacgtggacatgcctctcaagtccgccctcacggttaccgaggacgcgttccagaagcttccgaggaacgccaacgggtccgtgccggttgaggatttgaagcgtttcatagaggcctactttgaaggtgcaggggatgatctggtgtaccgggacccacaggatttcgttcccgagccggagggtttcttgcccaaggtgaaccaccctcaggttagggcctgggccttgcaggtccattcactttggaaaaacttgagccggaaaatatccggtgcggtgaaggcacagccagacttacatacgctgctccctctccctggttcggttgtcattcccgggtcgcgttttcgcgaggtttattactgggattcctattgggttattaggggcctgctggccagtcaaatgcatgacacagctaaggctattgtcaccaatctcatttccttgatagataaatatggctttgttcttaatggggctagagcttactacactaacaggagccagcctccccttttaagcgccatgatttatgagatatacaatagcacgggtgacttggaattagttaaaagatctctacctgccttactgaaagaatatgaattttggaattcagatatacataaactgaccattttggatgctcaaggttgcactcataccttaaatcgttattatgcaaagtgggacaaacccaggccggaatcgtccataatggacaaggcatctgcttccaacttctccagtgtttcagaaaaacagcagttttaccgtgaactggcatcagctgctgaatcaggatgggatttcagcaccagatggatgagaaatccacctaatttcacaacattggctacaacatctgtaatacctgttgatttgaacgcatttctactcgggatggaacttaatattgccttatttgcaaaagttactggagataatagcactgctgaacggttcctggaaaattctgatcttagaaagaaggcaatggactctattttctggaatgcaaacaagaaacagtggcttgattactggctcagcagtacatgtgaggaggttcatgtttggaaaaacgagcatcagaatcaaaatgtatttgcttccaattttgttcctttgtggatgaagccattttactcagatacttcgcttgtgagtagtgttgttgaaagtctcaaaacatctggcctgctccgtgatgctggagttgcaacttctttgactgattcagggcaacagtgggactttccaaatgggtgggcgccgcttcaacacatgctagtggaaggactgctaaaatcaggattgaaagaagcaaggttattggctgaggaaattgccatcagatgggtcacaaccaattatattgtttataagaaaacaggtgtaatgcatgaaaagtttgacgtggagcattgtggagaatttggaggtgggggcgaatatgtaccccagactggttttggctggtcaaatggagttgtgttggcattcttggaggagtttggatggcctgaagatcggaacatagaatgctgatgtgcccagagatagaaaggtggaaaaaatttggtacgctgcaagaatttattcatgaaagctatttgcatgaggggttgaagaaaagtagttaataaatgcgtcaaaagccacttgttaaagcctataatgaaagttgagatgatttgagtttattactttatttgccatttgatgttttacttggaagtatgttcagaaaattcaacaaaagtgatggatgtcatcacatatcaatgctttggcacaaattgatgcataattggaccatttgatgtgagttgcttaatatactggcgtctgacgggattaaaga

SEQ ID NO: 7031 - DNA, 1532 bp, Glycine max
tacggctgcgagaagacgacagaagggggagcgagagacgaagagaagaggaaagagcgcgttatgtggcctcttgtctcgttatttgcagaaacacccgcaaagccagaacagaaatcgcatataaaatgcgaaaagaaatgaattcaatgttcggagatctgcacaggatctctctccgtcaaactttctttaccccgtcctcataacatatttcagatccgaaaaccagatcccgcgaactctgaagatctctattctctttccctcacctttccactcaaattcccctttccactttcccgagaaaattaactttttccgtcaattttccctccacctcttccttcttcctcacaatggctctgagcttcaacaatcgaagaatccctctcgctcttcgcattttccttctgttctccttattcttcagcctctcaccgaccttcgctcaggattctctcgttcagaacgcgaaggaagattccggcggatctgtggatctcggtcgccgcgccaaaattgcattgaatgacatagagaatgattcgatcctttctcttggcttggactccaccggtcctggactcttcgacgcatttttcgcgagtttttcgatgatccttgtcagtgagattggggatgagacgtttataatagcagctcttatggctatgcgtcaccctaagtcaattgtcttgtctggtgctctcagtgctctgattataatgacagtactttctacagggcttggcaggattgtgccaaatttgatttctaggaagcatacgaatagtgctgctacagttctttatgctttctttgggttaaggttactgtacattgcatggagatcatcagattcaaaatcctcacagaagaaagaaatggaagaagttgaagaaaaactggatggtggacaagggaaaacttcagttaggcgcttcttttcaagattttgtacaccaatatttttggagtcttttattttaacattccttgctgagtggggtgaccgtagccagatagcgacaattgcactggcaacccacaaaaatgcaattggagtagcagttggggccactataggacacaccatctgtacctctctggctgtagtgggaggaagcatgctggcatctaagatttcccaacgctcagtagccactgttggtggcttgctcttcctcggattttctgtatcttcatatttctacccgcctctatgatgaatacaagtgcagagtaatctgattcgtaaaggcttgtggcctttctatcctgctttttccccccctacataattgtctttattgtagattttgttgtacttgttccctaggaaagctcgatactaactggaacatgagattttgaatcccatttttttttgtaaaatatgttacattctcgtctcctccacacattagcacgtagacagacactgctatttatcattatttttggaaggtaaaagtatcatccccttttccatggttcgtaaaaaaaaaaaaaaaactcgagactagttc

SEQ ID NO: 7032 - DNA, 1555 bp, Glycine max
ctgatcgagagacgaaggcagaggaaagatcgcgttatgtggcctcttgtctccttacttgcaaagccggaacagaaatcgcatataaaatgcgaaaagaaatgaattcaatgttcggagatctgcacaggatctctctccgtgtccgttgaactttctttacgccctcctcgtaacataaaaattcagatcccgccaactctgaagacctctattctctttccctcccctttccactttcccgagaaaaataaacttttccgtcaattttctctccacggtttccttcttcctcacaatggctccgaacttcgacaattcaccaccctaggcccccccccccattttccttctgttctccttattcttcagcctctcaccgaccttccctcaggattctctcgttcagaacgcgaaggaagattccggcggatctgtggatctcggtcgccgcgccaaaattgcattgaatgacatagagaatgattcgatcctttctcttggcttggactccaccggtcctggactcttcgacgcatttttcgcgagtttttcgatgatccttgtcagtgagattggggatgagacgtttataatagcagctcttatggctatgcgtcaccctaagtcaattgtcttgtctggtgctctcagtgctctgattataatgacagtactttctacagggcttggcaggattgtgccaaatttgatttctaggaagcatacgaatagtgctgctacagttctttatgctttctttgggttaaggttactgtacattgcatggagatcatcagattcaaaatcctcacagaagaaagaaatggaagaagttgaagaaaaactggatggtggacaagggaaaacttcagttcggcgcttcttttcaagattctgtacaccaatatttttggagtcttttattttaacattccttgctgagtggggtgatcgtagccagatagcgacaattgcactggcaacccacaaaaatgcaattggagtagcagttggggccactataggacacaccatctgtacctctctggctgtggtgggaggaagcatgctggcatctaagatttcccaacgctcagtagccactgttggtggcttgctcttcatcggcttttccatatcttcatacttctatccgcctctatgataattacaagtgcagagtaatctgattcgtaatggcttgtggcctctctgtcctgtttttttccccccctacataattgtctttattgtagatttgtgttgtacttgttccctaggaaagctcgatactaactggaacatgagattttgaatcccattctttttttgtaaaatatgttaagttttcgtctcctccacactagcacgtagacagacattgttatttatcattatttttggaaggtaaaagtatcatcttcttttcatggtttaaaaaaaaaaaaaaaaaaaaaaaaaaaaaaaaaaaaaaaaaaaaaaaaaaaaaaaaaaaaaaaaaaaaaaaaaaaaaaaaaaaaaaaaaaaaaaaaaaaaaaaaaaaaaaaaaaaa

SEQ ID NO: 7033 - DNA, 931 bp, Glycine max
  misc_feature (672)..(672): n is a, c, g, or t
  misc_feature (698)..(698): n is a, c, g, or t
ctgatcgagagacgaaggcagaggaaagatcgcgttatgtggcctcttgtctccttacttgcaaagccggaacagaaatcgcatataaaatgcgaaaagaaatgaattcaatgttcggagatctgcacaggatctctctccgtgtccgttgaactttctttacgccctcctcgtaacataaaaattcagatcccgccaactctgaagacctctattctctttccctcccctttccactttcccgagaaaaataaacttttccgtcaattttctctccacggtttccttcttcctcacaatggctccgaacttcgacaatcgaagattcgttctcgctcttcgcattttccttctcctctccttattcttcaacctctcaccgaccttcgctcaggattctctcgtgcagaacgcgaaggaagattccggcgaatctgtggatctcggtcgccgcgccaaaattgcattgaatggtatagagaatgattcgatcctttctcttggcttggactccaccggtcctggactcttcgacgcatttttcgcgagtttttcgatgatccttgtcagtgagattggggatgagacgtttataatagcagctctcatggctatgcgtcaccctaagtcaattgtcttggtctgggtgcggctcagtgctctgattataantgacagtactttctacagggcttggncaggattgtgcctaatttgatttctaggaagcatacaaatagtgctggctacaggtctttatgctttctttgggttaaggttactgtacattgcatggagatcctcagattcaaaatcctcccagaagaaagagatggaagaagttgaagaactactggatggtggacaagggaaaacttcagttaggcgcttcttttcaagattttgtacaccaatatttttggaagtcttt

SEQ ID NO: 7034 - DNA, 1853 bp, Glycine max
cacaaagctagctatagctgctacctcttattggcttttttgtcttactgtttcaataacagtaagctctaagccaccgccaagtttcatttccttctttaatttcctccctttctaccttgttgttattcttcttcaccttggttaccctgccctacccaaaagttcaatatcttttttgcagcgtcaataccctccaaattccaataaagatatacacacacacatttatatgttcatatagtatatggtatacaacatgatcattcaatattcatcaaattggagctgcaatttatccatgatggcaaggcttgccttgtgcctccttgtgatgttgagcaataatgcaagttcttcatctgctcgtttattgttcaatagaacaagaggagggttcacgatcatgcctaaagaagtacataggagaaacctgcttgataatggacttggccatacaccccccatgggatggaatagctggaaccattttgcctgcaatattaaagaagacttaattcgagaaacagccgatgctatggtgtcaactggccttgctgctctaggttaccaatatattaacatagatgattgttggggagagcttaaccgagactcaaagggcaatttggttcccaaagcctcaacatttccttccggaatgaaggctctagctgattatgttcataaaaatggtttgaagttggggatatattctgatgcaggaaatcaaacgtgcagtaaaactatgcctggatcacttggacatgaagaacaagatgcaaaaacatttgcttcctgggggattgactacttgaagtatgataactgtgagaataacaatataagccccaaagaaaggtaccctccaatgagtgaagctttggcaaacactggaaggccaattttcttctctttgtgtgaatggggatcagaagatccagcaacttgggccaaaagtgtgggaaatagttggagaacaacaggagacattcaagataagtgggatagtatgatatctcgtgcagatctaaatgacaaatgggcttcttatgctggacctggaggatggaatgatcctgacatgctagaagttggaaatggaggcatgacaacagaagaatatcgcgctcatttcagcatatgggcattagctaaggctcctttgttgattggttgtgacattagagcattggatgccaccacaaaagaattgctaagcaacaacgaagttattgcagttaaccaagacaagcttggagttcaaggaaagaaggtgaaaagtactaatgatttagaggtttgggcaggtcctctcagtaataacaaggtagcagtgatcttatggaatagaagttcatccaaagcaaaagttactgcatcctggtctgacataggcctgaaacctggaacttcagttgaagcaagagatttatgggcgcattcaacacaatcatctgtttcgggagaaatatctgctgaattagattcacatgcttgtaagatgtatgtcgtcactcctaactaagctgttaatttcttgaggcagaaaaggaggtaaaaacagaagtcaggagaaacaaatgcattggcaatagttggatgttccatagaaggaaaaagaaatcaataggatatttatttatcaataggaaatatagaaagatatgtatacgttgtttagctccgaaggtttccattttaaattatacattgtcattgagatctacttgatttcaatataatatgcatttcatatccctaattcctgttaatctggtatcaagcatggactgaaaggaagtacatagaatattttctatatatagatatatggttgacatttttatcta

SEQ ID NO: 7035 - DNA, 1143 bp, Glycine max
gcaccgtcttttctcgcgtattagcataatcgctgacgcagatgcaaacatcgaaggagaacgcgatgctttgttcctcttttgttcttccccttcccaatcttcaactttagggttcctttaatctcgttattcctcttcactcccaagctccgttcactccaacaacactccgatttagaaatggatggaccagctggccgaggtggtgctggcctggacatgtttctaccaaattataaattgggaaaaacactcgggattggatcttttggcaaggtgaaaattgcagaacatgtgttgactggccataaggttgcgatcaagatccttaaccgacgcaagataaagaacatggaaatggaagaaaaagtgagaagagaaatcaaaattttaagattgttcatgcatcctcacattattcgactttatgaagtcatagaaactccaactgacatatatgttgtcatggagtatgtgaagtctggagagcttttcgattacatagtagagaagggtaggttgcaggaagatgaagctcgtaatttttttcagcagataatctctggggtggagtactgtcacaggaatatggtggttcatagagatttgaagcctgagaatttacttttggactccaaatgtaatgtcaagattgctgattttggcttgagcaacatcatgcgtgatggtcactttcttaaaacaagttgtggaagccctaactatgcagctcctgaggttatctctgggaaattgtatgctggacctgaagtggatgtctggagctgtggtgtaattttatatgcccttctttgtggcacccttccttttgatgatgaaaatattccaaatctcttcaagaaaataaagggtgggatttacactcttcccagtcatctatcacccggtgctagagatttgataccagggatgcttgtggttgaccctatgaggagaatgaccatacctgagatccgtcaacacccatggttccaagctcgacttccacgttatttagctgtgccaccaccagatacaatgcaacaggccaaaaagattgatgaggagatccttcaggaagtggtgaaaatgggatttgacaggaatcaattggttgaatctcttgggaacaggatacaa

SEQ ID NO: 7036 - DNA, 1109 bp, Glycine max
ttgtcggctgcgagaagacgacagaagggggctgcggtagttggctctctctctttctctcataaaaacactccgagtacaaagaccctctctcctctcctctttgcattcgagtgaaagaagcgaagaaaaagaaacatgtcagacgcgttctgcagcgactgcaagaggcagacggaggtggtgttcgaccactccgccggcgacacggtgtgctcggagtgcggcctcgtcctcgaatcccactccatcgacgagacctccgagtggcgcaccttcgccaacgagtccggcgacaacgaccccaaccgtgtcggtgggccctccaatcccctcctcaccgacggaggcctctcgaccgtcatcgccaagcccaacggcggcggcggtggcgagttcctctcctcctccctcggccgctggcagaaccgcggctccaaccccgatcgcgccctcatccaagccttcaagaccatcgccaccatgtccgataggttgggactagttgcgaccatcaaggatcgggcaaatgagatatataagagggttgaagatcaaaagtctagtagaggaagaaatcaagatgctttattggctgcttgtctctacatcgcttgccgacaagaagacaaacctcgtactgtaaaggaaatttgctctgttgccaatggggccccaaaggaggaaattggccgagcaaaagaattcatagtaaaacacctgggtttggagaatggtaatgctgtggagatgggtgcaatacatgcaggggcctttatggaggagtcccatatcaattgctgcagcagttatatacatcataactcagctttttgataataagaagcctctcaaagatatatcacttgccacaggcgttgcagaaggaacaattaggaactcctccaaggatctttatcctcatgtttccaaaataataccaaattggtatgttaaggaggaggatttaaagaacctttgcagcccttgaattgtaaagcagaatattcccatccatattaacaatttccaagttataatgtcattagagcattttgtttcagatgtaactgaactggttattacaaatcaaagtgccgttttttttt

SEQ ID NO: 7037 - DNA, 1307 bp, Glycine max
tccaagttctataataagcagcatttccacacatttctttcctacaaagcaactcaatgtgcagcatttcccctcttccctctccaacaacatttgttctagacaagatctccatatctgttcccaaaagcttgtttgtaagaatggcttccggtgaacagaaattccctcctcaacaacaacaaacacagcctgggaaggagcatgctatgactccagtaccccaattcactagccctgactacaagccttcaaataaacttcaagggaagattgcattagtcactgggggtgattctgggattggacgagcggtgtgtaacttgtttgccttagaaggtgctaccgtggccttcacgtatgtgaaggggcatgaggacaaggacgcgagggacacattggaaatgatcaagagagcaaagacttcggatgccaaggatccaatggcaataccatctgatttgggttacgatgagaactgcaagagggtggttgatgaggtcgtgagtgcttatggttgtattgacattctggtcaacaatgcagctgagcagtacgagtgtggaaccgtggaggacatagacgagcctaggcttgagagggtctttcgtacaaatatcttctcctatttcttcatggcgaggcatgccttgaagcacatgaaggaaggaagcagcattatcaacacgacatcagtgaatgcatacaagggacatgcgaaactattggactacacgtccaccaagggggcaattgtggcctatacaaggggtcttgcccttcagctggtgagtaagggaattcgggttaatggggtggctccagggcccatttggacccctttgataccagcctctttcaaggaggaagaaacggcccaatttggagcgcaggtcccaatgaagagagctggtcaacctattgaggttgctccttcctatgtttttcttgcttccaaccaatgctcctcttacataactggacaagtccttcaccccaatggtggaaccgttgtgaatggttaaaccgttggtgatgatgatattcgggatgaatatatgtggcgagagtagtaggccagtgttacgttttgtgtgaatgttttacgatgtgttttaatgcatggctaactcactcaggtcctctctgcactgttagaggtggggcttggaggattatccacttttgaatgtacgagttattagcctaagaaaatgtgtcttttgtagccaattatatgtaaacaagtaaaagtatataataaagatcggtatgtataaggtttaaactttaaaaaaaaaaaaaaa

SEQ ID NO: 7038 - DNA, 1334 bp, Glycine max
gtttaaccgcacattttgcacttcgtctccaagttctataataagcagcatttccacacatttctttcctacaaagcaactcaaagttgaacaaaactcattttccaactacatttcttccaccaactcataaaatcctcatatctgttcccaaaagcttgtttgtgagaatggcttcgggtgaaaagaaattcccacctcaacaacaacaaacacagcctgggaaggagcatgctatgaatccagtaccccaattcactagccctgactacaagccttcaaataaacttcaaggaaagatagcattagtgactgggggtgactctgggattggacgagcggtgtgtaacttgtttgccttagaaggtgctaccgtgggcttcacatatgtgaaggggcatgaggacaaggacgcgagggacacgttggaaatgatcaagagggcaaagacttcggatgctaaagatccaatggcggtaccagctgatttgggttacgacgagaattgcaagagagtggttgatgaggtcgtgaatgcttatggttgtattgacattctggtcaacaatgcagctgagcaatacgagtgtggaacagtggaggacattgatgagcctaggcttgagagggtctttcgtacaaatatcttctcctatttcttcatgaccaggcatgccttgaagcacatgaaggaaggaagcagcattatcaacacgacatcggtgaatgcatacaagggaaatgcgaaactattggactacacgtccacgaagggagcaattgtggcctatacaaggggacttgctcttcagttggtgagtaagggaattcgggttaatggggtggctcctgggcctatttggaccccattgataccctcctctttcaaggaggaagaaacggctcaatttggtgcccaggtgccaatgaagagagctggccagcctattgaggttgctccgtcttatgtttttcttgcttgcaaccaatgctcctcttacataactggacaagtccttcaccccaatggtggaaccgttgtcaatggttaaaccgttgttgatgatattcgggatgaatatatgggacaagagttgttttgtgacttgtagacaagtgttacgttttgtgtgaatgttttacggtgtgtaactcgctcaggtcctctctgtacttttagagttggggcttggaggattatccacttttgaatgtacaagttattagcctaagaaaacgtgtcttttgtagccaaagatatgtaaaagagttaaagtatataataaagatcggtatgtattaaggcttaaaaaaaaaaaaaaaaagggcggccg

SEQ ID NO: 7039 - DNA, 1688 bp, Glycine max
ggatgttataagaggtgtctcggtgaagtcaaggttggtctcttctggtctgttctgttcttctacgcagacacataacataacacaacgcacctcttcttcttcttctttcccttcaaatttcaacttcttcatccattttgtgctccaaacagcacaaacactgcaatcacaccgtcttcgctttctactcatctaaaagatagaggttcatgggttgctttggcttctgcaaaggagatgatagtgttacagttgctgacagaggacctttcatgcaaagcactcctactgggaaccccagttatcatggaagacacacagcagtaactgctcctcggactataaattttcaacctattgctgtcccttccatcacagtagatgaattgaagtctttgacagataattttggctcaaaatatttcattggtgagggtgcatatgggaaagtatatcaagccacattgaaaaatgggcatgcagtagtaataaaaaagttagattccagtaatcagccagagcaggaatttctttctcaggtctccatcgtatcaaggctaaagcatgaaaacgttgtcgagcttgttaactattgtgttgatggtcctttccgtgcccttgcctacgagtatgctcctaaaggatcccttcacgatattctacatggacgcaaaggtgtcaagggtgcacaacctggtccagttctctcatgggctcagagagttaaaattgctgttggagcagccaggggacttgaatatcttcatgaaaaggcagagattcatatcatccatcgttacattaagtctagtaacatacttctttttgatgatgatgttgcaaaggttgctgattttgatttgtcaaatcaagcccctgatgcagcagcacgtcttcattctactcgtgttcttgggacctttggttatcatgctccagaatatgcaatgactggacaactcacttcaaaaagtgatgtttatagctttggagttatactgctggaactcttaacggggcgtaaaccagtggatcatacactgccacgaggacagcaaagccttgtgacttgggcaacaccaaagcttagtgaagataaggtgaagcagtgtgttgatgttagactaaagggagagtacccttcaaaatcagttgcaaagatggctgctgttgctgcattgtgtgtgcaatatgaagctgagtttcgaccaaatatgagcattatagtgaaagctctacagcctctactgaatactcgttctgttcactcaaaggaagcacccaagatgtaataaaaacatgtaaattccaaaatcattcatttcttctttcagactggagtgcgttgaccaattgtccttgtgacacgtgtcagtattacataatctgaagcatatagtattaaagtatattttgcgttattatatttgtatctcaactaagcatgttatagctgatataaaaaaaatagtgatggtaggtggcaagagcctatcatagatggttaagtttatggtttgaatacttattaatttgtatttgtttgtttgtttttcctataagccgtgtacaagtgaatttataatattacttgtcatgtacatcacatgtctagttgctttactatttcaaagagaggtttcttctccacgcgtagggaatctagaagcatgcttctttttttt

SEQ ID NO: 7040 - DNA, 1224 bp, Glycine max
  misc_feature (1)..(1): n is a, c, g, or t
  misc_feature (3)..(3): n is a, c, g, or t
nangcacgaggggaacaaggggtcttggggcagggtctagtgcttataaatactctggcattcgcccccgcccacgacaaactgaggcacacagaaaaaaatgggttcttcttcttctatgtggacggtgtgtgtgattttggcatcactggcctctgcagcactctgtgccaacccacgcaggccagtggatgtacaatttggccgaaactacgtgcccacatgggcctttgatcacatcaaatatttcaatggtggttctgacattcagcttcatcttgacaagtacactggtactggcttccagtccaaagggtcttacttgtttggtcacttcagcatgtacataaagatggttcctggagattctgctggcacagtcactgctttctatttatcttcccaaaacgcggagcatgatgagatagactttgagttcttggggaacagaacaggacaaccttacattctgcaaacaaatgtgttcaccggaggcaagggtgatagagagcaaagaatctatctctggtttgatcccacgaaagaataccacagatactccattctctggaacttgtatcagattgtgttctttgtggacgaggtgccaatcagggtgttcaagaacagcaaggacttgggagtgaaattcccattcgaccagccaatgaagatctacaacagtttgtggaacgctgatgactgggcaacgaggggtggtttggagaaaacggattggtcgaaagcacccttcatagcagcgtacaaggggtttcacatcgacgggtgcgaggcttcggtgaacgccaagttctgcgacacgcagggcaagaggtggtgggaccagcctgagttccgtgaccttgacgccgcccagtggcgtaggctcagatgggtgcgccagaaatacaccatctacaactactgcactgacactaaacgctatcctcatatctctcctcctgagtgcaaaagagaccgtgacatttaaatttcgagtgaatagatattttagtccgtgatatttaaatttctcattcactttattattgttgcttctcttttcatttttatcaccctgccacacattcacatttccacttcctatgtacaattttatataattatatcctatcatgtcagtttctccttgaattattaattatttaatatgaccaaaataattattcatcatcatatttatcctttaaaaaaataaaaaaa

SEQ ID NO: 7041 - DNA, 1559 bp, Glycine max
aaagagaaagaaaacagaatattgtattactcctattttggaatcaaatttaagtaaatcaaaacaatacattgcaaaagggcagcataactctgaaactcttagaatcattaaatataatacatactaagtgggacaataaggttttgacatgaaccctaacctgtttatgaacccatagaaacctgtgttaagagaacaggattattcttgcctatctgctatcacctcctatgaggattttgcaacaacttttgagatccttcaaagaaatccaaaaggtagttttctaaatcatcaggactgtacttaatgattttgtcacttgtgtacgaactgaaccttccaacaaacgacctataagcttggattactttgacagatatagaaatccgcaaatcttcacgaagctgaaaatcagggataatccaagctgtctggatcctgtaaacatcctcaaagccaaggtagaagcttcgcagcctctctttaacaagactttttgagaccgaagttatacccggaacaaaaactccctcatccttaagcaagttgagaatggaactccaactagctctctcatatttcattgcatgctgctgaaacttccagttgcgctttcgaatccattcatctccatgtacgagcctgagttcagaccccttaaccttttcagccatataatgcaggttgttcattaagaacaagtgctgcaaggagacttctttgtataacttggacttctcctcgaggttgctttccaagattgaagcaattgatcggaagtgaagggccattgaggaaactctacctggagatccctggcttctgctatcttcctctgtaccagggctcatgtcaggtgacagcgaaatggcatcctcgtcttggtccttcaaaagcagattgagtatgtcactgtagtcggtaagggctctaagataattcataacatatttggtcaaaggatgtatcccaccacctacaaaaggagttgatgatacatttgttgcaatggcattttcaaattcaagaaatgtcaccctcacacaatcgcctaatctcttcagaacctcatgacattcaatttttaccgaggaaccaacctcatctgaatacaaagcatcaatgtctggcataaggtcttgtagaacctcatatatgtcaagaacgcggaacaatttctcgggttggtgagggccaatggacatggcttcaccgaaattcagaagctgcaacatcgaagccttagatgcatcgacaaaacaagatagaccaacaggctcaccctccccaaaaagctggtcactgagccacctctcacttgcaagatacaccctaacaaaaattttcacagcccaaatccatcttttgatttttgagttcagagtaccccactccattttcaagacgtcctcgatgctgagcctttccatttcaagaatgaagaggcactcatctaaggcatccctccggacaataatataagcattggagcattcctgaacataattagaagcaaaaagcaagtttgcaatacacctgagatccgggatcac

SEQ ID NO: 7042 - DNA, 1453 bp, Glycine max
tttttacaagaaaaaaaaatgtatttaagccaaaatgaattttatcatgtgcaattaggatggcaaaaaaaatcatacatgcccatatctgcgagtaaaacccacaacaaattggatttagataactaaatgtactcacggatgtcagataaccttgtctcgaaccaacattttcatcgtttaaatcaagcttctcatcggcaaggcactttgcatgcgagtcctattcctacttttgtagttgccatttcaatgaatccttattttctagtattgagaaataacaatggtagctatgtctgaaactagaaacagggtagctctagaaaatcataaatattaaatagtcactaatcaatagtagcaattcaattccattgttttaaattctctgaaatgaggtttgtttttgaatttttaccaacttgttctggaaacacaagacaaaatttcaccaaggcatactatcagcttttgctctgcaggtatgtctttctactcgtctgttacgcatccactagaagcaggtgtcacatttttaatatacttgtacagagctcctcggttagctttgtatggaggagcagtccactttttcctgcgtgcttccatctcctcatctgataccaaaacatcaattctcctattcttgatgtcaacattgattacgtctccattttgaatcaagccaattggaccaccttcctgtgcttcaggacatatatggccaaccacaaatccatgtgaacctcctgaaaatcttccatcagtcaataatgcaacttcctttccaagacctgcacccattattgcacttgttggtgttaacatctcaggcattcccggaccacccttgggtccctctcccctgattacaaccactttccccttaaaactcgaaggatcctctgaaatggcagcaatcattgcctcctctccttcaaagacaagtgcaggaccagagaagtacagcccttcttttccagtaattttagcaacggaaccctgtggtgcaaggtttccatataatatttgaatgtgagccgtcttcttgatgggattttctactggccttattatttcctgcccgttggacagaggagggacaagttctgcattttcagctagggtttttccagtgacagtcatacagtcaccatctaaaaagccttgctcaagaaggtagcggataactgcaggagtccctccaatcttgtgaacatcttccatgacatatttcccactaggcttaagatctgcaataaaaggaacctcatcgctaaccttctgaaaatcatcaagagtcaaatcaatgccaacagacttggcaatagcaattaaatgtaacacagcattagtagatccaccaagtgccataactataaccattgcattacgtagtgatttacgagtgcgcatatcgcggggccgcaagagtggtcgaaggagtggt

SEQ ID NO: 7043 - DNA, 577 bp, Glycine max
ctcgaggttggttctctgtttagggtctattgttaaaaaatgtcgtcgcagttaagccaagaactttgtgaaatgatatggccaagaactttgcttgatacccatctgtgagatcaactactctttcaaaagcgcatccagggagatagcagcagggacaatagcagacccaggatcattgaaggcaaaggacaagacaatgggggatgtggctgcatgttaaggtgccatagagcatattgatgagcttggcaaaggacattgactatcaattggatcttggtctggttattgacgttcctgtcattggcaacttcaccattcctctctctcagaagggagaggtcaaactaccaaccctctctaacatgttcgcctaatcgcatccacagagcttataattagaatcaaataaatgcattgcacactccatgatgtgttttacttttatgtaaatttcgccctttttagttgtacttgttattggtgtatgctctaaaactattcatggcttttgtagtacgtagtattacttatcatcatagtttgtgaagtgaagaacatgtttagtatgtcc

SEQ ID NO: 7044 - DNA, 1058 bp, Glycine max
agacaacagtaacaccattcacattaaataacatccaaccaaagacatatcatccaatcctctttaagtattagtccatagtcatacatcaattacgatacacacaacacaaacccataaaagtagtaagtagggcacaactcagaacacaaatatctgtttcccacatgcgtcctacactacactgctgtaactatcccggtggaaacttgtgaacgagtgtgcccgagccaaccgcaccaagttacctcgatctctcacagccagtgaaaaaaatttcttcattttctctctaacatgactaggatacaaaaagaggaagcaagtttgggccccatatcagcgtgcactcgtttttgggacccttatctggaataaccaaccacacccttctcattcaaaatggttcactcaccatgctatggtgtgagtgctactttctctttagtctaagacacggactaatgaataatgattcatagttcctttattgcgcttgatacactgaacacttccgtctttccttacacaatgcttaacataggttacactgactatatttccaactcagaaagggctttagaagacaactttactcagtatttcacacgtaacacctatgttgctgagcacaaattccttgacaaccatgaccttgtttattttgcagactccatgaagtatgaacaacaagcaaatcaacagaacttacactataaagtactacttagatgacaaatagtaacactgtgtgggtaataattctccaacttacaaggcatcaagtccgagtgcttgagccttgtgtttcaaggattttaagcaatgtatggcattgtcaagaagcatgaccggatccttatcctttccaccaggaattatgctctgcagaatgctcagaacatcgcgtatcttctcctttttaatcttcttattgccagacaaggatccttcattggtaatggtctcgtgcgttgattctgcgtcatcatctcccgttgcagaagacttgttcagattctgagaactggcagtatcaatgagttggatgtcatcat

SEQ ID NO: 7045 - DNA, 1711 bp, Glycine max
  misc_feature (1710)..(1710): n is a, c, g, or t
aattacggattttccaaatttacgttccattccccttcccttcgggggccaatttggaaagggatgggtgggccttttcttattcccactggggaaagggaattctccaggccattaattgggtacgccagggtttcccagcccgacgtttaaaacgacgcccaggattgtaattcgctcccattaggcgaatgggtacgggccccccctcgagtcaggtacgtagcccccccccccaatggctttagaaacaatgttgaagcttctttaaataacagtgaattacggaaagattcagccattctaataaatgagatgggggtcaatggagattgttatgatggtagaaacaaggaagttaacccagttcttggcgaaagctcagaatgggaaattcaatgggaggatcttgatattggtgagcgtattggtattggttcttatggtgaagtttatcgtgctgaatgcaatggcactgaagttgctgtaaagaagtttctggaccaagatttctctggtgatgcgctagctcagttcaaatctgaagttgagatcatgataaggctgcggcatcctaatgtcgtgctcttcatgggagctattactcgctccccacatttctctatcttgacagagtttcttccaagaggcagtttatataggctattgcatcgtcccaatcttcgacttgatgagaagaaacggttgcgcatggctctagatgtggctaagggaatgaattacttgcacacgagccatcctcccattgtccaccgagatttaaagtctccaaatcttcttgttgacaggcattgggttgttaaggtctgtgattttggtctgtcacgaatgaagcaccatacatatttgtcatccaaatcctgtgctggaacgcctgagtggatggcaccagaagtcttgagaaatgagccagccaatgagaagtgtgatgtgtatagttttggtgtgatcttgtgggagttgactaccacaagaattccctggcaaggtttgaacccaatgcaggttgttggagctgttggattccaaaataaacggcttgaaattccagaagatgtcaatccagtagtggcacaaataatacgtgattgctggcaaacggagccacacgtgcggccatcattctcacaactgatgtctcgtctttaccgacttcaacatttgattgtcccaaaaacaagctcaacacattaaacgaagttgtctataacatagctattgtaataatacttaaagctgttccttggttcaaagaaccagaacagctaaagtttttcttttcttttctttttttcgtccatcttgacatatcaagatattgctgaactggtaagtgtcaggtacattctaagttgggactggacacaacccattcagaaaagagcagggtccctccccaatatctgcataagtgcagtggaggtttagttggagtaggtacaaatgaagaatccccagagggaagaaaggcaagaaacataaaggaaaaaaaaaaagtacaaaattattctttgtctgtagaggtcttatttggaattgtaacatgcgatctctcaggttctcatgcaaatgtaaaaaagaaaaagaacaaaaaaaaaacagaaaaaaagaacattatgtatttcccgttactcagcttgagtttttcttgagcaagtgtacttcctagtggttatgatcaaaaaaaang

SEQ ID NO: 7046 - DNA, 1855 bp, Glycine max
tcagctacgtaggccccccccccccggctttcaagtgagggtgttgtggtaatgggtaggtgttggttagttggggtcataattgtggtggggtgtgctagttttctgggcactgttggagtagtagaagggtatccagctgaggatttggtggtgaaattgcctggccaacccaaggttgggtttaagcaatttgctggatatgttgatgtagatgccaagcatggaaggagcctcttcgactattttgtggaggctgagcaagaccctcacaagaagcccctcacactttggctcaatggaggtcctggatgttcctccattggaggaggtgcttttactgaattgggacccttttatcctaaaggtgatggacgtggtctccgaagaaattcgatgtcttggaataaagcatccaaccttctttttgtggagtctccagctggagttggttggtcatactcaaatacaacttcagattataattctggagatgcctccactgccaatgatatgtatttgttcatgctgaaatggtacgagaagtttccatcatacataacaagggagctgttccttactggagaaagctatgcaggacactatatacctcaattaactaatgttttattggaccataatgctcgttcaactggttccaaattcaatattaaaggagttgctattggaaacccacttttgagacttgaccgggatgcacctgcaatttatgaatacttctggtcacatggaatgatttctgatgaaattggccttgccattatgaatgattgtgattttgatgattatgtctatgcaagtcctcacaatgtttctcaattgtgcaacaatgccatatatgaagcaaatctcattgttggtgattatataaacaactatgatgtaattctagatgtttgttatacatccattacggaacaagaactcagattgaaaaggatggcaactaaaataagtgttagtgtagatgtgtgtatgactctagaaagacgtttttacttcaatctccctgaggtccaaaaggctcttcatgcaaaccgtacaaatcttccttatagctggtccatgtgtagtcatgttctaaactacagagacaccgatggtaacatcaacatccttccaattctcaaaagaatagtccaaaaccatatcccagtatgggttttcagcggagaccaagattctgttgtgccactattgggatctcgaacactcattcgtgaactagctcatgaattgcaattcaagattacagtcccatatggggcttggttccacaaaggacaggttggaggttgggtaactgagtatggaaatttgttgacctttgccactgtaagaggagctgctcacatggtaccttatgcacaaccttcaagagcacttcatctattcagttcttttgtgcgtggcaggaggttgcccaacacaacacgtccttcaattgatgaataaggatgatagttatgccagttgtgtaacaaaaaagtggcatgctctgatgacttttctaaagcctaaaaggccatagaaaaggaaatgtgaaaggaaaaaaaagactgtttcgttataagtaaccagcgattgtatggaaaggaaaattaacgtggaaaaaaatttgcattccatcgtacttctacttcatttggtagcacagatttctttggcttcatccctaggcgcctttgggattctagtgaaaaatttaagcaactttatttttgtcagttatccttatcgcaacaaatgcttgttttgaaagttatgtatcagcataaggtttggattattggttaaaccgaacattaattgaagagaatttagtagcaaaacc

SEQ ID NO: 7047 - DNA, 1284 bp, Glycine max
ctttgatgcccctatcgccatctgtttctccacagccaatgggctcacttgggtcatttgggcctagtgttggaatggcttctcatcaacagcaatcattggatctgcctcgcgcccgttcaaactcctatggtagaggatacctgcctaaccagggttctagctttggaggcacttccatttccaatcttaatgataggagttttgcttctcttgaaaatagcaggcggcaagggagaccaactgcttctctttgcaactgtaatggtactcttgatatccttagtgagcagaaccgaggaccaagggcctcgaagttgaaaaatcaaatttcaactgaaaataattctgtggatagtagtaaaaatagtgcatctactgccaagttccaaaatgaatcactcaatcggtcagattttgccacagattacaaggatgccaaattttttgtcatcaaatcttacagtgaagataatgttcacaagagcattaaatatggtgtctgggctagtacaccaaatggaaacagaaagttagatgctgcatatcgccaagcaatggagaagcaagatgcctgtcctatatttctctttttttcggtaaatgctagtgctcagttctgtggggtagctgaaatggttggacctgtcaattttgacaagagtgtggacttttggcagcaagacaagtggagtgggcagtttcccgtgaagtggcacataattaaagatgttccaaacagtcagtttcgtcacattgttcttgaaaataatgataacaagcctgtgaccaacagtcgagatactcaggaggtgaagttgacacagggggttgaaatgttgaccatttttaaaaactatgaaactgatgtgtccatcctggatgattttgatttctatgaagaccggcagaaggctatgcaagaacggaaggcaaggcagcaaagcagcatggtggctactggattggttggagaaaatgaacatcggagttctgctaacactaccggtgatttcatgaagcagatgtcgaagagctttgctctagttgtccgcttagatgagaataacaaggaagttgttgttgcagatagagatagtttagtctctcatggtcatggccccattggtaatgtagttaaacctgatgatggtcaatcagtgactgcctcttcaactcaaaccagttaggaaggcgtaccagttgtgccaagaatgttgttcacatttggtgattgaaaatcggaatcatccttactttttttccaaaaaaaaaaaaaaaaaa

SEQ ID NO: 7048 - DNA, 2204 bp, Glycine max
gcgttccggcgccatggctttccaacgaaacttcaccgtaagtactcagtactctttcccctttctcgcttcatcttttttcctttccctgcgcagcgctgccgtcgaaacttcaccgtttgactctcgcgagatgctcgcatccttcgtctcgtccacgcccctgctgtcggactcatggcgcctctgcacccaggccaacgccactcccttcctgaccttcgtgactgagcgtgtcggcgcctccgtgtatgtggctttctccggcgtccatatggccggcgagtccgacccgaactggagaaatttgactcctttgtacagcatcggcggcctgcctctgttttcgtctcggcggagcaaggaatgggaggaaccggtcatggttcatgctggcatcctcaatctcttcttttcacttttcaattctttccagaaccaggtgcgggctctagtgggtcaccttgtccctatatcagttgtcatcactggccattccattggaggagccactgcttctttgtgcactctttggcttctgtcttacctccaatccatctcttcatctgtgtcaatattgtgcatcacttatggggcaccgttgattgggaacgagtccttttcccaaaccattttcaaagaaagatggggtggcaacttctgccacgttggtgtcaaagcatgacataatgcccaaggtttgctctttgcccctataacctctctctctacccagctaaattccctgctacagttttggcacttgtccatgacttcgcccccccccccgaagcttgcaaatcagatatctgaaaaagagaaagataagttgttcactgctgtaatggattacttggaagcagcaacacaagatggagaaaaatcagcgccaattttgtttcacccttttgggagctacttttttgtctcagaagaaggagcagtgtgtgtggatagtccatccgctattataaagatgatgcacttgatgcttgcaactagttctccagctagtagtattgaggaccatctgaagtacggagattatgttaataaaatgtctgcacaaacattgtatcagagcaactccatgcaaaagaacatccctgactcaagctatgaagcagggcttgaattggccattcagtcctctggcatagcaaaccaggaaccagctattacatccgccaaggaatgtctgaagacaacaaggagaatgggtccttcaccaaccctgaatgctgcaagcctggcagttagcttatccaaggtggtaccttatagagcgcaaatagaatggtacaagacttggtgcgatgagcaagacgaccaaatgggttattacgactcattcaaaagcagggactcttccagttccaaaagggacatgaaaatcaacatcaaccgttgcaagcttgccaggttttggaacaacgttattgacatgttggaaaggggagagctacctcatgattttgacaagagagccaagtgggtgaatacttcacacttctataagctattggttgagccactagacattgctgaatattatgggaaggggatgcatagaaccaagggccattacatgcagcatggtagagagagaagatatgagatttttgataggtggtggaaggataaaacggttactactggtagagaagaaaacaaggagaggagcaaatttgctagtttgacccaagattcatgcttttgggccagagtggaggaagcaagggactggttgaattgtgttagaagcgagagagacactaacaagttggctctattgtgggataagattgaaaattttgagaaatatgccatagatttaattgaaaataaggaagtgtctggtgatgttctctttaagaattcaagttacagtatatgggtggaggatttaagagaattgaaacaactgaaagctaaggtgcaaaggtttcctcgtcagtttaccggttttctagatggggaagtagttccttagtatgtaatttggaaccaataaccttaactcattgtaagtgtagtatgtataagaactgcttccttctgcaaaatatctcgttttgcttgagttataactttttgtcgctttagaattttacttgaatacttatatagttatatgagagtagggctaaagtgaatcattaaaatattaatatcactatcaaaggcaacttgtcgtctctaat

SEQ ID NO: 7049 - DNA, 3055 bp, Glycine max
cccccccccgtccgtgactttgcaatgtagaatatccagtgttgaagcaggcacgcgatacgtggaataatcgtggacagcttggatcggaatcaagggtgtgatgtggtcacaccccaatcacatcacaatcatcacttggtttctcgatatactcaaagaatagcactggtgtatgcaggatcgtcctttccatagggtcgttagttcgtgtgcaaagagcgtgatcccaaagcattcttcaactggatgaggatcataaatagtagtagcagcatattcaagatgacatagttgtaataatagtgttttcagcgcgcatcactctttctttcgctttctctctcttcctcgttcgcttctctccccgaaatggagcagtctctgctgagaggcgaaagcagtgaccagagtaaccggtcgcggggaatattccggcgctccgatgctatcacctacggctccaactacgagaaagccgctgcgttcatcgatctggctgaagatggtgttggtctccctgaggaaattctcgactcaccaaacttccaaaattacataagattttactttatattcaataaatgcaatctaatctggtctcttagttattttgctttgatagtcctgaatttcctggagaaacctctatggtgtaaaaagcttaccacaaattcctgcaacgatagagagtatttctatttgggacaattgccatatctaacagatgcagaatgtcttatttatgagggaataactcttgttttgctaatcatacatacattcttcccattgtcatacgaaggatcccacatatattggaaaaatactattaatcaattgaaggttttctctctattagtgcttgttgctgatgtgctgctctatgcccttttcttgtctccactggcttttgattttctacctttcagaattgcaccttatatcagagttgttctttttgttctgaatattagggagctacgagaaaccatcactatcttggttgggatgcttgacacatacttaaatgtcttggctttgtggcttctgtttcttctttttgctagttgggtggcatatgtgttttttgaggatacaatacaggggaaaacagtattcacttcctatggtactacgttgtatcagctatttcttttatttaccacatccaataatccagatgtttgggttcctgcatacaagtcgtcacgttggtattgcctgtttttcgtactctttgtgctggtgggactccccccccctacaaacttgatccttgctgttgtttatgacagtttcaagagtgagcttgtaaaacaagtttttgagaaggatcgtttgagaagaactatgttggacaaagcttttgatctcttggatacgcataaagttagtagtctcaacaaaaatcaatgcattaggctctttgaggagctgaacaagtacaggactttgccaaaaatctctcgggaagactttgaattaatatttgatgagctcgatgatagtcatgatataaagattaacaaggatgaatttgcggatatttgcaatgccattgctttaaaatttcagaaggaagatgttatgtcttactttgagtatttagcattctaccattcacccagctcaaagagattaaaagaatttgtgaggagtcctatgtttggatacctagtgtcctttgttctcgtaataaatctggttgctgttattattgagacaacgcttgatatagaaaacaattctgctcaaaaggcgtggcaagtggttgagttcgttttcgggtggatatatgtaatagaaatggttttaaagatttatgcatttggatttgagaactattggcgagatggtcaaaatcgctttgattttattgtcacagtgataattgccattggagaaactgtaacttttgctgtacctgatgatgatcttcctttcatctcaaatggagaatggattcgttaccttcttcttgcaagaatgttgagattaataaggatcctaatgtatgtcaagcgataccgagcctttgtggcaactttattgactctcataccaagtttgatgccatacctagggatcatattttgtaccttgtgtatttattgttcaattggtgtacagatttttggtggaatcgttaatgctggaaaccccgaattggaattaacagctcttgctgaaaatgactatttggttttcaatttcaatgattacccaaatggaattgtgacacttttcaattttcttgtcacggcaacctgggacgaagttatgacgagctacaaggaattaactgggacttcttggacttatttgtacttcattagcttctacttaattactgttttgctgcttttgaacttgattattgcttttgtcttggaggcattctttgccgaaatggaacttgagtcatcagaaacttgtgaaggaaatggcaaggaagttgaaggagataaatatcgaaagcgatctattggcacaaaaacacgaagccagagggttgatgctcttcttcatcatatgctgagtgctgaattgtgtcaaaatgagccttccagtacacaaacttcataaatcattttgcagaatgcacgaaggagcccacctcattctgatctttcatgtggtttgcatctcgtgtgggtgtaccgtacggtagacaagagagcatgcaaacatatagtaatttgcatttcccttgtttgtggaaaaagcacgttatcaattctgtgctgaatgaaattattaaatcataaagtggcaggatgctatattccacgggactactagatatctgtcttttttatttggtacatcgatatctatcttgttagtctgtgttgtaatggcaacttttttttttaatctgccagggtttgatttttgcatttatatactatcaatacagtttggtagctgcgcaaactgtttgtaagttatcttaacgtagctgtttggtgcaaccgttcaaggacatatgtgatttgtgcttggatttgatttttcttaagtaaatagtaataatttagtaatataaaaa

SEQ ID NO: 7050 - DNA, 1940 bp, Glycine max
acttttgcgagaagacgacagaagggggtttgccccttcgtccttttttggtgtttcggtgtctctcatattaataggttgttcctacggctgctgcctccatcttcaccttgtttctcagcagaaactactgatctacctctccatcacccttctctacacaggaaatagtatcttcgtttcatcaatatgtttggttcatccggcatggcacaggaatctggtatgttcatggttaaccaaacaattggcagtgttttgtgctgcaaatgtggaattccaatgcaaccaaatgctgctaatatgtgtgtgaagtgtctgcgctcggaagtcgatattacagaaggactgctgaagcgtctagtgctggtgcattgccctgagtgtgagagttacttgcagccaccaagaagttgggtcaagctgcagctggaatcgaaggagctgttgacattttgcttgaagaaattgcagaagaatttgaattcgaataaagtgaggttggtgcacgctgagttcatttggactgagccgcattccaggagggtaaaagtcaaggtcaaggttcagaaggaggttctgaatggagcaatactcgaacagtcttatcccgtcgagtatgttcaacaagaacatatgtgtgaatcctgttctagggtccaagctaatcctgaccagtgggttgctgctgtgcaactcaggcaacacgtttctcacaggcgtactttcttttatttggagcagctgattctgaagcatggtgctgctgccactgctatacgaatcaagcagatggaacaaggtatcgacttctttttctctaatcgaagtcatggagtcaaatttgtggagtttattgggaaagtttctccggtaaggagccgccatgataagcagcttgtttctcatgatccaaagagtaataactacaactacaaatatacattttctgttgaaatcagccctatttgccgtgaggatttaatctgtctgcctcctagagttgctgttagtttgggaaatattggtccacttgtgatttgcaccaaggttaccaacagcattgctttgctcgatccatttaccttgagacactgtttcatagatgctgatcagtactggagaacatcctttaagtcgttacttactagcagacaattggtggaatatatagtgctggatgtggagactgtttcatctgaggtcactattggtggcacgaaatatcgtttagcagatgctcaggtggctcgtgtttcagattttggaaagaacgacacgatatttaacatcaagactcatcttggccatcttctaaatcctggtgattatgctcttggttatgatctgtatggggctaatagtaatgacatggaattggacaagtacaaaggacacattcctgaagctattttaataaagaagagttatgaagagaagcaccaaaagaagcgtgggaagcctcgttcatggaagcttaaatcacttgagatggaggttgatgataagggaagagttgatgaagataaaatggtctcagaatatgaacaattcattcaagatctggaagaaaaccctgaaatgaggttcaacatatcattgtaccgaaataaagagtacaagccatctgatggtgatgaatcttctgttccattggaggagttgttggctgatcttgatctgagtgagcatgaagatgaagaggataacatgacggaatgaacaaaagcttcttctaccttgattagtattttatggaattttggctttttgttcgtgtcaaaggttttcttttccctttcccatttatgttgtgttaattggcaatctctgatggtttgtttattgaaagaatgataagatggtaattttgcagactgtagtaacaatacttataaatagcttgtgttaccattcttttatcagcttgcctgaaaaaa

SEQ ID NO: 7051 - DNA, 1366 bp, Glycine max
tcgggtcagctacgtaggccccccccccccggcaaaaccaaaaccttaacccaaccggaccggggctatcaaaggcagaggagagagtaacgaaggttgcttctaactgttcagaatcatgtcttggtgcaccattgagtccgatcccggtgtgtttacagaacttattcagcaaatgcaagtgaaaggagtacaggttgaggaactttattcattggatcttgactctctcaacagccttaggcctgtttatgggttgatttttcttttcaaatggcgtccaggagaaaaggatgaccgagtggttatcaaagatcccaaccctaacttgttttttgctagtcaggtaattaataatgcttgtgcaacccaagcaatcttgtccattcttatgaattcaccagacattgacattggtccagagctgacgaaattgaaagaatttaccaagaatttccctcctgaactcaaaggtttggccatcaataacagtgaggccatacgtacagcccataatagctttgctaggccagaaccttttgttcctgaagagcaaaaggttgctaccagagatgatgatgtttaccacttcataagctatctacctgttgatggggtactgtatgagcttgatggattaaaggagggtcccatcagccttggtcagtgctctggtgggcaaggtgatattgaatggttgaagatagtgcagcctgtgatccaggaacgcattgaaaggtattcccaaagtgagataagattcaatctcctggcagtcatcaagaacaggaaagagttgtatacagctgagctgaaggaacttcagaagaggagggagcgcattttgcagcagctagcagcatcaaagtcagacagactggtcgacaatagcagttttgaggcactgaacaattctctctctgaagtgaatgctgggattgaagctgcgactgagaagatcttgatggaggaagaaaaattcaaaaaatggaaaacagaaaatattcgcaggaaacacaactacataccctttttgtttaactttctaaagattcttgctgagaagaagcagctgaagcccctcattgagaaggccaagcagaaaacaagcagccctcggtgaagaatgtttatacaaccttatgcgtggatttttttccccagatatgagtatgcccatatgtatcacgttgcacttaattattatttttagcattctcttaagtactgatgcacacaagcttcttctgatccaaggatataactctaccctctttggtaaaaaaaaaaaaaaaaaactctttactagtgattctggattcaataatatactgttagaggatgaatttaatcttcaaagcaaaaa

SEQ ID NO: 7052 - DNA, 1308 bp, Glycine max
  misc_feature (1305)..(1306): n is a, c, g, or t
tcgagtagctacgcagcccccccccccccgccatccccgtctgtcgtttggcatcatatttcaaaggaggctcagaatagctggtcgacacgccagccagatccacaaatcggaaagaatcagagcgccgtcaaaaaccgccgtccacggcggtgaaactcgccttcgaatccagagcctctctcggttcctcactcttctcacatcgagcgcaacgccaaaaaatcgaatttcacgatggaagagttggagcagtggaaggaacaactttctcacttcgctaacctagctttggatcgtcttctcgaggttcctccgaatcagctctacgcagctgctgcaatcgtgattttcacaacgctgcttcttctctcaattcggttgttcaagcgtgcgaagtcaaacactgttgtgttggccgggctcagcgggagtggaaaaactgttatcttctatcagcttagggatggctctactcatcagggtactgttacatcaatggagcctaatgaaggcacttttattcttcacaacgagaaaacaaggaagggcaagataaaacctgttcatgttgttgatgttcctgggcattctcggcttcgacccaaactggatgagtacttgcctcaagcagctgggatagtttttgtggtagatgctttggactttttaccaaactgccgtgctgcttcagagtacctttatgatctattgactaaaggaagtgttgtgaggaagaagattccagtgcttattctctgcaacaaaacagacaaagtcactgctcatactaaagagtttatccgaaaacagatggagaaggaaatagacaaattacgggcatcaaggagtgcaatatcagcagctgacattgcaaatgagttcaccctgggggtacccggtgagccatttttttttacccagtgctctaacaaagtgacaactgcagatgcttctggtttaactggggaaatatctcagctggaagagtttatcagagaacatgtaaagcaatagctggatgttgtgtttaaacttgcggatttttgctgaattgaatgaatgtgtagtgttgttcttcttggttgctatttctttgatttcaaagaactgtctggataagaagaggcaaaaaagagaaaaaggtgttttggggtggggcttggggtgttcggagtaggaatcatgatgttgggatcaataaggatttacttcattgcaagccctggtattttgattggactataatgatttatctaattgtatcgatacttttatttacttttaaaaaaaaaaaaaaaaccnnaa

SEQ ID NO: 7053 - DNA, 2276 bp, Glycine max
tcgacccacgcgtccgatagtatttggactccttcccccccccgccgagccacctagacacttgaaataatgccaagtatactaaatgtcttagtcttaagaggggggaaaaactggaattccaatgattcttaatttcttacaatccaatctgcaaactgagtgagatatataacttgtttttgatttcttcctcatcattttgcatatacaaagattaaaatggaagggttttttggaaattgcttcaatatgattttgctgatgttgtgcttcaccaacttgagcatagcttttgctcaaagtcatatgaatggatttggagagcagccactggccaagattgccattcacaagaccgttttggcgctacacagttctgcttccattatagcagtcccttttgtgctaggaactaagggtgaggatacccaatgggtgactgtagagctagagtccccaataccatctgttgatgactgggtcggagttttttctccagcaaacttcaattcagcaacatgtcctgacactgacggcattggctgggtagaggaaccatacatatgcacagccccaataaagtacaagtatgccaactactctaaccgaaactatgcaaagaccgggaaagctattttgaagttccagttgatcaatcaacgtgcagatttctcatttgcactattttcaggtggattatccgatcctagacttgtggcaatttcgaattccatatcatttgcaaatcctaaagcacctgtgtatccgcgccttgctctaggaaaatcttgggatgaaatgacagttacatggacaagtggatatgacataaatgaagctgtgccttttgttgagtggggaccaaagggaggaaagaaaacacgatctcatgctggaacattgacatttaaccgaaacagcatgtgtggtgaacctgcacgaactgttggttggcgtgaccctggttttatacacacaagtttcttaaaagaactgtggccaaattttaggtacacttacaagttggggcatatgctgtctaacggttcttatgtatggagtaagaagtattcattcaaggcatccccatatcctggacagaactctttgcaacgtgttatcatatttggtgacatgggaaaggctgagcgtgatggttcaaatgaatatgctgattatcaaccgggttctctaaacaccacagaccaactcgtcaaggatttagaaaattatgacattgttttccacataggagacatgccttatgcaaatggatacatctcacaatgggaccaattcacagctcaagtgcaagaaatttcgtcaacagtaccatacatgattgcaagtggaaatcatgaacgtgactggccaaacacaggatcattctatgatactccagattcaggtggagaatgtggagtccctgcagaaaccatgtattattttcctgctgagaatagagccaaattctggtataaagcagattatggcctgtttcgtttctgcatagcagatagtgaacatgactggagagaaggatcagaacaatacaaattcattgagcattgtcttgcaacagtagatagaaagcatcaaccatggctaatcttttcagctcatcgtccccttggctactcctctaatctttggtatggcatggagggttcatttgaagagcccatgggaagggaaagtttgcagaagctttggcaaaagtacaaagtagacattggattttatggtcatgtccataactatgaaagagtatgccccatttatcagaatcaatgtgtgaatgaagaaaagcatcactactctggcactgtgaatggaacaattcatgtggttgttggtggagggggaagtcacctgtcagacttcacaccatcaccccctatttggagtctttatagggacgttgactatgggtttggcaaattgactgctttcaatcattcatatctcttgtttgagtacaagaaaagtagtgatggagaggtctacgactcctttaccatttcaagagactacagagatgttttggcctgtgtgcacgatggttgtgagaaaactactctagcaacatgagttatgttgtgtctatgtgtagacccgatatggacttgaaataaaataaattattgtccaaataaataatggttaatttacttacatccgctactccatatgaataatactgtaaaaacttcaaattaaaccgtcacattgccatagtgtgatgatcataatacctaactgcattatttttt

SEQ ID NO: 7054 - DNA, 1528 bp, Glycine max
tatttgtgttctcgtctccattccttgttttttttaattttaatagatcaatttactgacccatcacaaacaaattttcacactacaataacaatcaacccgcaaacaaacccttcgaccaaatgttacattgtacgtgttaaataatactcggggacagtatattggaaacatatggaaaaataataaacaaagaaacacgctactatttttttgctcttaattaattcctagtttttatgttttcatttttgtaatcctttagacctaaatgggagcctcatgaagaacaagaaagcatgcatacacctggtcgatatgcccaagctgggggcaagcgagcatatttttccattcctggttgctcatcatacggatgctccactaatttgagcaggctgcgaacctctccaaaatcacctatttctgcagcatcaattgcagtctggcagagatagttcctcagtatatatttaggattcactgaatccatcgagatcttcctttcgtcatcaggtatcccactggtagagacctcatgtatataagctttcaaccaactggtccatgcttccttacgctctttaccaatatctaacagtacagactttagtgggactaacagctcatcatctggaatgtttatgtctgctttaacatttgaaagcgtacgaaagaagtttgtgtaatcaactttgtcaacagccatattgctaagaagtttattaatcatctgcttattatacttagggaggccaagctttttggtcattgtaacctgataatcatccataaatctcgttccatatctttccatagcatagttggcctctttttcatttattaaatgagcagcttgtagtgttgttgtgaactgtgcaatattccacaaaccaatgtcaggctggtttgcaaaacagtatcttcgacctggaagatctgtagtatttggggtaaatttaggatcaaaagcatccaaaaatccaaatgggccataatctattgtaagacccaaaatgctcatgttatccgtgttcagcacgccatgagtgaaaccaaccccctgccatctagcaatcagggaagcagtacgctcagcaatctccaccacccatgctgcatacttatttgaagtgagatctacaacagaatgatcttcatcaccagtgcagaaagataagctatcactcttgctcatattttgaatatgaggaaagtggtgcctgatagcatagtctgccaaaacacgaacaaggcctaggtcctcatcacttctggaggcatgtatttggtatgacccaaaccgcagaaaagattgggcaactctgcaaacaattgcgccaggttcttcctttggattgccgtcataaaacatgtcacgggtgacgaggttgccggtggtaacaagagaaagtgcacgagttgttggtataccaaggtggtgcattgcctcactgcaaagggggggggggcctacgtagctgacgccggcaaggccatcggcaaagcgactgtaagcggacgcgtg

SEQ ID NO: 7055 - DNA, 959 bp, Glycine max
aacgattaacgatttataacaacaacaacgacgacgacactttgacacacctaaccctccaaattcctatctctcttcgaatggaatccgcagctctgtcgcgcataggcctggcgggcctggccgtgatgggccaaaacctagccctgaacatcgcggaaaaggggtttcctatctccgtctacaaccgcacagcctcgaaagtggacgagaccgtagatcgggcccgcaacgagggctccctccctctcacgggccaatacacccctcgcgacttcgttctctccctccagcgccctagatccgtcatcatcctcgtcaaggccggcgcccccgtcgaccaaaccatcgccgccctctccgaccacctcgaccccggcgactgcatcatcgacggcggcaacgagtggtacgagaacaccgagcgccgcatgagcctcgtcgccgacaaaggcctcctctacctcggcatgggcgtctccggcggcgaagacggcgcacgccacggcccctccctcatgcccggtgggtcccaccaggcctactccaacgtccaggacatcctccacaaaatcgccgcccaggtcgaggacggcccctgcgtcacttacatcggcgagggaggctccggaaacttcgtcaaaatggtccacaacggaatcgaatacggcgacatgcaactcatctctgaagcctacgatgttttgaagcacgtcggtggcttgtcgaattccgagcttgcggagattttcgccgagtggaaccgaggggaacttgagagtttcttgattgaaattaccgccgatatttttaaagtgaaggatgaagatggtgaagggtttttggtggataagattttggataagaccgggatgaaggggaccgggaaatggacggggcagcaggcggcagagctttcgatagccgcgcccacgattggcggcgtcgttggattgccg

SEQ ID NO: 7056 - DNA, 1699 bp, Glycine max
tcgagtcagcttccgtggccccccccccccactccttttcttctctagtctgatctcgcttaaattgaagacatttattattgtttatatgataagatttgaaatgatatgaaatccacttcttgaaatccaatccattacccactctattctatagattattgcttgagctgtgaaaatcagctacgtaggccccccccccttattttatttattctatgcctttatgcctagaacgtttacttgaagctgcatcaatcgaggagggattcttcttcatctttggattcgcttttgatgcctcggagtcagagctgggatgaaagctgaattttggggaaaatggcaactctagttgaacctcccaacagaattaagccaaagggcaagcattattatacaatatggcaaacattgtttgagattgatacgaagtatgttccaattaaacctataggccgaggagcgtatggcgtggtgtgctcttcgatcaacagggagaccaatgagaaagttgcaattaagaagattggtaatatatttgagaattctattgatgcattgagaactttaagggagctgaagctgcttagacatattcggcatgagaatgtcattgctttgaaagatgttatgatgccaatccacaaaacaagttttaaggatgtctacctggtctacgaactcatggatacagatcttcatcaaattattaagtcctctcagccactttccaatgatcattgcaaatatttcttgtttcagctccttcgaggtcttaaataccttcattcagcaaacattcttcaccgggacttgaagcctgggaatctgctcgtcaatgccaattgcgatttgaaaatatgcgactttgggcttgcacgaactaatggagttgatggccagtttatgacagagtatgttgtcactcgctggtatcgtgcaccggagctcttgttatgctgtgacaattacggaacctctattgatgtctggtcagtagggtgcatttttgctgagattcttggtagaaagccaatcttccctgggactgagtgtctcaaccagctgaaactaattataagcgttcttggaagccagcatgaatctcatcttgagtttattgataatgcaaaagcaaggaggtttatcaaatcactgccctatactaggggcagacacttctctcagctatacccacaagcagatccattagccatagatttgttgcaaaaaatgcttgtgttcgatccaaccaagagaattactgtcttggaagctctccaacacccgtatatggctagcctatatgatccaaggtgcgaccctcctgctcaggttcccatcagtctcgacatagatgaacattggggagaaccgatgattagggaaatgttttggaatgagatgctacattatcatcctgaagctgcttccgccaatgcataaatgattaattcttccaaggctttcaggtcttgttgcttgtctctaggagtagttctgttttttcctagacaaactgtaatcttaaaaggatttaactaccgaattttgtactttgtatgagattgctttagtacttttttaatttggcgtctccacaaggataatggcctcttgtaacttgtatatagccatgcatactgtttttggtgtttcggttaaacccatttaaaagaaaaaaaaaaaaaaaaaa

SEQ ID NO: 7057 - DNA, 2775 bp, Glycine max
  misc_feature (1099)..(1099): n is a, c, g, or t
  misc_feature (1200)..(1200): n is a, c, g, or t
  misc_feature (2758)..(2758): n is a, c, g, or t
ggctcgaggaaaatatactgtcgggtaggcctgatgcagaccaagttgagattgaagaagctgccagggttgctaatgctcattccttcatcattaaacttcctgatggctatgaaacacaggtaggagaaaagagggctgcaactttctggagggcaaaaacagagaatagcaatagcaagggcaatgctgaaaaaccctgcaattcttctcctagacgaggcaacaagtgcattggactcagagtcagaaaagcttgtgcaagaagcccttgaccggttcatgattggccgaacaactcttgtaattgcccatcgtctctccacaattcgcacagctgaccttgtagctgtacttcagctaggaagtgtttctgaaattggaactcatgatgagctcttctcgaaaggtgaaagtggagtctatgccaagctttataaagatgcaggagatggctcatgaaactgccgtgaataatgctagaaagagtagtgcaaggccttcaagtgccagaaactccgtaagctcaccaataattgctaggaattcttcttatggacggtcaccatactcgcgtaggctatctgatttctctacatctgattttcgtctcgcccccgaggccccccccccaagttacaggcttgaaaagcttgctttcaaagagcaagctagttccttctggagacttgcaaaaatgaactctcctgaatggctttatgctttaattggctctatagggtctgtagtttgtggatcccttagtgccttctttgcttatgttctaagtgctgtcctcagtgtgtattacaatccagaccacagatacatgatccgcgaaatagaaaagtactgctacttgttgattggcctttcatcaactgcacttctcttcaacacattgcaacacttcttctgggacattgttggggaaaatcttaccaaacgtgtgagagagaaaatgctgatggcagtgctcaaaaatgaaatggcatggtttgatcaggaggaaaatgagagtgccaggattgctgcaaggctggctcttgatgccaacaatgtcagatcagccattggagatcgaatttctgtaattgtngcagaacactgcacttatgctagttgcctgtactgcacggttctgtgttgcagtggcgccttgcccttgtcctcgtagctagtctttcctgttgttgttgncagccactgttttgcagaaaatgttcatgaccggtttctctggggacctggaagctgctcatgccaaggctacacaacttgcaggagaagctatagccaatgtaaggacagttgcagccttcaattcagaaacaaaaattgttggccttttcaccaccaatctccaagctccactacagcgttgtttttggaagggacaaatttctggaagtggatatggtgtagctcagtttgcactttatgcttcctatgcacttggtctttggtatgcttcttggctagtgaagcatggcatctctgacttctctaaaacaatccgagtttttatggtcctaatggtttctgcaaatggtgctgctgaaactttaacactggctcctgactttatcaaaggaggccaggccatgaggtcagtgtttgatctccttgaccgcagaactgaaattgagcctgatgatcaagatgctactcctgttcctgatcgtcttcgtggtgaagttgaacttaagcatgtagacttctcttatccaactcgcccggatatgccagtttttcgtgacctcagtcttcgtgcgaaggctggtaaaactcttgcccttgtaggacctagtggctgtggtaagagctcagttattgcacttatacaaagattctatgatccaacatctggtcgggtcatgattgatggcaaggacatcaggaaatacaacctcaagtccttaagaaggcacatttctgtggtaccacaggagccttgtttgtttgccactactatttatgaaaacattgcttatggacatgagtcaaccactgaagctgagataattgaagctgcaactcttgccaatgcacacaagttcatatctggtttgccagatggatacaaaacatttgtgggggagagaggtgttcaactgtccgggggacaaaagcaaagaatagcagttgctcgggcttttgtgaggaaggctgaacttatgcttcttgatgaggccacaagtgcacttgatgctgaatcagagaggtctgttcaggaggctctagaccgcgcctcctcaggaaaaacaactatcatcgttgcacataggctatcaacagtcaggaatgccaatctgattgctgtgattgatgatgggaaagtagccgagcaaggctcccattcacagttgttgaaaaatcacccggatgggatttatgcgcgcatgattcagttacaaaggttcacacacagccaagtcattggaatggcctcaggttcaagctcttcaacaagaccaaaagatgatgaaagagaaggctagccattcaaatgaaattaccagctacaggattataagccatatatatacccattaattattggcatttttgttttgaccatagtatagtttgtgtatcatccctaccccccctttctcttcctattcaagaatgtaatcttgtctttatgaatgttaccaagggaatgacagacgaatacaggaacgagattgaaatggatgaatagatgctcatccttattaatttattcaaggacacttttgctccaaagaatcgnaaaaaaaaaaaaaaaaa

SEQ ID NO: 7058 - DNA, 2207 bp, Glycine max
  misc_feature (2150)..(2150): n is a, c, g, or t
tcagctacgtaggcccccccccccagcacaggagttgatgtgtaaatcacctgaaaagatgaataagatttttgcaatgtctgaagaagaaattatgtcagaccaagcaaaggtcattatgaagaaatctactaacttttgttggccaagtattcaggacctgaatgcagctgcccacaaagaaaaatgtgggtggtgctttacttgcaaaggtgaaaatgaagacagggattgcttgtttaattctgtggtgaagcctatttgggaagtgcctaataatactttagttgggcttcaacccaggaagatccagaatggacgtcttagagatatcatatgtcttatcttctctcttgaggttcgattacgtgggcttttgttgggtccatggttgaatctgcatcaaactgatctttggcataaggatcttttgaaggcatctgattttcttcctgttaaacgattattgcttcttttagaatccaatttgcggcttcttgcactttcagcagattggttaaagcatgtggattctgttgctacaatgggatctgctactcatattgtggtcagttcatcacgcacatcttcaaggcatggtattggaaggaaaagggccaggaatacagatattgaaaccagttcatcttcaaacactgctagtggtttgggaatgtactggtggagaggtggcaggctttcccccaaaattgtttaattgtaaggctttgcctcattccgtggttaccaaggctgctagccatcggcggcgtagccccccccccccccttttatatcctgagaattcagattttgcacgtagaagcagatttgttgcctggcgagctgctgttgagatgtcaacaagtgccgagcagcttgctttacaggttagagagctttattcaaacataaggtggcatgatattgagaacaaccattccctatatgtgttggacaaggaatctagaaaatcagtgaggctgttcaaaaaatcaatcatacgcaggaagtgcactgaagggcaatctgtgaaataccttattgattttgggaagagaagggctattccagatgttgttattaaacagggttctttgttggaacaatcctctagtgagagaaaaaaatattggctggaggagacttatgttccattgcatcttctaaagaattttgaggaaaaaagaattgtccgcaagtccacggataagaaacttggaaaaattcttgagattggtagagtaaacaagaaaattcctcaacaaaagggattttcatatttgtttaccagattggaaagatctgattgccatcaatgtgggcactgcaacaaagatgttgcaatgagggatgctgtgaggtgccttcattgcaaaggatatttccacaagaggcatgtcaggaaatcaagtggcacaagaaccactggaagctcttattcatgtcacagatgtcaagatgggttgcaagcaaagactaatactaataaaaggaaagttgactcaaaactgcagaagattcaagcaaagaaacgtaaaattgtgccttcagtttgtaaaccagtgaatctcaagggcaataaaaaggcattgagtaataataagatacgacaggcgagatctcgaaacagtaagaatatcccatcaagtatacctcttcgccgttctactaggaaggccaaatccttgtatatgcaaagtcaattgaatggaggacataaaaaaggaaaaaagaatgtgggacgtaaaaagggaaagcaaggtaaaaccaagaaggtgattcctcaaaagtccaaagaaactactggtcaatataagaagtcggaagttactactgcacgtaagaagagaacaaaaatctgtaacagttattggcttaatggtcttcagttgtctagaaagccaaatgatgaacgagtaatgctgtttaaagagaaaaagcgtgttgcctcctctaaagatttctctggctctcttgatcatcctaaatgctgcctttgttgtggaaatgaatgcaccttgaattatattgcgtgtgaaatctgtggaggtgggtttcatggtgatgcttttggcctcaatgtggagaatgccagacaacttattggatttaagtgccatgttttgtcttgatagaactgctccaantctgtcccatttgaaggttaatgcattgtcttgcactgaaagcatgctgcaattgag

SEQ ID NO: 7059 - DNA, 3735 bp, Glycine max
ccgcccacgcgtccgcccacgcgtccggattgacagtgaggtgattaacatgattgcacattcatctgaatttgagaatattgctgttcgggaagaagaacagaatgagctagagatgttggcacgcacatcatgtccattagaaattaagggtggtccttccaataaacatggaaagatttccattttgattcagttgtacatatctcgaggttctatagattctttttctttagtatctgatgcttcatatataagtgcaagcttggctagaataacacgggctttatttgagatttgctttaccaagaggctggtgtgagatgtctttgttcatgttggaatattgcaaagctgtggatcgccaagtttggccgcatcaacatcctcttagacaatttgacaaggacctttctgcagaaatattgcggaagcttgaagaacgtggggctgacctagaccgcttgtatgagatggaggaaaaagacattggggcattaattcgttatgcgcctggaggaaggttggtcaagcaacacctagggtattttccatcacttcagttatcagcaactgtgagtccaattaccagaactgtgttgaaggttgatctggtcattacgcctgttttcatttggaaagatcgttttcatggtactgctcaacgttggtggattttggtagaggattctgagaatgaccacatctaccactctgaactctttacgctgacaaagcgaatggctaggggtgaaccttacaagctttccttcaccgtaccaatatttgaaccacatccaccacaatattacattcatgctatttctgattcttggcttcatgccgaggcattctacactattacttttcacaatttaccattgccagaggctcgtactgctcacacagaactccttgatttaaaaccgcttcccatgtcttcccttggcaacagtacttatgaagcattatataaattttcacattttaatcctatacaaacacagacttttcatgtcctgtatcacacggacaataatgttctgttaggagctccaactggaagtggaaaaactatatctgctgagcttgccatgcttcgtctttttaatactcagcctgatatgaaggttatttatatagctcctttgaaagctattgtcagggaaagaatgagtgattggcaaaagcgtcttgtctctcagctagggaaaaagatggttgaaatgactggagactatactcctgatttgacggctctcttgtcggccaatatcatcatatctactcctgaaaagtgggatggaataagtcgtaattggcatagccgtagctatgtcacaaaggttggacttatgatattggatgagattcacttattgggggctgatcgtggacccattcttgaggttattgtttctaggatgagatacatatcatcccaaacagaacgtgcagtacggtttgtaggtctttctacagctctggctaatgctggtgatctagctgattggttaggcgttgaggaaattggactcttcaatttcaagccaagtgtgaggcctgtacccctggaagttcatattcagggttatcctggaaaatattactgcccaaggatgaatagcatgaataaaccagcatatgctgcaatatgcacacattcacctgcaaaaccagttcttatatttgtctcatcacgacgccagacaagacttactgcacttgacctaattcagtttgctgcatcagatgaacaatccagacaattccttaatttgccagaagaaaccctacagatggttctgtctcaagtctctgacctaaacctaaggcatactttacaatttggcattggattacatcatgcaggcctgaatgacaaagacagatctctggttgaggaactttttgcaaacaacaaaattcagatattggtttgtaccagcaccttggcttggggtgtgaatcttccagctcatctagtgattatcaaggggacagaatactatgatggaaaagcaaagaggtatgttgattttccaatcactgatattttgcaaatgatgggtcgtgctggacggcctcaatttgatcaacatgggaaagctgtgattcttgttcatgaacccaagaagagcttctataaaaagttcttgtatgaacccttcccggttgagagtagtttgagagagcagttgcatgatcacattaatgccgaaattatttctggaaccatttgccataaacaagatgcagtccattatcttacatggacttacttatttcgtagactgatggttaatcctgcttactatggattggaggatgctgaatctgaatttctaaatacatatttgtccagcctagtacagaccacatttgaggatttggaagacagtggatgcataaagatggatgaagacaaggtggagcccatgatgttgggtacaattgcatctcagtattacctcagctacatgactgtatcaatgtttggttcaaacataggtccagatacatcacttgaagtctttttgcatattttatctgctgcttctgaatttgatgaactacctgtgcgtcataatgaggaaaaatacaatgaagcactgtctgagaaagttaaatatccagtggataagaaccgtctagatgaccctcacatcaaagcacttcttctatttcaggctcatttttctcaattggagttaccaattagtgactatgtcacagacttgaaatcagtattagatcagagtatacgcgtaattcaggccatgattgatatttgtgcaaacagtgggtggctttcaagctcaattacttgcatgcatcttctgcaaatggtcatgcagggtttgtggtttgacaaggaatcttccttatggatgctgccatgcatgaatacagatctgataagttcactaagcagaagaggaatttctagtgtacaggaattactagacattccaaaagcagcattgcagactgtaactgcaaatttcccagcttcaagattgtaccaggatcttcagcatttccctcatgttaaaatgaaattaaaagttcagaggaaggacactgatggtgacaggtctcgcatattatctgttagattagagaagaccaattctagacgacactcttctagagcatttgtacctcgatttccaaagataaaagaggaacaatggtggttggttcttggtaatacctctacgtctgagctatatgctttgaaaagagtttctgtttcagatcacttagttacctcaatgaagttgcctctgactccagctaatcttcagggcgtaaaactgattttagtctccgattgttacattggatttgaacaagaacactccattgaagaacttgatgtatgttaagtagtggagacaccattggtcagtgccattgtacatacaacgtaaacgtaagatttcttgaagagggttggggctgcccaggttgtaccaaaaaatgtttttttttaacttgagaaaaagtcaatatgtatatccataggatttgcaatctcttgcatttaattgttttataggtaatcataatgatcttgtttttagattttctttatttattttccaagtcgtgtcgccatttgtaagtataaaggtttacagtgcaaggattgaaagatgtctgaacatttataaattgtgaaggaatggatctccgcaagcataaaaaatccagcatttatatgcgagt

SEQ ID NO: 7060 - DNA, 1218 bp, Glycine max
ggctccagagagaaaccctacttagagcagccaaaccttacgcattccatttctctctattcgctctctttcaatcacaacaacatggccgaacgtggaggcggagaccgtgccggtttcggtcgcggctttggcggtcgtggacgcggcggcgacaggggacgagggcggcgcagggcaggagggcgccgcgacgaggaggagaagtgggtcccagtgacgaagctggggcgcctggtgaaggaggggaaaattcggagcctggagcagatctacctacactcgctcccaatcaaggagcaccaaatcattgacaccctcgtggggcccaccctgaaggacgaggtgatgaagatcatgcccgtccagaagcagacccgcgccggtcagcgaacccgcttcaaggccttcgtggtggtcggcgacaacaacggccacgtcggtctcggagtgaagtgcagcaaggaagtcgccaccgccatacgcggcgccatcattctcgcaaagctctctgttattcctgtgaggagaggctattggggtaacaagatcggaaagccccacaccgttccctgcaaggttaccggaaagtgtggctccgtcaccgtccgcatggtccccgcccctcgtgggtccggaatcgtcgccgctagggtccccaagaaggtcttgcagttcgctggaatcgatgacgtcttcacttcctccaggggttccaccaaaaccctcggaaatttcgtcaaggctacttttgactgtttgctgaaaacctacggttttctaacacctgaattctggaaggagactcggttctccaaatcaccattccaagagtacactgatctattggcaaagccaacagggaaggcccttatcctcgaggaggaaagggtggaggcttgagttagcagaagcagcagcagttttgatgttatcggatgattgtgcctcgtcttaagcatgctaggacccagtaattatatgttttgctaccttttgttatttcattttctattgaaggacatattatatatctccatgctttttgttttttctcaaatttagttgaatggatattatttactgaactttcaaacaggggtttattaaatttttcatgctgtcccaactaaatcataattcaaagaaaagaaaatgtgtttctgcattcccatgagagttgatttaatacaattccttggtggtatttggttgtcc

SEQ ID NO: 7061 - DNA, 2200 bp, Glycine max
gccctaagggccatccgcgcccttcatcgtgtgctccgacagttcgtggtgaacttcctggagcgtcgccggccccttcgactacggtcctcccggctgcgccgtcaagtccaacgtcctctccttctggcgcccgtttcatgggtttggtgatttgagattagggtttatggatgggttcgtggtgcccggggtcgaccctccccgtccctgaaaattatcaacactgcaaatctccacttgttcatcgatttggtgaactcactaggaaaatctggcatgcacggaactttaaaggacaggtcagtccacacgagtttctacaagctgtgatgaaagccagtaaaaaaaggtttcggataggtgcacaatctgacccggtagagttcatgtcatggctacttaatacgctacatgcagatcttaagacttcaaagaagaatacaagcataatatatgagtgttttcagggcgaacttgaggttgtgaaagagattcctaacaaagtgatctctgataagaaagaaaacagtgaaaaccaaaacaatgctgagaaactttcagatggggtgaatgagcgatatgcatttgtcaaagaaacttcaaaaatgccatttctaatgttaggattggacttgccaccacctcctcttttcaaggatgtgatggaaaaaaatataataccacaggttccactctttaacatactaaagaagtttgatggtgaaactgtcacggaggtggtccgtcctcatatagcaaggatgcagtatcgtgttaccagattgcccaagtatatgattctacacatgcgtcggtttactaagaataatttttttgttgaaaagaatcctacgttagtcaactttcctgtgaagaacctggagttgaaggattacattcccttgccaacaccaaaagaaaatgagaaattgcgaactaaatatgatttgattgctaatgttgttcatgatggcaaacctggtgaaggattctatagggtatttgtgcaacgcaaatcagaagaactatggtacgagatgcaggatttgcacgtctctgaaacacttcctcatttggttgcactttcagaaacttatatgcagatttatgaacagcagcagtaaaaggcggagttcgataccttctgtgtgcaccatacctgaagcacattgtgcgcagaagggttgagaatatgagagatttcagatgcggatatcaaattgattaacaggctgcttttgagataggatgcttggggttaaaacaaaaaattaatccgtgtttctgattgttgaagctgtcaataacgtaagatgaataacctctatagtgttcaactttgactggtttaaccccagaatacacagatatactgcatggcaccgagggacccagttggaattttcttgtacttagctgatactaagtttattagtaacacatggaatgtgatatatcctttaagcttattccagattttggttgcgttgaacatttttcattccccttcaggaggcagttcagaagatgctgatggtattgtctagtcgatgaaccttcaagatgcgtatggcatttctattaaccatatgattgggtaaaatatataatttttgttggcacgctaaaaaaaaaaaaaaaaaaaaaaaaaaaaggaactcggtgtgagtctaatatttgcagtgctgaaaatgtcgcagttgttggacaaagccaaaaactatgttgcggagaaagtcacgaacatgcccaagcccgaggcgagtgtcaccgacgtggatttcaagcgcgtgagccgcgacagcgtcgagtacttggctaaggtctctgtttccaacccttattccactcccattcccatttgtgagatcaagtactccctcaaaagtgctggcaagttagtacccttttccattgatgtattgctggcttaattggttttgttttcatttttgtgcttgagattttgagtcagtcatctcaatcatgaaccactcatgcatcatgttgatttgcaatcgaatggatgtggtggttggattctgcagatctgtttgtattattaattttaatctgatttcgctgtgttgaatgtcctaaataatttaatgaaaatacttttcaaacaagtatttctgtgtcttacaacagataatcttttattatttgtgatgaaaataaaaaatatctattatta

SEQ ID NO: 7062 - DNA, 634 bp, Glycine max
tccgggccccgctccggaggccccccctctgatatttgcagtgctgaaaatgtcgcagttgttggaaaaggccaaaaactatgttgcggagaaagtcaccaacatgcccaagccagaggcgagtgtcaccgacgtggacttcaagcgcgtgagccgcgacagcgtcgagtacttggccaaggtctccgttcagaacccttattccacttccattcccatttgtgagatcaagtactccctcaaaagtgctggcagggagatagcagcaggaacaatacctgacccagggtcattgaaggcaagtgacacaacaatgttggatgtgccagtgaaggtgcctcatagcatattactgagcttggcaaaggacattggtgcagattgggacattgattaccaattggatattggacttgttattgaccttcctgtcattggcaacttcaccattcctctttctcagaagggagagatcaagctccctaccctcactgacatgtttgcctaattccaactaaaggcttagaacaaagaaaataaatcaataaatacatcctccatcatattttcctgttgtatcaaaaattttggattttagttttggttttctcaattcacaaaaaaaaaaaaaaaa

SEQ ID NO: 7063 - DNA, 936 bp, Glycine max
ggatctaatcctattcccttgtgttgtgcctccaaaagtcacgtgcgacgacacgtcgtcacgtgtcgacaccgtgttgggcctttgtgtgtcgtttatgtataagaatgcgtgtgggtttgggtgttaaggtatcgttgggtgtgatcggtgtgagtctaatatttgcagtgctgaaaatgtcgcagttgttggacaaagccaaaaactatgttgcggagaaagtcacgaacatgcccaagcccgaggcgagtgtcaccgacgtggatttcaagcgcgtgagccgcgacagcgtcgagtacttggctaaggtctctgtttccaacccttattccactcccattcccatttgtgagatcaagtactccctcaaaagtgctggcaaggagatagcatcagggacaatacctgacccagggtcactgaaggcaagtgacacaacaatgctggatgtgccagtgaaggtgcctcatagcatattactgagcttggcaaaggacattggtgcagattgggacattgattaccaattggatcttggtctagttattgaccttcctgtcattggcaacttcaccattcctctttctcagaagggagagataaagctcccaaccctctctgacatgtttgcctgattccaacaaaagacatagaagaaagaaaataaatcaataaatacaccctccatcatattttcctgttgtatcaatttggattttagtttttgttttcacacttcattatgcctttttttctttctttcctttgtggatgctttaaagtataaactacacatcataatatttcatataacagacatggttttggtacccaaaaaaaaaaaaaaaaaaaaaaaaaaaaaaaaaaaaaaaaaaaaaaaaaaaaaaaaaaaaaaaaaaaaaaaaaaaaaaaaaaaaaaaaaaaaaaaaaaaa

SEQ ID NO: 7064 - DNA, 1784 bp, Glycine max
caattcggctcgagtgaaagttgagacttgaaaccgtttttacacaatctgtcacggatattatggagggcaacagtggcgcgtcctaagacctctttattttcggaagattttttttcctaaacgccgttcttctttccattttctccattttttcttcctccatctgcattctctttcgctcgacaaaccctagcgatttgatgctgtgcgatgcgactcgctgagttgaaccggataaagatctgagtcgcggtgatcggttcgacgccctcatgggtgctgcgggctccaagctcgagaaggctctcggcgaccaattccccgaaggagagcgttactttggcctcgagaattttggcaatacttgttactgcaacagcgttttgcaggcactatacttctgtgttccatttcgagaacaattgctagaatattatgcaaataacaaaagcataacagatgcagaggaaaatcttttgacttgcctagccgacttattttcacagataagttcccagaagaagaaaacaggtgtcattgctcccaaacgatttgtacaaaggttgaaaaaacagaacgaactcttccgtagctatatgcaccaggatgcccatgaattcttgaactttttgttaaatgaacttgttgacattctggagaaagaggcccaggctgcaaaaaatgatcaagagacttcaccaccttctgaaaaggctgcaaatggacctaagaatagtctagccaatggtgctaaaaaggagcctttagttacttgggtgcacaaaaattttcagggaatactcaccaacgagaccaggtgcttgcgatgtgaaactgtaacagctagggatgaaacattttttgacttaagccttgatattgaacaaaatagttcaattacaagttgcttgaaaaacttcagttcaacggagacattgaatgctgaagacaaatttttttgtgacaagtgctgcagtttgcaagaagctcagaagcgaatgaagataaagaaaccacctcatgtgttggtcatccaccttaagcggtttaaatacattgaacaactgggtcgctacaagaagctgtcttaccgggttgtcttccctcttgagctgaaattgagcgatactgctgaaaattcagatattgagtattctctatttgcagtagttgtccatgttgggagtgggcccaaccatgggcattatgtaagccttgtgaaaagccataaccactggttattttttgacgacgaaaatgttgagatgattgatgagtctgccgttcagacattctttgggtcatcgcaagaatattccagcaatacagaccatggttacattttgttctatgagagcattggctctggtaacaggaactagacggaggagccttatgagttttagatacttaaatcatttggacttgtctttttcatctgtttaattattaattatttttttcccgttttattcaacctgcttgagtagttgttatacatcaatgagaggatacgggttgtgaaaatgtatacttagtggtcggcatgtacagtggatagcggaagcactgtcctttttccccttatttttttgttacaattaagagcagtgtatatggtttgagaatttcaccgacagtatattcacgatgttaactgttaagtattaaatcaatagaaacccgatgcaatggcagggtccctcgtaaattatggtgttttcatctaataaaaaaaaaaaaaaaaaaaaaaaaaaaaaaaaaaaaaaaaaaaaaaaaaa

SEQ ID NO: 7065 - DNA, 1692 bp, Glycine max
attatttatttttcctcaaattttctttaaattttcatcagcattttcgtcctcctctctctctcgcacgcgaaacccttgttctgttccctgctaacatatctgtagagaaaaccagacaccagaaaaggttcgttcagagacaaaaccccaacgatccaaacggtcattgagcatttcatggtgcgagtcactgagttgaatcggataggaatctgagtttgtgatcgtttgacgcggtcatgggtgctgcgggctccaagctcgagaaggctctcggagaccaattccccgaaggagaacgttactttggcctcgagaatttcggcaacacttgttactgcaacagcgtcttgcaggcactatacttctgtgttccgtttcgcgaacaattactagagtattatggaaataacaaaagcatattggacggggaagaaaatcttttaacttgcttagcggacttattttcacagataagttcccagaagaaaaaaactggtgtcattgctcccaaacgatttgtacagaggttgaaaaaacagaatgaactcttccgtagctatatgcaccaggatgcccatgagttcttgaactttttgctgaatgaacttgttgacattctggagaaagaggctcaggctgcaaaaactgatcaggagacatctccaccttctgaaaaggctgttaacgggcccaagaatggtcaagctaatggtgttcacaaagagcctttagttacttgggtacacaaaaattttcagggaatactcaccaatgagacaaggtgcttgcaatgtgagacagtgacagctagagatgaaacatttttggacttgagtcttgatattgagcaaaacagttcaattacaagctgtttgaaaaatttcagttccactgagacactgaatgctgaagacaaatttttttgcgacaaatgctgcagtttgcaagaagctcagaagaggatgaagataaagaaaccacctcacatcttggtcatccatcttaagcggtttaagtacatggaacagctaggccgctacaagaagctgtcctaccgggttgttttcccccttgagctgaagttgagtaacacagttgaagatgcggatatcgagtattctctatttgcagtagttgtccatgttgggagtgggcccaaccacgggcattatgtcagtcttgtgaaaagccataaccactggttattttttgatgacgaaaatgtagagatgattgacgagtctgctgtgcagacgttctttggatcatcacaggagtattcaagtaatacagaccatgggtacattttattctatgagagcattggctctggtaacaggagttaggcggaggatttctacaactctcttaaatcatttggacttctttttcacatggtttccatatttattttcctttctaccgttttccctttattcaacctgttggaggagctgttacatcctctagaggatacgggttgtgaaaaggtatacttaggtggttggcatgtacagtggatagtgctaggcactgtccttttttctttttcctctttctcacaataagaacagtatatatatatcgggtgaaaatttcaccaacgatgtgtattcatggttgcaagcgttcaaccaacattagaaacacaatgaaatggaaattggtcccaactcatgtcggatt

SEQ ID NO: 7066 - DNA, 1510 bp, Glycine max
ctccgctcgagttcgcccgcgtcccgcccccccacggggatcccaaattaaccaataattttttagttaaacaatgtccatggccatcattaacacttttggaaacgttggtgtctactatattgtattattattatcatggtttctcgtatctggtgtgtgtgtttggggacgacccgccacttttctgcaagactttgaaatcacgtggtcagagactcatatcaggcaaattgatcaaggcagagccatccaactcattctagaccaaaactctggttgtggctttgcttccaagagtaagtacatgtttggccgtgttagcatgaagatcaagctcatacccggagactctgctggcactgtcactgcattttatatgaactctgacaccgacactgtacgtgatgagctggattttgagttcttggggaaccgtagtggtcagccttacacagttcagacaaacatctatgctcacggaaaaggagatagagaacaaagggtcaacctctggtttgacccttctgcggattttcacacttatactattatgtggaatcatcatcatattgtattctacgttgatgattttcccattagagtgtacaagaacagtgagggaaagggaatcccatacccaacaatgcaaccaatgggagtgtattcgacattgtgggaagctgataattgggcaacaagaggggggttggagaaaattgattggagtaaagcacctttttatgcatattacaaggactttgacattgaagggtgcccagtgccaggacctgccaactgtgcctctaaccaaagtaattggtgggaaggggctgcataccaagctcttaatgccattgaagcccgaaggtacaggtgggttcggctcaaccatatcatctatgattactgccaagataagtcaaggtttccagtgatcccaccagagtgccttgccggcatttaaaccctaaatttcatgtcacttcaattattcaagtacaggaatacccctatatataatttacattgtccactgttcaaaaacatatcatactatattttatcggaaaaaaaaaaacatcatactatatatactagagtaatctatttgcttctgctgagttaatttcaatttatcccatgtggtacgtctcttcaattatttcaagtctttcatataaacacgtgaaataaaatgtacatcaataaaactaggggtaaattattatgtccccataccataccacatggataaattgaaattaacacttgttttgttttgggggagagggcaaatgattctggtgtatgtggggcgagggctatgttcgaccagaagagaataagtcaaaagctatctctgggtttactgtgcctgtgtatttaagtgcgcattgtttgtggtgtaataaagcttgcgcattattgtgatgattcatgaaggatatttttgggcttgtgatgtagcaaatctcattatttgttcaatgactacatctatttctgt

SEQ ID NO: 7067 - DNA, 936 bp, Glycine max
aagtttaagggaaatgaaatttatgataacttgcataagatacacaaattctttgataaaggagctttggtcctttaagaataccgtagttggcaaaagagaatgtgttacaattcaaagtatagataactgaatactgtaacctacatacaactctcccactaataatctttctaactagagtgatcacataagaacagaaacaaccataacaatctaattgccccaaacattcttttttgggtacaaaggaaagaaatcccaaaattggaagatgtggacaaaactgaaaacaaaaggcaggagcaaatacttccaaatctaaccccaaaaatagacaaagaaaagcgaaacattaaggttgtcgatcttttcaacatttgggaagatcagagggtggaggtggcagcttctgattgcgccgtttaccatcttggactatccatgccattttcaagccccaactagtatgcacttcaaggtggcaatgcatgaaccaaacacctggattatcagcaagaaagcgaacagcaacccaccctccagatggcacaccagcagtgttcctttcagcagggtcaacaaggttgaactttatggggtcctttttggggtcaaagttcccatttccttggccaacaatgaagaagttgaagccatgaaggtgaagagggtgactctcagctccaataatgcttgtgtcctgaagtaccagctccacactgggtgttgtatggcagcaccactgccttagtgccactactcactaagatgttgcttggtggagtgccagtgtagttgaacttgaaaggagggttggaagggaaatctgtggtgtacactcctttgcacttgttgaaaaaatgtgcttggagtaaagcaatgtttggtgtcacaaatgtcacattgttagcagcagcagctacccgtgtgttg

SEQ ID NO: 7068 - DNA, 1309 bp, Glycine max
ttttttttttttttttttcttatcaaaaggtaacttttgtaaaagctaatataagcgtacaacaatccacatgggaaaaaaaaaagaagccaaaataaatcattttcaaggggcactatgcatttacaagattagtaccatcacgaataacagatgtcacattagagcaatgctgtgatttctgtattttcctcttcctatatctacatttggcagtctattcctggcttaaaccagaaataaacagccgaccttatgcttttccatcttgaatatcctcacgataaccatgaccagattcagatgatgaggaaacgacactcttgcctctgctatctgatgacggtgtgccctcatctacatttctatcagcctttatcctctgcagcatctcgagctgaatctggcattgaagaagttttctataagcttcaagctgagagcttgggatatttggatcattttcaaacccctctccatagttcacaggggatgcatgtgcttgggaaggtagaaaatggaagttttgcattggaggaaaggatagatttggtggtctaccagcgataagaaactgcttttgtgcttcttcactggaagtttgctctccattacggtccgtattagaagattcagccatagatatttgaactgggggatgaagagtgtatccaggagagcatacaagagaattcatagagggatacacataagacttctcatatattgaagcagcagcagcagctgcttggagtctagcttgatgtcgactcaaactatcagtagcctcagtctgagctgtgcttccactgcctgtcccagttgttccccgttgatggacatctgactgtgatccttgctgccctgcagccgcagttgtcccattttcaggtggtacaaccaaggctctgcaggtggggcaagtgtgctgccgctccagccatgatcggagacaatgaacatgaaaaagatgtccacatataagtttcttggctgtcgtcatctcttcacgacaaataatgcaggttgcatcacttgcattaagctcttcaggggttgcatctggaaaccgatcgttcatatttgaagtgattttacgataacgtatgtaatctgcaacacggactttgaagttcctaaacgtctcatacagctcccgtataaggtgcaagggaataccatagtttacaaaaattacaagaaagaagcacatatacatagacaagtgaagcaggtccctaacgagttccaggtaaaatgtgaagactggtttcttttccgggggggggggggggcctacgtagctgct

SEQ ID NO: 7069 - DNA, 811 bp, Glycine max
ggaattggtgttagacttttcatctatgagctctacaatgaggatgcaaaggcaggaccattgtcagagaaaaactggggcttatttgatgcaaatggaaaacctgtttatgttttgcacttgacagaatcaggaggagtgttggcaaatgacaccaccaatcaaacttactgtgttgctaaggatggccctgatcctaagatgctgcaggctggaatagattgggcttgtggacctggcaaggtggattgctctcctttgctgcaaggacaaccatgttatgaaccagacaatgtggttgcacatgcaaattatgcttttgacacttactatcatcagatgggaaagtctactcagtcttgtgatttcaatgacatggctacaatctccaccaccaatccaagtcatggatcctgtgtatttccaggaagtcttggaatcaatggcagcttccccaacgtcacgttatcatcactgaattccacaaattcagtttcttctgcctccaatctccatagtggtgaattgggaattagaagccttctaatggtgatagtacttctactatggggagtggttttgctataaacttatgtacgtcagaatatgcattgtttattttaaaaattagcggtagataagaaggcgatgttatatgctagttgggttgcatgctcttatttgcccatgcaattttgtacaataggagcggtagcaacactttttctcaggtaatacattccttttgacaaaaaaaaaaaaaaaaaaaaaaaaaaaaaacggccgctctagaggatccagcttacgtacg

SEQ ID NO: 7070 - DNA, 1572 bp, Glycine max
ctcgagccgtgaaactcaagaaattcttgcatataattgaggattcccctgttttccctgttatatatgacagtaagagaactgtgttatccttacccccaattattaatggtgcacattcagccatcactctggagacaaagaatgtatttattgaatgtactgcaactgatctgacaaaagcgaaagttgttttaaatacaatggtaacagccttctcagaatattgtgaaaacaaatttgtcattgaaccagttgaagttatttcttctgatggcaagtcaaacatataccctgatttatctgtctacaatatggaagtttctctatcttacattactggattgattggggtatcattggaagcagaagaggtcactaagttcttaaatcggatgcagttgcatgccaaactgtctacatctgataataagcagtgtaactttgtggtatctgtacctccttctagaagtgatgttcttcacccatgtgatgttatggaggatgtggcaattgcttatggattcaatgctattaaggatcaagcagtagtagataataaaggctcaaagaggttggctgcttccttgactctacttcctctgaatgagctcagtgatcttatcagaaaagaggttgcattgattggtttcacagaggtcttgacatttatactctgctctaaaaaggaaaactttgccatgcttaaccgcaatgatgataaatctaaagcagttatcattggaaaccctaggtcttcagactttgaggctgtgcggactagtcttatgcctggcattttgaaaactgttgctcacaacaaggatcatccaaagcccataaagatttttgaagtgggtgatatagcagttttggacgacaaaagagatgttggtgcaaaaaatcttcgccaacttgctgctctgtaccggcgtcctaggccccccccccagataattcatggcttggtcgacagagtaatggaaaagaatggggttccctttgtttcacctggcgataaatcgggttattatattgagcagtcagatgagcctgagtttcttgccggtagacaagctagaatcatttacaaaggaaaacatattggcacttttggcattgttcatccagaggtattaaacaactttgacattcctgatccctgctcctttgttgaacttaacatcgaaagtttcctataaagattatctgtatcaattggtagggaatcaagatgctcaactgcttgagtgactatatgggaatcaaaacacttcgtggaatttagaactacactatagctggggagcggaatgttactgatgtgccctaaatttgggtgtttagtttgattatatacccgtaaaattttcctaagtttctccgttgttaaatgtttagaacatcagaagctacgaattggttagtagggataatctcgaccataaattatagttattttttaaaatagttgattttggccttaaaaccaagatagcaaggatatttattcgtttgaaaattttgtcaatacaaaagtgagtcacaagccaaaaaaaaaaaaaaaaaaaa

SEQ ID NO: 7071 - DNA, 1167 bp, Glycine max
  misc_feature (908)..(908): n is a, c, g, or t
  misc_feature (952)..(952): n is a, c, g, or t
  misc_feature (961)..(962): n is a, c, g, or t
  misc_feature (970)..(971): n is a, c, g, or t
  misc_feature (981)..(982): n is a, c, g, or t
  misc_feature (984)..(984): n is a, c, g, or t
  misc_feature (999)..(999): n is a, c, g, or t
  misc_feature (1024)..(1024): n is a, c, g, or t
  misc_feature (1029)..(1029): n is a, c, g, or t
  misc_feature (1054)..(1055): n is a, c, g, or t
  misc_feature (1059)..(1060): n is a, c, g, or t
  misc_feature (1062)..(1062): n is a, c, g, or t
  misc_feature (1069)..(1070): n is a, c, g, or t
  misc_feature (1075)..(1075): n is a, c, g, or t
  misc_feature (1077)..(1077): n is a, c, g, or t
  misc_feature (1089)..(1089): n is a, c, g, or t
  misc_feature (1103)..(1103): n is a, c, g, or t
  misc_feature (1106)..(1106): n is a, c, g, or t
  misc_feature (1109)..(1109): n is a, c, g, or t
  misc_feature (1120)..(1120): n is a, c, g, or t
  misc_feature (1122)..(1124): n is a, c, g, or t
  misc_feature (1127)..(1127): n is a, c, g, or t
  misc_feature (1130)..(1130): n is a, c, g, or t
  misc_feature (1134)..(1136): n is a, c, g, or t
  misc_feature (1144)..(1144): n is a, c, g, or t
  misc_feature (1146)..(1146): n is a, c, g, or t
  misc_feature (1148)..(1148): n is a, c, g, or t
  misc_feature (1150)..(1150): n is a, c, g, or t
  misc_feature (1154)..(1155): n is a, c, g, or t
  misc_feature (1160)..(1160): n is a, c, g, or t
  misc_feature (1162)..(1163): n is a, c, g, or t
cggtccggattcccgcgtcccgccagggttgcacttgtactcactcactccaagaccaaaacggcgccatgcctaccgtcagtgtggggcgtgatcgcctgtatgctgctctaggaaagacttacacgcaagaggaattcgaagacttgtgcttcagtttcgggatcgagctcgacgacgttacgacggagaaggcaattgtgagaaaagagaagcatttggatgaagaagaagctgacgaggacgaagaagttatctacaaaatcgaagttcctgccaacagatatgacctcctgtgccttgaagggcttgctcaagccctccgagttttctgtgagttccaggagattcccacttacagactgtccaagatcagtaaggatgcaatgctgaaaatgcacgtgaagccggagacttctctgattcgtccatatgttgtatgtgctgtattaagaggtataacttttgataaagcaagatacaacagctttatcgatctccaagacaagcttcaccaaaacatatgtcgccgaagaacccttgttgccattggaacccatgacctggatacattggaggggcctttcacctatgaggctttgccaccttcaagtataacttttacaccattaaagcaggaaagaaacttcagggctgatgagctaatggagttctacaaatcagatttgaaactcaagaaattcttgcatataattgaggattctcctgttttccctgttatatatgacagtaagagaactgtgttatccttacccccaattattaatggtgcacattcagccatcactctggagacaaagaatgtatttattgaatgtactgcaactgatctgacaaaggcgaagattgttttaaatacaatggtgacagccttctctgaatattgngaaaccaatttgtcattgaccagttgaagtgattcttctgatgnaaggcaacnnttaccctnnttatctgctnnanatggaagtttttttnttacttaatggttgatgggggatcnttggngccaaaaggccctagtcttattcgnncatnngngccaccnnttcgntnttaaaccggganctggggctggcccnttnaanggggcttcccngnnnttnggngggnnnctttgttncncntngggnnccgcncnntggg

SEQ ID NO: 7072 - DNA, 1079 bp, Glycine max
cttgcatcctaatggcttttcagaggtcctgaatatattggttcagtacaccttaatgcttatttgaggtcctactgcacaaacacacatttgcttgtacacactaaccaagttgcccatataaaatccaaaaaagaaagaaagaaagaaattagagaggataggattactctttaactctcaactttggatgtttgtcaaatactgctattgcctatgtaagtgatcaatatctaaatgtttcttataagtgttcattagttagatcttccatcaaggattttcagatagtcccttgtaaattacatactaacttattagattgcattgtaaatttgtaatgttaactacctttttttttgttgctgaaatattaactactctcgttctattgttattgtcatatactttttcaactggtttatttatccataatttatcctgtctaacatgatataagcaggttcttaggagacatggagatataatcaaaagaactgctggaggtcgtttcattggactagggcgggctgatgacacgatgaatcttggcggaataaagacaagttctgtagaaattgagcatgtctgtgatagagccaacaaaggcattttggagacagctgcaatcagtgtttctcctgcaaatggaggcccggaacaactggttatatttgcagttttaaagaaaggatacaattccaatgcagaaactctaaaaaggaaattcagtaaagccattcaaagcaaccttaatcctttgtttaaggtgagccttgttaaaattgtgcccgactttccccgaacagcttccaacaaattactaaggagagttttgagagatcaaatgaagcgtgagctatcaattcagagcagactttagtaacattattaattcagtccattccctatgtctagaatacatttatactgggtgtgaggtctttggcgtgtaatcaaatggtgaacatttgatattattagtgggaaatccttcactttattaagtcgtaacgttgtttattgtcatccatgtttgtgctcttttaatgtcaaataatggaatatcaagtaggaag

SEQ ID NO: 7073 - DNA, 738 bp, Glycine max
  misc_feature (7)..(8): n is a, c, g, or t
  misc_feature (10)..(12): n is a, c, g, or t
  misc_feature (27)..(28): n is a, c, g, or t
  misc_feature (32)..(37): n is a, c, g, or t
  misc_feature (42)..(43): n is a, c, g, or t
  misc_feature (53)..(54): n is a, c, g, or t
  misc_feature (59)..(61): n is a, c, g, or t
gagatgnngnnncaaaaaaatcttcgnnaacnnnnnnctctnnactgtggtgnnaatgnnngatttgagataattcatggcttggtcggcagagtaatggaaaagaatggggttccctttgtttcacctggtgataaatcaggttattatattgagcggtcagatgagcctgagtttcttgctggtagacaagctagaatcatttacaaaggaaagcatattggcacttttggcattgttcatcctgaggtattaaacaactttgacattcccgatccctgctcctttgttgaacttaacatcgaaagtttcctataaagatctgtatcagttggtaaccccatttgtcccattcgcccttttgaatatatttattcatcaaactggggaatcaagatgttcaactgcttgagtgactatataggaatcaaaacacttcgtggaacttagaactacactagctcgggaccggaatgttactaatatgccctaaattagagtgtttagttaattatatacctgtatcattttcctaagtttctctccgttgttaaatgtttagaacatcataagctacgaattggttagtagggataatctcgaccataaattatagttatttttttaaaacagttgattttggccttaaaaccaagacagcaaggatatttattcgtttgaaaattttgtcaatacaaaagtgagtcaccagccgtgtctacttctgcggtaaaaaaa

SEQ ID NO: 7074 - DNA, 2143 bp, Glycine max
acgcagtccatcattggaatacatagaaaaagagaagagcttatggtggaaggttgaagaaagagatgagtggaactggaacattcttctacggttcggtaattcagccgttgattcgctaccactatctatcaccaccaatccctattcgtcccttatgctgcatatcccctctcatcacctccattcactccaacgacgccgtttctccgcaaaacggaacgcttcgcttccagacagagcatcagcagcacagcgaagaaccgcttcccgttccgtcactctctgccgccgaagaaaacaaagcaacaacgaagcttcgaaagaagaaagaagacgacgtcgtttccgataaccgcttcaagctccgcaacggaagagaggtttttgaagaaaaagcgtacctcgtaggcgttgagcgcaagaacgatgttcaggatttcggcatcgaagagtctctgagcgaattgtcgcagttagctgacactgctggattattggttgttggctctacttaccagaagcttacttctccaaatcctaggacgtacattggctctggcaaggtttctgaaattaagagtgcaattcatgcattgggcgttgaaactgttatctttgatgatgagctgtcagctgggcaattgcgcaacttggagaagatttttggtggagatgtgagagtttgtgatcgaactgctctcatccttgatatatttaatcaacgagcagcaacacatgaagcgtctttacaggtttcattagcacaaatggaataccaactacctcgtctaactaaaatgtggactcatcttgagcgtcaagcaggaggaaaggtgaagggaatgggtgaaaaacaaatagaagtggacaaacgtattctgcgcaaccaaattggtattcttaaaaaagagctagaatctgttaggaaacatcgaaagcagtaccgtaacaggcgtttctcagtacctgtggcagttgtatccttggtgggttacacaaatgctggtaagagtacacttttgaatcaactaacaggagcagatgttcttgccgaggataaattatttgcaactttagatcctactacgaggagggtacagatgaagaatggaaaggagtttctcctaacagacactgttggttttattcagaagttacctactacactagttgctgccttcagagctacactggaggagatatcggagtcatcgctcttggtgcatgtggttgatataagtcacccgctggctgagcaacagataaatgctgtggacaaagtcctgtcagaactagatgtatcgtcaattccaaaattgattgtctggaacaaggttgacaaagttggtgatccccagaaactcaggctagaagctgaaaaaagagatgatgttgtatgcatatctgctttaagtggtaatggcttgcaagaattttgtaatgcagttcaagacaagctaaaggactccatggtttgggtggaagctctggtcccatttgaaaatggggaccttctcagcaccatacaccaggttggaatggttgagaaaactgaatatacagagcaagggacatatatcaaggcacatgtgcccctgcgttttgcaagaatgcttacacccatgaggcaactgtgcgtatcgcaaccttaactttctttaatatatctaattttgcagcataacatgtacatatgtatgtgtaattattgaaatcatgttcgacacggtgggatggcagtgcaaattggtttgtagctacagttagtagccatgcatatccaatccgatttcgatttggattctttcatgttattgataaacatgacagggttatggtgaaagagaaagataaatggatcttataagttattaccaatcacagtgaatcctggtttgataagaaatgaaggtactcctatctgtctttaacgtgatcataatcatatcatgttaccaacatgagggaattcaaatccatcttactctttgtttcaattttagatattatttaggatgaaatacatttttgtcctacaatttaacttttttattttttattctcgcgttcctatatttttatttgttttagtctttataaattgtatttgtttttttcttttcaaaaaaaaaaaaaaaaa

SEQ ID NO: 7075 - DNA, 744 bp, Glycine max
atttgagcttgttggcattcctcctgccccaagaggcatgcctcagattgaagtcacatttgacatagatgccaatgggattgttactgtctctgccaaagacaagtctactgggaaagaacaacaaatcaccatccgttcatctggaggactctcagaagatgagattgataagatggtcaaagaagcagagttgcacgctcagaaagaccaggaaagaaaggctctcattgacatcagaaacagtgcagatacaagcatctacagcattgagaagagtttaggtgagtacagagataagatccccagtgaagtggccaaagagattgaagatgcagtatcggatttgagaacagcaatggcaggagacaatgctgacgaaattaaggcaaagcttgatgctgcaaacaaagctgtctccaagattggagagcacatttcaggtggttctagtggcggttcctcagccggaggttctcagggtggtgaacaggctcccgaggccgagtatgaggaagtcaagaaatgagacatttaggcttggttttgtagcatttgtttcttattaatcatcacataattggaagaatacaaggttacttattttgtatctaatgttgaaagccattttttctggaaggctctttaatttgtagcacttttggagtctgaagtccgaacacggctgtttgaataacttcgaattttttgcataaaatttgttcactacgtttggctgttgct

SEQ ID NO: 7076 - DNA, 1973 bp, Glycine max
ctgttggctgtctccacaaatgacaatggagttaaaattctagctaacgcaggagggattaggctgcttcgaacggtggaaaatcgtacatttgatgcttctagagttgcttctgcagctgttgtgaaggcacctactattggagcttttccttctaccaatgtaactgttggaacaagccttgctgatagagctcctccagtagcagccatggttgggattaataatgatactcggaatttagctgatgtgaaacccagaattgttgatgaatctgtggaaaaatctaggatatggaagctgacagaaattaatgaaccatcacaatgccgctccctgaaacttcctgatagtttatcatctatgagggtttctaggttaatttatacaaatcagggggttgcgattttggctttggcagcaaatgctgttcacaagctttggaaatggcagagaaatgagcggaacactactgggaaggccactgcaagtattcaaccacaactatggcaaccatctagtggaatactgatgactaatgatataagtgatactaacccagaggatgctgtgtcatgttttgcactgtcaaagaatgactcatatgttatgtctgcttcaggggggaaaatttctctattcaatatgatgacatttaagacaatgacaactttcatgccacctccaccagctgcgacatttcttgcatttcatcctcaagacaataatattattgctattggcatggaggactcttccatacaaatctataatgttagagtggacgaggtcaaaaccaagctaaaaggtcatcagaagagaattactggtcttgccttttctcatgttctaaatgtgcttgtctcatctggagctgactctcagttgtgtgtttggagcacagatggatgggaaaagcaagcaagtaaattcctacaaatgcccagtggacgaccgcctgcacctcttgcagatactcgggtccaatttcatctagaccagacacatttactggctgttcatgaaactcaaatagccttatatgaggcaccaaagttggaatgtataaagcagttttcacctcgggaagccaatccaatcacacatgctacatactcatgtgatagtcagtcaatatatgtaagctttgaagatggaagtattggcattcttactgtccctgcgctcagattaagatgtagaataaatcaatctgcttatctccatcccaacccaagcttgagagtgcatcctcttgtgattgctgcacatccctccgaacccaatcaatttgcattaggactcaccgatggtggagtacatgtacttgaaccactagaggcagaaggaaaatggggtactccacctccgaacgagaatggtgccgggcctagcactgcttcaggtgctgctgtttcagagcaaccccaaagatgatggatggcacattatgtagcacttttctctaaggaactttgagtgtgtgttttgattgcatatgatcccgctccctggtgcctccattcggtttgcaaagggaagctgcggaacgtaggtgtttgtaggttaggacaaatcaaattgaaccaatcacaccttgttattagtggcttcctaaccgtgggattggcacagtatgttattacccacataggattactggcgtaaattcggctggggcgttgcagagtggagggtcattgttattatttttttttctttggtcctacctttatttgtgtagtatttttttaatatatacagaaaactagtcgttatagattattttttttcagctaaagttagctattctgatattcagttttatttttaccatctatgcaaggattttttagagcctctttacgtgttggttgaatcttttcggcaacgatggcttcattaattggatttgttagatgtgctttaggatcaaaaaaaaaaaaaaaaaaaagaaaaaaaaaaaaaaaaaa

SEQ ID NO: 7077 - DNA, 1142 bp, Glycine max
  misc_feature (874)..(874): n is a, c, g, or t
  misc_feature (879)..(879): n is a, c, g, or t
  misc_feature (882)..(882): n is a, c, g, or t
  misc_feature (889)..(889): n is a, c, g, or t
  misc_feature (894)..(894): n is a, c, g, or t
  misc_feature (898)..(898): n is a, c, g, or t
  misc_feature (901)..(901): n is a, c, g, or t
  misc_feature (904)..(904): n is a, c, g, or t
  misc_feature (908)..(908): n is a, c, g, or t
  misc_feature (919)..(920): n is a, c, g, or t
  misc_feature (923)..(923): n is a, c, g, or t
  misc_feature (926)..(926): n is a, c, g, or t
  misc_feature (939)..(941): n is a, c, g, or t
  misc_feature (943)..(943): n is a, c, g, or t
  misc_feature (946)..(946): n is a, c, g, or t
  misc_feature (950)..(950): n is a, c, g, or t
  misc_feature (952)..(952): n is a, c, g, or t
  misc_feature (954)..(954): n is a, c, g, or t
  misc_feature (964)..(964): n is a, c, g, or t
  misc_feature (967)..(967): n is a, c, g, or t
  misc_feature (969)..(969): n is a, c, g, or t
  misc_feature (971)..(971): n is a, c, g, or t
  misc_feature (973)..(973): n is a, c, g, or t
  misc_feature (975)..(975): n is a, c, g, or t
  misc_feature (982)..(982): n is a, c, g, or t
  misc_feature (985)..(986): n is a, c, g, or t
  misc_feature (988)..(989): n is a, c, g, or t
  misc_feature (992)..(992): n is a, c, g, or t
  misc_feature (999)..(999): n is a, c, g, or t
  misc_feature (1003)..(1005): n is a, c, g, or t
  misc_feature (1007)..(1007): n is a, c, g, or t
  misc_feature (1018)..(1018): n is a, c, g, or t
  misc_feature (1020)..(1020): n is a, c, g, or t
  misc_feature (1023)..(1023): n is a, c, g, or t
  misc_feature (1025)..(1026): n is a, c, g, or t
  misc_feature (1034)..(1034): n is a, c, g, or t
  misc_feature (1036)..(1036): n is a, c, g, or t
  misc_feature (1041)..(1041): n is a, c, g, or t
  misc_feature (1043)..(1043): n is a, c, g, or t
  misc_feature (1045)..(1047): n is a, c, g, or t
  misc_feature (1049)..(1050): n is a, c, g, or t
  misc_feature (1052)..(1055): n is a, c, g, or t
  misc_feature (1060)..(1060): n is a, c, g, or t
  misc_feature (1067)..(1067): n is a, c, g, or t
  misc_feature (1073)..(1073): n is a, c, g, or t
  misc_feature (1075)..(1075): n is a, c, g, or t
  misc_feature (1077)..(1078): n is a, c, g, or t
  misc_feature (1085)..(1085): n is a, c, g, or t
  misc_feature (1090)..(1090): n is a, c, g, or t
  misc_feature (1092)..(1093): n is a, c, g, or t
  misc_feature (1095)..(1095): n is a, c, g, or t
  misc_feature (1101)..(1103): n is a, c, g, or t
  misc_feature (1108)..(1108): n is a, c, g, or t
  misc_feature (1111)..(1111): n is a, c, g, or t
  misc_feature (1115)..(1115): n is a, c, g, or t
  misc_feature (1118)..(1118): n is a, c, g, or t
  misc_feature (1120)..(1121): n is a, c, g, or t
  misc_feature (1125)..(1125): n is a, c, g, or t
  misc_feature (1134)..(1135): n is a, c, g, or t
ggctgcgagaagacgacagaagggggacgaaaccaaacgtatcaataacacaacattgctgaagaagttgaaaggtcgcatccttccttcattcgtttcgttgagttgaaaactctttttccacattcttttatttcttgtctcacccgcaccatgcaagtgtgccaactactgtgattggtatggcgacacgtgtcccttttgttttgtgcgcagccaccacttctcccaaccactgccttaaatactgcgtggtggcaccgtcacttcctctaccggtttcttcctcctcattaagccgccgctctctctctctttccttttcgtcttctttttcttcttcgttgggtttgttgccacttagtaagaaagagggtgtgaagagagtggggagaagatttggtgttgtggccatggcggagtctaagagtactgtgcttgttacgggagcgggtggtcgcacaggacaaatagtttacaaaaaattaagagagaggccaaaccaatatgtggctagaggtctggttagaacagatgaaagcaaacagaacattggtgctgcagatgacgttattgttggggatataagagatgctgaaagtattgttcctgcaattcaaggtatagatgccctcataatcctcacaagtgcagttccacagataaagcctggttttgatccaaccaaaggacaaagaccagagttctattttgaggatggggcatatcctgaacaggttgactggattgggcagaaaaatcaaatagatgtcgccaaggctgctggagtgaagcacattgtgttagtagggtctatgggtggaacggaccttaaccatcctttgaacagcttgggtaatgggaatatattggntcggnacnaaggaanggccngccnacntcntggnccgattccccnncanccnttataccatctannnanggnctgntngnctttgcttcnccncntntntncgccctnccnncnnccncttgttncccnnntntccacctcccncntcntnntccccccncnccctncncnnntnnannnnccccncatctcncttttncncnnttttccnccttncnncncccctnnnctccnttnctcntcntnncccncctcccccnnttttctc

SEQ ID NO: 7078 - DNA, 2704 bp, Glycine max
tacctcctctctctctctctctctctctctctctctctctctctctctctaactttctcatatctctcttttcctgtaatttcggacacttcacgcgaaaccttgcagtaacaaaaaatgtggagtttcactttctttgaacgagtttctagagctttccgtgatcatgggtccaacttcaagcttgtacttctctgcaccaccgtaagtggtggaggggttctggcttacggagaggctgtagccgcatctgaagcagcggcgacgaccacggagaagaagaaggtggtgccacgcggccccgggcgcgcgggcacgagtttcttgaggaatctggacaaccccaaatatgaggttcacgtggtgtcccctcgcaattactttgcattcactcctttgctgcctagtgttacctgtggcaccgtcgaagctcgcagcattgtcgaacccgtccgcaacattttcaggaagaaaaagatggacatgcaatttagtgaagcagaatgtctcaagattgacgcagcaaacaggaaggtttactgtcgatctaatataagtaataatttgaacgagaaagaagagtttgtggtggactatgactacctaatcatagccgtgggagcaaatgtcaacacatttaatactcccggagtgatggagaattgccatttcttgaaggaagttgaagatgcacaaaagattagaagaaccgttattgactgctttgagagagcaagtttgcctagtgtaagtgaagaagaaaagaagagaattcttcattttgctattattggaggtggtccaactggagtggagtttgcagcctcactacatgactatgtcactgaggatttggtcaacatatatcctgggataaaagatctagttaaaattacccttctggaggctggagatcatattttgagcatgtttgataaaagaattactgcttttgctgaagagaagttcggaagagatggtattgatgtgaaaactggatccatggttgtgaaggtatccgagaaagaaatttctactaaagaaatgaaaaatggaggagcaattactacaattccatatggaatggctgtctggtcaactggtattggcactcgtccatttataagagattttatgtcacaaattggtcagactaacagacgtgccatagctactgatgaatgggctgagagttgaagcaacaaacaacgtgtatgcacttggtgattgtgccacaataaaccagcgaaaagtcatggaagatatcgcggcaatatttaagaaggctgacaaagacaattcaggaactcttactgtcaaagaatttcaggaggtattggctgatatctgtgagagataccctcaggtggagctatatctaaagagtcaacagatgcacaacattgctgatttgttgaaaggatccaaggaagatgttgaaaaagaatctattgaactgaatatcgaagaactcaaaaccatactctctaaagtggattcccagatgaaatttcttcctgctacagcgcaggttgcatctcagcaaggcacctacctggccaagtgctttaaccggatggaagagtgtgagaaaaatccagagggtcctatcaggttcaggggagaagggcgccatcgcttcaaaccctttaggtacaagcatttaggtcaattcgctcctctaggaggagagcaaacagctgcacagcttcctggggattgggtttcaattggacacagctctcaatggttgtggtattctgtctatgcaagcaagcaagtcagctggcgcacaagggcattagtagtatcagactggacaagacgctttatttttgggagggattcaagtcaaatctgaaagagtttcaacatttttcaaagtcttgcagagctcgtcaatcttgaatttatactgatgtagggaattttgttactgattcctgattctttgaataacacaagcagactcctagcggggttgtccaagatgggatttgttatcatgctcttgctagattcaactttatgtatgaattttttacataccccttccccttttctttcatgcttctggtattggaattgcggcattagtgaatcccggagttttgcagattcatttcggagatgcttggtgatgttagcttctcgcgcctaatcattcaagttatatatgttgaatactttttataatttctgctcaaggaaataattgtaatttgtcaatacagtatgacatgaatggaagataaggatgtcgtttaagcacgtaatcaaagacttaatagactaaaaaaaaaaaaaaaaaggcacgaggcctcgtgccggtagatctgatgttgcagaagtctgcattcaggcactaaattttgaggaggctaaattcaaggcatttgacttggcatcaaaacctgagggagcaggttcagcaacaaaggatttcaaggctttattttcccagatcaccactcgcttttgatttttgaatgttgttgtcatggtcccaaaatccttgtggattgaaccatatgggtattagtgctatctgaaacaaaatttaattttagtaaaggattgttttaaggcaaattatagacttcactagtactgtacctgcacgccttgagaaaaacaatgtcttctaatcagcacatcatttcatgttatcaagtgtaattgtttgcaattccatcctaaaaaa

SEQ ID NO: 7079 - DNA, 1523 bp, Glycine max
ctggattcgagctaacctttgccttttcctttgggcccaatttaggagatctttttttcgggtattgaaaagtgtattcatcatttagattcaggcgcggggtcaataaatatttgtaaattatttatgaataagatttacatattagtagtgaaaatcaaacaatgtttacgtggaatatgaattcattccttattggaccgacattttttttacacccaatttagagaataatatcctagcaaaatgggggatttatttccattcccaatataatagcccaggaatagaaaattccaacagcaccgtcacttcctctaccgctttcttcctcctcattaaggcgcaactctctctctctctttctttttctttgttaggtttggtgacacttagttagaaagagcgtgcgaagagggtggggagaagatttagtgttgtggccatggcggagtctgagaagagtactgtgcttgttacgggagccggtggtcgcacaggacaaatagtttacaaaaaattaaaagagaggccaaaccaatatgtggctagaggtctggttagaacagatgaaagcaaacagaacattggtgctgcagatgacgtttttgttggggatataagacatgctgaaagtattgttcctgcaattcaaggtatagatgctctcataatcctcacaagtgctgttccacagataaaacctgggtttgatcctaccaaaggacaaagaccagagttctattttgatgatggtgcatatcctgagcaggttgactggattgggcagaaaaatcaaatagatgccgctaaggctgctggagtgaagcacattgtgttagtagggtctatgggtggaacagatcttaaccatcctttgaacagcttgggtaatgggaatatactggtttggaaaaggaaggctgagcaatatctggctgattccggcatcccatatacaattataagggctggtggcttgcaagacaaagatggaggtcttcgggaactacttgtagggaaggatgatgagcttctccagactgaaaccagaaccataactagatctgatgttgcagaagtctgcattcaggcactaaattatgaggaggctaaattcaaggcatttgacttggcgtcaaaaccagagggagctggttcagcaacaaaggacttgaaggctttattttcccagatcaccactcgcttttgattttggatgttgttgtcatggtcccaaaatccttgtgaattgaaccatatgggtattagtgctatctgaagcaaatttaattttagtaaaggattgtttaaagcaaattagacttcactagtagtgcacgccttgagaaaaacattccttaatgttttcatttgcatgatactatgataaaaataaaaaaagtagttttcatagggacaaaaaaaagctgtctgtataaacttactagaaaatacattgctgacaattgtcactattataattggatactgatttccttgttggaagcaaaaaaaaaaaa

SEQ ID NO: 7080 - DNA, 1335 bp, Glycine max
accttccctttttttttttttttttttttctgtattaaaattcaaaatcaactagtaatgagaaaaagtaacggcgtgttacgatatttgagataaagcgaaattatgctttatacaaaaaagcagccattcagggaatggaaaggccttgatgccttctctagtctataccatggattgtagttagagcttctcagctaataaagctgttctctcctgtcatgtaaccacctccaccaatggtaatcccatctaggtcggactttggtcatgcggttttcaccatagggataatccgtttcagctcttcttgtgtttctgaaagcacagcacccaatggaataaatccctatgagaagcacaagcatggtgactgtgagaaccgagagcttgtgccaattccctcttatgtcttcaagcacaccagctttgcaagaatcacactcatagcatagcaaattaggggcattgttccacctgtagcaatcagggtcttgagtcatcattgttgttgccacgttgtaagtgcaagcagttggtggcttacaacatccagactgtattggagacatatccctttgcatataatcaagaggggtccaagaggcaagcttttcacaagttttagaccccaaaatacagcctctaatagtgttccaatagcgaggatcctgaattctcttcctcaaccatggtgagtaatcttgaagacgatactccttgtaaacccttccaggcacttccacaccaccgcccttgctagtcacaccaaaaccaaatattgtgaagcccatgagtgctgctatgaggaacaacatgaccaccaagtacaaccatagtgcacatgccacatgaaaacatgcaccaatgaagcctgctagtgacaccactagcacaacgaatcctataaccaaaagaggggtttggagaaaattctcacaggttgtgctgctccttgccatccatagacctgctccaattattggtatggatgctaaaagtgtgaacaagttcaagaacccgattactgtgttgctgaacctatacatgtctctcactctcactctatctttagtttgttatctatcgattgctcgtgtggtgtcttcagctttgtttccatttaaaaagggagagtggcattcatattttgctttgtttatgctgtgtttcaaactcagaaacttatgttggaggatgtgaaaactaacaaatgaaatgagattgtccttcttcgttattaaggaagttattttttgtcttaaagtgacgagtttgcttttcttccctcctttcccggtcttttttattcggggggggggcctacgtagctga

SEQ ID NO: 7081 - DNA, 1394 bp, Glycine max
  misc_feature (40)..(40): n is a, c, g, or t
tttttagaacttattcgataattccatcttccatttattnttactttaaaagagtcaattgggctgaaaaagaacagaaaagcaagggggattagagtgcttattctattatatcccccacgttgcatataattcagtgtacttgatgtattaaaattcaaaaccatccactaatgagaaaaggcaaaaaaaagaagtatcggtgttttacgataaagcaaatttatgccttatacaaaaagcagccatttaggaaagctggtagaaacaaagaccttgatgccttctatggagcacccaacccaagcatggatggatggtaagctaataaagctgttctctcctgtcatgtaaccacctccaacaatggtaatcccatctgggtcggactttggtcatccggttttcaccatagggatagtccgtttcagctcttcttgtgtttctgaaagcacagcacccaatggaataaatccctataagaagcacaagcatggtgacagtgagaactgagagcttgtgccaattccctcttatgtcttcaagcacaccagctttgcaagaatcacactcatagcagagcaaattaggggcattgttccacctgtagcaatcagggtcttgggtcatcatcattgttgccacgttgtaagtgcaagcagttggtggcttacaacatccagactgtattggagacatatccctttgcatataatcaagaggggtccaagtggcaagcttttcacaagttttggaccccataatacagcctctaatagtgttccaatagcgaggatcctgaattctcttcctcaaccatggtgaataatcctgaagatgatactccttgtaaacccttccaggcacttccacaccgccacccttgctagtcaccccaaaaccaaatatagtcaaacccatcagtgctgctatgaggaacaacatgaccaccaagtacaaccatagtgcacatgccacatgaaagcatgcaccaatgaagcctgctagtgacaccacaagcacaacaaatcctataaccaaaagaggggtttggagaaaattttcacaggttgtgctgctccttgccatccatagacctgctccaattattggtatggatgctaaaagtgtgaacaagttcaagaacccgatcactgtgttgctgaacctatacatgtctctcactctcactctcactctcactctatctctagtttgttatctattggtttcttcttgtggtgtcttcagctttgtttccatttaaaaagggagagtggcactcatattttgctttgtttatgctgtgtttcaaactcagacttttgttggaggtggggaaacctggccatggagatgagtttgtccttcttagttcttaaggaagttgtttt

SEQ ID NO: 7082 - DNA, 2404 bp, Glycine max
tcagctacgtaggcccccccccccccccaagtctgatttctattttctacactcagagagtgaagcgaacgagtcacgactcagcgatggtgggcccacagtacgattttctggcgaaccctttgggcgtcgtcagatccaccttcgatgccgccgtagcctctgtttccgatccctccgccttcgacgggcgcgactggggcgtcttcccgctcttccaccacttcctctccgaccagtccagtctctctcaggttccacttctgacccctgccaccatcaaatgggtgaagcctaatactctggttcggtttcgcgggatgatacaagacatgctcgggaacgaattttacattggcgcttataaggatggttcggtgtggaggacgaacaagtttatggatgtttctcaatctcttatggcttcttcggtggatatgcgaatctgggaacgtcgactgctttattgtgttccggttccaggactgagtccatggactcaagtttcagttgaagaatttggcgatctatctatggattgcaaatcggagaatagagaaaagcggaggagagaagatggcgagtcttctgatatgcctgtatctggtgatgaggttcagaattccccaaatagtaaaagaatgagagaaggtgaacactcttctgttgcttctcattctcagggagctgcaactgagattgccagctctggtaccagtttggtgtctggtcttgatagcaattcacctccctgtcttgtgaagatatatgattctccagattctgaattgaaactgaatgacatttttgagtttgtgggtatccttacatctgatctagagcttgaagaggacgatgaagattgtgatttatcagatggattttctgaagatcctttgcgtcatctcccacctagcaaggtgccacaccttcattgttttattcagaggaaattagcggttcacgacttccttcagcacaatcctattgtagagccaaggcccaacttggtcagaggaatcagggaagcattgctaaggcatctcacggctgttcttagcaatgatgatttggctactcatttcatgttgctgcatcttctatccaaggtgcatgctagagcagatgatcttgctgtgggaaagctttcattaaatcttacttgttttagcaaagaaaccgtgtctgtatttggaaaaccactaagcgttgctttgaagaacctcctgccattcacattttgcataccccttacagttgaatacttgaattctgtttcacttacgccaaaaaagaattacgatactaatagactggaaactggagtcttacaactagctgaaggttcacacttgattgttgatgagaccaaactagaagctggaactctcaactctgtaggggtagagaatacaaggctactgaaaaatttaatggaattgcaaaaggttgaatatgatttcaagtactataaagtggatatgacaactgatttccaactgctagttttgtcggaggggaaatcaaatatcttgccagccgatgtaattgtaccgttccgaccttctgcaaccagttgctctggagctgtgactgcagaagctttggaggcctggaggtggtatttggccactgtcagacagctatcacacactattgaaccagaaatgcagaaggtggtagaaactgatctagttgcagcaagacaagcagacaggagcttgagctcccaagacttaagcagattggtaacaatgggccgtctcatgtcattgagctatggtgagaccagcttgtcactagaacattggcaaacggtcaaggaactagagaggctgcgaagagagaggctacaatgagacacaatatggaagcacaagtggtaccaatttgtacaaggttttaaatgagtgcagttcaaagggtctggctgttagttctgattaccagagctgtctttatgggtgcttatttggccagcatacttaaaagacagatagtcggttccataagttgtgaattcagtaaaatgcaatataaggccgttttactaatccttgtacgaatctcttgccttgttttttgttagtattcaggtagatatcctgttttcatatgcacatgttctaaatgtaatatgtgcatagaagcgagtgcaccaagcgttttttcagccataaattgtgaaatggctgtgaacatagaaaggttagcttggattgaagtaaagatccgtagaagatggcataaccccataaggccttagggctgcgcaggcgggggaggtggggtggggatctgcgccttaactttttccttcaggactaattataatttaaaattgtttctgaattatagtaccttatttggtgctgatgtctttacctaaacatcatttgatctt

SEQ ID NO: 7083 - DNA, 1091 bp, Glycine max
actgtaaaccttaattaaaatatgaaatcattcacatcaaaaggggtaaagtacaaatctttgagataagaaaagagaaacaatttatttatgtgaagcttcagcatcagatcaaaacatgaattatacagaaagggaccgaaatcacgagataaagttacacctatgaaggaagaaagcaatttcctattctatggttgtgcgtttggaggcatcccagattgattaccagactggtaaggactatacccttgcatcagaggcatttggccaccttgaggtctgttaaatgaagcaccttgaggataattggcatttgatggcccttgcatatttggcaagttgcctggaaaaccaccaagaggtggccctccacttgtaggcaaggatcctgaatgcatttgattcatgcctacataaggaccttgtggcattggagtacccatctgattcatcgccccttgcattcccattggacctggcattggcattggatgtgatgtaggcactgatgaaatccctggtatagatcctggcatgccaataggcatttggggtggagggcgaggcatattagggaagggagaatgggaagggtgctgtagttgttgcatatttggaggcataggcaaaggacccatctgttgtggtagagcctggtgttgatgttgtgggatctgctgaggattctgttggtatggttgctgttggttggcattaagaagggagggatgtggaccggggggaagaggaggagcacccattgaaacaggatggggttgcttctgctccccttgaggcatgtcaagagaaggaatagataagggcattgcaactccaacacctggaatggtaccctcatttcgagtcaacccaggggcaaatggtcctggagttgttgggccttcagctattgtaaaattaccacccatccgaccaacaacaggattttggtcagcatatcctggcatgccagtgttaaatctatcacgggcagggtctcctggcctatttctgcaccaaaactttgttcggctcgagctgctgccactgcacagaaggtagccaataggatgccatgcaaggtccca

SEQ ID NO: 7084 - DNA, 1189 bp, Glycine max
ctacggctgcgagaagacgacagaaggggaaacaaacttgtgtctgaaattgagcagtgcagagactcctgaacgtcaacggctatggcagcttcttcctttacaacatcttccattctcttcccattcacaactagttctaaatcccctccttctcaactattcccctcttttccttgcaaacatcataccctccgtctcagacccgtctcagtctcagccgcttcaaccccaaccccctccatccaagccgacaaatccccggtctccgccactccctccaagcttctcccctttcggattggtcacggctttgacctccaccgattggaacccggttatcccctaatcatcggtggaatcaacattccccacgatagaggttgcgaggctcattccgatggtgacgttctgcttcactgcgttgttgatgcgattctaggggcgctaggtcttcctgatattggccagattttccccgattctgatcctaagtggaagggttgtgcctcttccgtcttcatccatgaatctgtgagacttatgcatgaggctggttatgagattgggaatttagatgctacattgatacttcagaggccaaaactaagcccacacaaggatgctatcaaggccaacttatctgcactgcttggggtggactcttctgtagtaaatatcaaagcaaaaactcatgaaaaggtagacagccttggagaaaatagaagtatagcggctcacacagtggttcttctaatgaagaaatgagaagacaatctggaaatattgaggaacatgagagaactttaattggaaaaaaaaaacccataaaagttaataaactatgtttttttagcttctagtgtactgtttattgtttatcatatcttatagttcaccctgacagcaaattattcattggtgtgcctcttgccctgcattttgctaagatcttagtggctgtcttttacgttttatcatttggtattaagagggaccctgtataggtttgaacggcagatgcggccagtcggcgacaaatatatttagttatgtctgtgtataaactatgaagtgagcttgtttttaaaacaagcaagggtccatgaaaaatttgtaagtgcttacgtcatttcaaaacaaatttatggtcaaatgtggtggttaacaactttcatttttgatgttt

SEQ ID NO: 7085 - DNA, 2032 bp, Glycine max
  misc_feature (2013)..(2013): n is a, c, g, or t
tcagctacgtaggcccccccccccggaagtgaagcatttgatggattttgtggacaaggagaatccagaatgacgtttaaggtttggttgcatcagaggccagaggtgcaggctatgaaatggagtatcagattaagaccagggcgatttttcactgtccctgaagacttgagagaaccacaagagtctcagcatggtgatgcagtgatggagaccattgtcaaggccagaaacggttctgttttggggaaaggctccatactgaaaatgtatttctttcctggtcagagaacttccagtcacatacaaatacatggtgcacctcatgtttacaaggttgatgaataccctgtgtattgcatggcaactccaaccatctctggtgccaaggagatgctagactatttgggtgctaagcctaaaccttccctcactgctcaaaaagctatattgaccgatctgagagaagaagcagttgtttatatcaattatactccctttgtcctgagggagttaaataaaccagttaatacactcaagcatgtaggaattactggtcctgtggtggaacacatggaagcacggctaaaagaagatactagctgagattaggcagtctggtgggcgaatgctattacaccgtgaagaatataacccctcaacaaatgagtcaggtgtggttggatactgggaaaatattcgagcagatgacgtgaagacacctgcagaagtttattctgctcttaaagatgatggatatgatattgtctaccagaggatacctttaacaagagagagacatgctttggcctctgacattgatgcaatacagtattgtcaagatgactctgcaggtagttacctttttgtatcacacacaggctttggtggagtcgcgtatgcaatggccataatctgtatcagacttgatgctggatccaaagtctcacagccattattcggtcctcatatagatgccgtgactgaagaggacttgccttctcaaacttctaatgaaatggcacttagtatgggtgactatcgtgacattttgaaccttacaagggtcctcatacatggtccccagagcaaagcagatgttgacattgtcattgaaagatgtgcaggcgcagggcatatacgagaagatattctttattataatagagaatttgagaagttcatagatgatgatgacgaggaacgtgggtatcttatggacatgggtatcaaggctttgaggcgatattttttccttatcacattcagatcgtatctctactgcacctctcctgccaatacggaatttgcagcatggatggatgcaagaccagaacttggtcatctatgtaacaatctaagaattgataaataatatggcaatgtttataataatgttgtcagtgttcagtgggcatttgtagttacaatttgcgccacctattcctcatgctgcacaataccttatctttgctacaaagcctcacgtgtagtagactatgcacacatgctacttcgtaaaccgctattatctcaggcgagcagcatcctgcactcagtttctgtctagctttgtctgtcatgagaggctgacactcacacaaggcatgaatgttggtgaaccgaagtgttcatcggagacctgtaaggcagtaggttacactgctgaggaatgttatagtatctcttccaaaggttgtatttctatttgtttgttttggagggtttgtaaaggatgaaatgtagtgattcgataggatgggaagagatatctttctagtgaaagggagggaggaaggttccctatttctgtaaacccttacccatgtttcattaatgtccttaagaatttagttacttcactcaaattcaattgtatttttgaattttatttccctttatcgaagaagttgattctctcttggcttaatatagttaaggagaatatccatgccggttaagcccattagccggtttatcaaaaaaaaaaaaaaaaaaaaaaaaaaaaaaaangaaaaaaaaaaaaaaaaaa

SEQ ID NO: 7086 - DNA, 1686 bp, Glycine max
ggcaatgtttttcaattagtgtttctgcgttgtttcttcttcatttttgctttctctcgaagctagctcgctctaccatcccgagatggatctcagagaaagattggtacgtcttgttgtgggcttgttcgttgttgtgcaactttgttgccacgccaatgcgaatatggtgttccccgttgtgcgcaaattcaaaggtcccgctgaaaacctcgctgctatcaaagctcatgatgctggtcgccgaggcagatttctctcggtcgttgatctcgctctcggtggcaatggccgtcctacttcaactgggctgtattataccaaaattgggcttggcccaaaggactactatgtgcaagttgatacaggaagtgacactctgtgggtgaattgtgttggctgcacaacatgtcccaagaaaagtggtcttgggatggacttgaccctctatgaccctaactcatccaaaacttcaaaggcggttccttgtgacgatgaattttgcacttccacatatgatggtccaatttctggctgcacaaaaggcatgtcctgcccatacagcataacttatggagatggaagtacgacctctgggtcctatattaaggatgatcttacatttgatcgagttgttggtgatctccgtactgtgcctgataataccagtgtgatttttgggtgtggttctaaacaatctgggacattgagttcaactactgatacatcccttgatggaataattggttttggacaagcaaattcttctgtgctttcacagcttgctgcagctggaaaggtgaaaaggatattttcacactgccttgacagcattagtggaggaggaatatttgccataggggaagtggtgcagccaaaagttaagacaactccattgttacaaggaatggcacactacaatgtggttttgaaggacatagaggttgctggggaccctatacagctcccctcggatatattggattcttcaagtgggaggggaacaataatagatagtggtacaaccttggcttatcttccagtctcaatttatgaccagctattggagaagactttggctcagaggagtggaatggaattatatcttgttgaggatcagtttacttgtttccattattccgatgaaaaaagtcttgatgatgcatttccaactgtcaagtttacctttgaggaggggcttactctgacagcttatcctcacgattacctattcccgtttaaagtaaaaaaggctgacagcagtcaaatcacaggcccaaaaaaggaagacatgtggtgtatgggctggcaaaaaaagttcggcccaaactaaggatggaaaggacctaattcttctcggagatttggtgctgacaaacaaattattcatatatgatcttgacaatatgagcattggatggcctgattacaattgctcttccagcatcaaactgaaggataacaagactggaactgtatatacaaggggtgcacaggatctttcttcagcttctactgtgctaattggaaaaatattaacgttctttgtgttgcttattaccatgctaagcacttaactgaatgatattattgtatcgagagatggcatttaatttattttgttgtaacataattccttgaatggtgagcttgatgcgaataaattaattatttatcgtcgtgttt

SEQ ID NO: 7087 - DNA, 1423 bp, Glycine max
gtccggaattcccgggtcagccccgcgtccgcgcattgcacagaacaagtggtagatcatagcagatttaagtgccgtctctacaatgtctcagtttgtttcagcacctcagtctcaatcaccaccaatgcaagctatcgcttcacttggccatcagcaaagcttttctgattcaaatgggaaccctgtgactactgctgttgtttctcccctgcatagtatattgggttcatttccccaggatgacacatctcaccttctcaaccttcctagatccacctcttgggttcctgttcaacattcaactgcatggccgtcctccaagcgtgttgcagtggatcctctcttttcttctggagcatctcaatgtgttctacctcaagtggagcagttagggcagccacagagtaccatggctcaaaatggcattgcattgccaccctttcctggtagggagtgtacaatagaaggaagcaatgatccacaaaatcatcttttgtttggtgtcaatatagagccctcatcactcctaatgcataatgggatgtcaagtcttaagggagtcagcagcaacagtgactcacccaccataccttttcaatcatctaattacctgaacaccacagtacctgattcttcattgaatcctggaatgacacacaatattggtgaatcgggcttcctgcaaactccagaaaatggggggcaaggaaacccaactaacaaaacctttgtgaaggtttacaagtcagggtcctttggaagatccttggacatcactaaattcaccagctaccctgagctacgcagtgagcttgctcgtatgtttggcctggaaggtgagttggaggaccctgtgagatcaggctggcagcttgtattcgttgaccaagagaatgacgttcttctccttggtgatggcccgtggccggaatttgtaaatagtgtagggtgcatcaagatactttcccctcaggaagtgcagcaaatgggcaacaatggccttgagcttcttaactctgtccccattcagaggctctctaacggcgtctgtgacgactacgcaggccgtgaggacccaagaaatttaagcactgggataacaattgtggggtctttaaactactgaatgatgtgacaatcaatactatgaatctcttctctctcttgtattattactcctacttctccactctttgtcaatggtgggatgtactgcctagttgtagtttataggctacttataagccttttgttttttttgtctgttttcctgttttttgctgcctaggaccattcataagataaacaatgtaaaccatatggcatcttgtcaatgtgctatctacaatatattgattacttaatctgttaggagttcaatgcccgaagactgaagagcaaacggacaaaagtgaactga

SEQ ID NO: 7088 - DNA, 1722 bp, Glycine max
aaaaagaaaccactcactgtattaaccacatgaatataacgtacaaagagaaaacaaaaacgattaaatccttctattaagtatggaaaacaaaagaaagttgcatgtaatcccaaattaatagaaccttattttgcatgacacaaaaaacaaaggcaggggattgagctgagttaactagcaattcttgaattgagaaaaccatatatatatatatataatgtggtgttatcgctattctttagcaactcaatcattcccttccctttgatttgagttcactcccagtcttcgtcactcaattcatcattttcttctttgggaggtctaacaaccaataacacagttcctaaactctgagtgaaacccttttccttcaatcccgaacccctctcgaccttcaaaccctcaccatcagcattcacaagataaaacccatcatcggcacccacctcttttttactcctgtcagccaccaccaatataggctcctccttataccacctattcaccttccacggcaaaaccctagcatcgggaaacgataccacaacacccccttttcctaaaccaaccactgggtcccacgaaggcaacaccacccattttccccatcccttctccgccaccaccacaccaaacaccccctggctcctactctcatacggcgcctccaaaatctccctctcctccgccgcggagaccggcaacaccaccaccgaactcgcctccgccacctccccaatcctcagcctcaccaccggaacacgcacagcaccctcccctgcatccaccttatccccctcttcaccattcccctccaactcctccaaaatcatattcctggccgcctccgtctccgccacgcgcagcgcctgctccagcgccgaagtcctctgctccgacgggttcctatgctccctgctctgcctgtaatacataaaagaaagacagtccccggggagagtgtagtcgaacctcgcccatcctttatccccgcgccggctcgggaaatccttcatggaacgtgcgagctcctgcgcggccttcccgtcgcagcgattctcgacgaggaagcgcgcggcggcgacgcgctgcgaggcgctgaggagacggatctcgtagaggagctcggcgccgccggtctcgaaggcagcgaggaggtcggggtcggccttggagtggacgagggagtcgcggacctgcgccccgacgatgaggcggttctgctcgacgccggagatgccggtggtttcttcgattgtcggaggggagaagccttcgcggattagggaattgattaagggcgcgtactcgtaccagaggccgaggcggttggcgaggatgtcgattcggccggcgatgtcgagggtgccgaattgcgaggggaggggagacgggggagggcggaagggctggtagacttgatgctgcggcagcagaggctgctcaggtttcttgaaggaagatgagttgaggacggcggagatgggtttcacgaagtagcgacggtgaggtgagggagaggctgatgagagaaagaggtcattgggtgttatgggtttgaggttgagaggagggacggagagggaaagcattgtgcagagtgcagagtgcagagtgattcaagattggagttgcgtgccttgccttaccttatctcctgtttctggcttcactgtcttgctcaccagtaacaagtattccaaaaatactcgagcc

SEQ ID NO: 7089 - DNA, 1299 bp, Glycine max
  misc_feature (494)..(496): n is a, c, g, or t
atttggtataatacattgatatgtttcttaaaaaaagcactgcaatgtcttccatattgctgctagttggaatgttatcgtccattacagttgcacaatccataggagtttgctatggagtactcggtaataatctaccatcaaggcaagaagttgtggacttgtataaaacaaatgggataggtagaatgcgtatatactatccagatgaagaagcactccaagcccttagaggttcaggcattgagttgattatggacgtggctaagggaacccttcaatcaatgacagaccccaatgctgctacagattgggtcaataagtatgttacagcctactcgcaagacggcaatttcaagtacatcgctggtgggaatgaaattcaccccaattcccatgaggcacagtacattctttctgccatgaccaacattcagaatgcaatttcatcagcaaatttacaaattaaggtgtcaacagctatagactctacnnngattactaactcttaccctcccaatgatggcgttttcactagcgatgcggagccatacataaaacccataatcaacttcctagtgagcaatggggccccacttcttgccaacgtgtacccttactttgcttatgcaaatgatcaaagcattcctcttgcctatgctctttttacccaacaaggaaacaacgacgttgggtaccaaaacctctttgatgctatgttggattcaatatatgctgctttggagaaagtgggagcgtccaatttgcagatagtggtttctgagagtgggtggccatctgaaggtggagctggagcctcaattgataatgcaggcacttactatgctaatttgattcgtcatgcctcgagtgggaatggaactccaaagaggcctggtgagtctatagagacttacttgttcgccatgtttgacgaaaaccagaagcaaggtgctgatactgagcgtcattttggtctcttcaatcctgataaatcacctaaataccaacttagtttcaactaattgaaactaacagaaatatatatatatatatatatgctcctatatctatttactttgaataagtgtgtcaagtatatatgcacatctgtaaaacgcttatttatgccctaaatgacaaatatataagaagtgtcataatttagtttgtgatatttttttttacttactttgtttaaataaatacaaaccaaatttctgttggatgattgttatcataaggagaaaagaataagaatcactgtttaatatcattagtacaaaaaaaaaaaaaaaa

SEQ ID NO: 7090 - DNA, 1058 bp, Glycine max
agcttcagccgaacttttcctttttttttttattaccactaagactgaacgtcagcgctgtatctataggttttcttacagtagttgcatgatgaagaaccagaacctttggaaaacattacagattttgatttcgaatttacatattggcataaaaaacaaaagaactatttctagcaatggtataaagtaatgacatctcaaaattcagccggcattctcaaccaaaaccatgtataacatagtataaatatcaacaagtcaattaccatagtaactcaactgtaattaattcataacttgaaaaatcaatgaatcttttaaggagtacacaaccttgctactgcatgctgctcaccttgccaaacaccgacaatatctttgagagctggtcttaagtcctccaatatcttctggtattctaatgtatcaccgctggacttcttcagctcaaccaaatggaaagatggggcgacctcaaatatttcagcatcaatggaaagtggtccttttctaccctccttggatctctccaatttcagcaaccctccatccttcttaattatctccatcctcaaagtgcgagcaatatcctccatggtagacatgattgatgaggcagagctcataaatgtaaatttggtatcatccagttcaacattgccagcaaagaggccagacaagtcaagcccagcagacagagaaattatattgaaagcattaaaatgtgcaggtttaaccactgcttgctctgcctcaacaacagcagcacttgtattctcacacaagccaaaaatttgatcagaaacaactaaagccacatcaacagcctctcttttcacttgaccagatttgggtttgaatccttttctgaaccacgaattttccataacttttgccatggatatcctggtatttgggttggggtcaaggattttcgctaacagtctgcgcacttcaaacggaaaccagtttggacatttgtattccgccttgcctattttcttatacagtgacataagattcaaatccccttctgtcgtcttctcgcagccgta

SEQ ID NO: 7091 - DNA, 1926 bp, Glycine max
tcagctacgtaggcccccccccccccaaaagaagcaggagaggaaagtctttcagtctttctagttctaccaacaacaagtacgaaccaatactaataataatattattattattctcacgggtaaataaataaataaaatggtgcgtgcatagtaataggctaatagggtagtagtttcttcatgttgggtagttggaactccttaagcagcttcagagtctgagaagtgagaagcggaagaagaagcgatgcgtttttgcccgtgttttggatccgaggaggccaagggggtggcggatcgcgacccggtcctgctggtttcgggcatgggcggctccattgtcaattccaagcccaagaaattcgggttcaccactcgggtttgggtcagactcctcctcgctgacgtcgagttccgaaacaagatttggtccctttacaatccccaaacaggttacactgaaacgttggacaagaagtctgaaattgtggtccctgacgatgatcacggcctctatgcgatcgatattttggatccgtcatggtttaccaagtgtatacatttgacggaggtgtatcattttcatgacatgattgacatgcttgttggatgtggttacaacaagggaaccacactctttggatacggatatgattttaggcaaagcaataggattggcaaggtaatggaaggtcttaaaagcaagttggaaactgctcacaaagcttctgggggaagaaaagtcaatttgatttcccattccatgggaggaatcatgatatcgtgtttcatgtcgctttatagagatgtgtttacgaaatatgtgaataagtggatttgcttggcttgccctttccaaggagccccagggtgcatcaatgattctttattaactggattagagtttgttgatggctttcaaagctatttttttgtgaaaaggtggactatgcatcaattgctagtggagtgtccatcaatctatgagatgttggcaaatccatattatgaatggaaaaagcaaccagaaattctagtttggcgaaagcataccaaggatggggacaataacatcaatttggaatcttatggaccaacccagagtatctctttatttgaagaagcactgagggacaatgaggtaaattataaagggaaaacgatatcactgccttttaactttgatatccttgactgggctgttgaaacacgtcaacttatagctaatgctaaactgccagatggagtctgtttctataacatttatgggacatcattggacacaccttttgatgtttgttatggttcggaaaactctccaatagaggacttatctgaaatatgccacacaatgccactatattcttacgtcgatggagatggaacggttccttctgaatctgccaagggtgatggacttgaagccactgaaagggtgggagttgctgcttctcaccgtggaatattacgagatgaaacagtgtttcaacatattcaaaaatggttgggtgttgagccaatggttggcaagcattctaaaacatcaaaagtggcagatgctcagcctatggttctatgaacttgttattttcgttcctcattgaccaaaagagaatattattccatgcttttctttttcttctttttttaagagaaaaagaaaacaagcttagaaagaccttagataacattgtttgtgcaataaacaatttggcgtatgttcaggtaatctaaattacctgagtgtaatgtaatttcattatgctccaatattatagacttttcattgggccgtgtactatatttggtggtccaaaagccattgcatctttcgcttgtccggcccaaaaaaataaaaaaaaaaaaaaaaaaaaaaaaaaaaaaaaaaaaaaaaaaaaaaaaaaaaaaaaaaaaaaaaaaaaa

SEQ ID NO: 7092 - DNA, 1370 bp, Glycine max
tcagctacgtaggccccccccccattgatcctctttccaacacaacctcctcgttgctcatcttcaccgaaccaaccacctcaacaattttccaaaccaaaacctcaatagagagaaacaaatttttcagaggccatcatggacagagaacaagaagagatgcaatttcttgggttctttgacatatacaaagaagcctctaagatcatactttcatggaggaaaatcttcacccaaatcacctcaacactaatcctgcctctctccttcatcttcctaatccacatggaaatctccaacctccttttcaggaagatcctcatcaacgaaatagtcatggacgaaacaaggcgtaacacaccccaatacaacaagcttgaccgcatgatctcttctgaattgatcactcttgtgctcttcaaaatcgcatacttcactcttcttctcatattctctctcctttctacctcggcagtagtctacaccatcgcatcaatctacaccgcaaaagaagtgacattcaagagggtcatgagtgttgtccctaaggtgtggaaaaggttaatgttgacctttctatgtgcctttgctgcttttttcatttacaatatcgtgaccatgttggttatgttcttgtcaatagtcacaatagggataagtagtggtggggttgtggttttggttttgataacggttttgtacttcattgggtttgtgtacctcaccgtggtgtggcagctagcaagtgttgtgaccgtgttggaggactcgtgggggattcgagccatggccaagagcaaggagttgataaaggggaagatggttttatccatattcgtctttttcacccttgtggcttcttttgtttccattagggttttgttcaaggtgatggtggttgatggatggagggtgagttctgtggacaaaacagcatatggggttctctgtttcttgctcttgtcttgtttgttcctctttgggcttgttcttcaaactgtgctctactttgtttgcaagtcctatcaccatgagaatattgacaaatcggctttggcagatcatcttgaagggtatagaggagagtatgttccattgacagctaaggatgttcagctggagcaataccaagtttgattaataatttataatatagcttggataaattatattggtgatgtggttaattatatctgctatggtttcttgatgtcatgagaaatatcttttgtgtgtgaaattaaggcaggtatgatgatgtgaatttgattactccatctctatatgattatgtatttaatttactgtttgaaaataggaatcttttgcaaaggtattaattaatgccaaaaaaaaaaaaaaaaaatccc

SEQ ID NO: 7093 - DNA, 906 bp, Glycine max
ttttttttttttttttttctttttttttaatgatgccgaactctctgatcttatctcactgtctaacaagtttaaaaatttgaatacaagaaccaatcgtgcaataattgatacatatgtatgtgaaaaatagcaaaacaatctttatctttatatacacacactaactccgcgttgttcctcctcctagtaagtgcaacatggccatctcgctccaagaaaaatgtatataatttcgaccgtaacatcataatggttctaaatccatggcacttcctccccttcagtttccaatgagcttgtcatctatgtccccaagcattcaatcatgctcaatcagacagctcaatataacttgttaaaccaagagggtggtgaagattctcctaatcttggcaaaaaagcttccctttctagagactggtgaagccctgccattatcctagtcatagatgcccacacacacggtgcagcacagaatgcataaccaaaaacgcacaatgctctcaccaccccatctgaataccaaggaaaagccatgacaatcaaagcaccggtgatcccgagccacggcatcagaaccggcaacattggcagcagaaaggcattgactgcaatagagcacaatgcaaagacaccaagcaagtagagaggccatcccaacaaagggtgaaccgtgggaggaatgatgaagaagggtgttgtgtaagccgcaagaatgctccacagtgccacaaatttgaggatgttctgcaccaagttgatgctcttgtcggaacgcctatagcatagctttgagagacttggccttgcaaaacgcggctcgagctcgagccgaattgctattattcccaaatatattgccgattgaataagtatcacagccatctccgcaccataccctaa

SEQ ID NO: 7094 - DNA, 1990 bp, Glycine max
tttaatgcagaactctctcatcttatttaactatctaataacaattttaaaaatttgaatacaagaaccaatcgtgcaataattgatacagatgtatgcgaaaaaattgcaaaacaatctatgtacacactaagtccccgatgttcctcctcctagtaagtgcagcatggccatctcactccaaaagaatgtatataatttcaaccgtaacatcataaaggtgctaaatccatggcacttcctccccttcaatttccaatgagcttctcaattgtcatccatgtccccaagcattcaatcatgctcaattagacaactcagtacaacttgttaaaccaagaaggtggtgaggattctcctaatcttggcaaaaaagcttccctttctagagactgatgaagccctgccattatcctagtcatagaagcccacacaaacggtgcagcacagaatgcataaccaaaaacacacaatgctctcaccaccccatctgaataccaaggaaaagccatgacaatcaaggcaccggcgatcccgagccatggcatcagaaccggcaacattggcagcagaaaggcattgaccgcaattgagcacaatgcaaagacaccaagcaagtagagaggccatcccaacaaagggtgaaccgtgtgaggaatgatgaagaagggtgttgtgtaagccgcaaggatgctccacaatgccaccaatttgaggatgttctgcaccaagttgatgctcttgtcagagcgcctatagcatagctttgagagacttggccttgcaaaacgagtcattgctattattcccaaatatattgccgattgaataagtatcacagccatctccgcaccataccctaaagtttggcgacgtttatcatgccactggaggcctaatggcagaacaggccaggaccaccaataccatggcttcaaccatggtgcccctgggaatgtgatcacactatttggtccacagggtatgctccagcgaagtttaagataatagtaagatgcatccatctgataacccaaaggaagcctatatgttccatcaagcttggtgccattaggtggtgggtgaaacattggcttatcaagtaactctgggaaatagctagctatgaaaccctggtctgcaccatcaggattttctctcccattccgtaattcatgaaccatgtccttgaacacggccattgatggcttcaagacgaagagtcctgtgtgaaagacacaaggattgataaagaccgcacagaattgtccacattgaaacaactcgtccgtgttttggaggaagaggttatcagcgtccaacatcaccaccctgtcatagtccactaagctccatgcgtagagtttgttcaacgataacttgaacctcttgtcaaaattatcttgatgcttgtaggggttgtccagattttccactctcactactttcgcaccatcttccttttcaagagcacgaatccagcgaggaggaacatcaagggaagcaatgacaacaagatcggcttgagcgtcgagcgtagccagcgatttcagaagcacgcgtatggctatgtagaattcgtagtccctcggcgtacctacgtacatcattgtcgcgtacgcattcctttttccttctttcacacccgaaacacaccaaaagcccgataacaacaccaacaccaacaccaacgctaaccatctcataaagcctacattatttgagtcacctggcttcttcgcccacgccatgaaccaaaatcagagaagaagaaggaaatgaagtgtgaaaaaagagatggcggaatagggttatgtataggaagtgaaaatatccatgtgcggtagtgggagtattgtttaaattagagcgtgttgaaaagtagtgatatggcggaagagtatgggacttggtcagttttggaggaagggggagaaggatagagaggggggggccttcgtggctgagaatacagagccatttgaattat

SEQ ID NO: 7095 - DNA, 1868 bp, Glycine max
  misc_feature (16)..(16): n is a, c, g, or t
cgcggcgccagtcacngtagacagactcgaccgggtatgcgcgccccctccctgcgcctgcgtcctggccatctgaagttgactgactagtttggtgtggtgtctgttgattaacattacattgcctgccgactagtttacggtatcagcaatagcaagtggctcacacacgcacagatctgatctatctgaagctgaaaacgccgacgcccgacggtgatgatgaagatggggtcctcaccttcacgttgctccttcttcctattcctcctcctcctagtggcgctcttcccctcgtcgctctccgagatccggttctccgagatccgaaacgacgatcgctccatcgttcccttcgatcagtttggattcacccacaagggtcgccttgagctcagcgtttccaaaatatcactctccaattccaatttggacctctccaaggtgggattcttcctctgcaccctggattcctggcttcatgtcttccagcaactggaggatggcgagattcggtgcgcccttcaatccgatctggtcaagtccgtctacaccttcaattctctcaacggcaaggactctttcagcacgctctacaaagaagaaaccgacgccgatcagtacaacctcgtctttgccaactgccactcgccgcaactcaaagtgaccatggacgttaaatctgccatgtataatctcgacggaaagagcgacgtccgcgactacctctctgccggcagaaccatccttccgagggtttatttcctcttctcgcttgtgtatttcaccctcgcagctctctggatcagcgtcctctacaagaagcgcttgaccgccttccgcatccattacttcatgctagccgtggttatcttgaaagccctgaatctcttgtgcgaggccgaggacaaatcctacatcaagcgcaccggaagcgcccacggttgggatatcatcttttacattttcagcttcctcaagggcatctcgctcttcactctcattgtcttgattggcactggctggtccttcctcaaacccttccttcaggataaggaaaaaaaggttctcatcgttgtcatcccccttcaagtcattgccaacattgctcaggtcgttattgacgagaatgggccctacggccatgactgggctacctggaaacaggtcttcctccttgttgacgtcgtctgttgctgcgctgtgcttttccccattgtctggtccatcaagaacctccgtgaggccgctaggaccgacggcaaggccgctgttaatttgatgaagcttactctcttcaggcactactatgtcgtcgttatctgttacatttacttcaccagggttgtcgtttatgccttggagactattacctcctatcgttattcttggaccagtgtggttgctgctgagttggccacccttgctttctatttctttactggctacaagttcaagccagaggctcacaatccgtattttgtcatcgatgacgaagaggaagaggctgccgcagaggccttgaagcttgaagatgaatttgaattgtaatttctttcaaaatacaaaattagttgttgaacaagttggtaccatgctcagcaatgctctcaggtttcatctcaacagccagtagaaatttgcatgttacattttatgggtatagtcattattcataaatcattgtgctatattttgtgttctggactcatgccagtttttgcattagtgttataatatcctaaacccttgtgtagtgctctgaacatatattacttctaagtatagatactgataccttgcaaaaaaaaaaaaaacatgattacttttattgtacctatcttccaatttggaacttcttttcctgc

SEQ ID NO: 7096 - DNA, 1662 bp, Glycine max
gaagagtgaaaccatggaagcagttgcatgcagaccgagctagctagctagcaagcaagcacagagatggaggcaaagcgaggccatgccctcatgtgcttggcacgtgtttcactcttcctctgcgctctaaccctatccgctgctcacggaagcaccacggttcaagacatcgcgagaaagttgaaactcggggacaacgagcttctgcgcacggagaagaagttcaaggttttcatggagaattacgggaggagctactccacagaggaggagtatttgcgccgtttggggattttcgcccagaacatggtcagagcggcggagcatcaggcgctggaccccaccgccgtccacggcgtcacgcagttctccgatctcaccgaggacgagtttgagaagctctacactggcgtcaatggcggcttcccgtcatcgaataatgccgccggcggtattgcgccgccgttggaggtggacgggctgccggagaattttgattggagagagaaaggagctgtcaccgaagttaagttacagggtagatgtggatcatgctgggctttcagcaccacaggatctatagaaggagccaattttcttgccaccggaaagctcgtcagtcttagtgaacaacagctccttgactgtgacaacaagtgtgacataacagaaaagacttcatgtgacaatgggtgtaatggaggtcttatgacaaatgcctacaattatttgctcgagtctggtgggttggaggaggagtcttcatatccctacactggggagagaggtgaatgcaagtttgatccagagaaaatagcagttaagatcacaaatttcaccaatatccctgctgatgagaaccaaattgccgcatatttagtaaaaaatggtccacttgctatgggcgtgaatgcaattttcatgcaaacatacattggtggtgtctcatgccctctcatatgtagcaagaaaaggctgaaccatggtgtgttacttgtgggatatggtgcaaaaggcttctcaattcttaggcttggcaacaaaccatactggatcatcaagaattcgtggggggagaaatggggagaagatggctattacaagctctgcagagggcatggcatgtgtggaataaacactatggtttctgctgcaatggtgcctcaaccacaaacaacacctacaaagaattatgcttcttattagctatgcacttaaggaaatctaaataaatatttttcattctaggtgatgtatcatgtatgtaccaaaatattttggtacgtaagtcttttaaaaagtttgcatctcctctttggttttccttagttctgaaagttatctcctaagaagacaatcatatgtactgtacgtagtgtgaagatatagtattgtatgctgcagaatatgattgtctaataaggtggactagctgtaataaaagatatttccaggttgaaaacagagcaaatcatgttaaagagctaaaacattttctgcaggttagaaaagaattttggtaactgatggagttgatgagaaaagtgtaattttaagatggtgttcaaaattttatggaggattaacaacgatggcaaaagatggacctccaatccacataccaataatgccaatatagttttgtcaaaaaaaaaaaaa

SEQ ID NO: 7097 - DNA, 2001 bp, Glycine max
cacgtgcatgacggtgacacggtccgaaacaatttcgcttttcccttcaaacttccaagttccaattcaactctgatccttaaattcatttgcatattcagtcctttgaattattccactttcttcaaatcattccaattccacaaccaacgaagaagcatcatcaacacaacacaacaatgtcaaaaacaactacttcttccgaacaaactgcacgaaaccgtttggccaccctcgcagctcacttgcttccctccgacgccacctccgccgccgcgatcctccacccccaccggctctccgcccccaccggagacttgccgccggcgaacctgaagggcacccttaccgtcgtcgacgagaggaccggcaagaagtaccagatcgaagtcaccccagatggcaccgtcagagcctctgacttcaagaagatatcatctgggaaaaatgacaagggactcaaactttatgatcctggctatttgaacactgctcctgtcatctcaaggatttcttacattgatggtgatgctggaatccttagatatagaggatatcctattgaagacttggcagagaaaagcacctttacagaagtgtcatatctcatactgtatggaaatttgccttctgaaagtcagttagcggaatgggaattcgccttatctcagcattcagctgtaccacaaggagttttggatatgatagaatcaatgcctcatgatgcacatcctatgggcatgcttgtcaatgccatgagcgctttgtctgtttttcatcctgatgcaaatcctgctctcaaaggtcttgatatctacaactcaaagcaagtgagagacaagcaaatagcacgggttattggaaagataacaacaattgctgctgcgattaatcttagattggcaggaaggccgcctgtgcttccatccaacaaactttcttacacagagaacttcctatacatgctagattcttttggcaatcgatcatataaacctaatcctcgactaactcgagcgctggacattatcttcgtcctgcatgcagaacatgaaatgaattgctctacatctgctgtacgtcacctctcatcaagtggtgttgatgtatatactgctattgctggggctgttggagctctatatggacctcttcatggtggagccaatgaggctgtcctcaaaatgttgagtgaaattggaactgttgagaacattccagcattcattgagggtgttaaagccaggaaacggaagctcagtggttttggacatcgtgtgtacaaaaattatgatccaagagcaaaggtcttgaggaaactgacagaggaagtgttttccattgttggccgggatcctcttatagagattgctgttgccttggagaagattgcactgtctgatgagtatttcatcaagaggaagctatatccaaatgttgacttctactctggactgatttatagggccatggggtttcaacctgagtttttcactgttttatttgccatccctcgaatggccgggtacttggcacattggcgagagtccttggatgatcctgatacaaagattatgagacctcaacaggtttatgttggggagtggttgaggcattatgcaccaattaatcaaaggactgcatcaagtaacactgacaaacttggtcaattggctgtatcaaacgcctcaaagaggcgtcttgctggatctggggcttaactagtgaaactgccaagtgctcaataaggtccagactccagagaaaaaattaattttttttctggtacataaaataagtttgtttgtttatgtataaaattatgatatcaaatagataaataaaatcatgaaatcaataagaccatggtttcagtattttttttctatctgaaaaaaaaagaaagactccttgtatttgcaatgtcataacataaattgtataattctgaaatctctatctcaatatggaatgtggatcagatgacaaaaaaaaaaaaaa

SEQ ID NO: 7098 - DNA, 1896 bp, Glycine max
ccaaactccaaatcctccgtttttctctctgaattctggattccaatagttgttgtgttctgaagagagaacaacatgtcaagcaattcagatgcagcagcagcgacggtgcatgctcatggccgtttggccatgctcgccgctcacctcctcccctctcaactcactcatcacggcgccctccaccctctccatctctcctcccagttgccgccgccgcccaacctcgccggcactttgaccgtcgtcgacgaaaggaccggcaagaagtaccagcttcatgtctccaaagaaggcactgtcaaagcttctgaattcaagaagatattgacagggaagaatgacaagggactcaagctttatgatcctggctatttgaacacggctcctgttcgatcaacaattagttatattgatggagatgaggggattcttagatatagaggctaccctattgaggagttggcagataaaagcactttcacggaagtgtcctatctcataatgtatggaagtttgccttctgaaagtcagttagcagaatgggagtttgctatatctcagcattcggctgttccacaaggagttttggatatcatacaatctatgccccatgatgcacatcccatgggtgtgcttgttaatgccatgagtgctctttctgtttttcatcctgatgcaaatcccgctctcagaggtcttgatatttatgactcaaagcaaataagagacaaacagataacacgggttattggaaagataacaacaattgctgctgcagtttatcttagaatggcaggaaggccacctgtgcttccatccaaccacctttcttacacagagaacttcctatatatgctagattcttttggtaatcggtcatataaacccaatcctcggctaactcgtgtgctagacattatcttcatcctgcatgcagaacatgaaatgaattgttctacatctgctgtccgacaccttgcatcaagtggcgttgatgtatacactgctattgccggggctgttggagctctttatggaccacttcatggtggagctaatgaggctgtcctcaaaatgctgagtgaaattggaactgttcagaacatcccagagttcattgaaggtgtcaaagccaggaaacgcaagctctctggttttggacatcgagtgtacaaaaactatgatcccagggcaaaggtcttaagaaaactggcagaggaagtgttttccattgtgggcagggatcctcttattgaggtggcagttgccttggagaaggttgcactatctgatgaatatttcatcaagaggaagctatatccaaatgttgacttctactctggattaatttatagggccatgggatttccaccagagtatttcactgttttatttgctattcctcgaatggctgggtacttggctcattggagagagtccttggatgatcctgatacaaagattttgagacctcaacaggtttacgttggggaatggttacgacattatacacaagtcaatgtaagaactacatcaagtgatgctgacaagcttggtgaggtggccatatcaaacgcctcaaagcggcggcttgccggatccggggtatagcttacaggctcaatttagttatatgatcaagatgaccaaaaggatgatatgtctctgcataaataatgctactggtgtcacatccatcacctaccagaagaacgatgctggttgagccattatgtgcatgtcacgtttcagtacttctattttaaattatttgttaattgttacacggaaatagtaaatagaaaagcttacatatctcatgggagcagtaacatgtacaattgattagcaaaacgtttgtattcaagaaataaacagagttttctgtgtatc

SEQ ID NO: 7099 - DNA, 605 bp, Glycine max
attttttttcgaaaaccctagagagagatggggaggaggatactgaatgatgcgttgaggagtatggtgaatgcagagaggagagggaaagctttggtggaactcaagccaatctccactgttatgtcttcctttctccaaatcatgaaacaccatgggtatatcaaggactttcaagtctatgatccgcatagagtggggaggataagagttgaactacaaggtaggattaacgattgcaaggccctttcgcaccgaaaggaccttaaggcaagggatattgaagcctatagattgcagactcttccaacacatcagtggggttatgttgtcattacaactcctgatggtattttggatcatgaagaggccattaggaagaatgtaggtggccaggttcttggttactttcactaaaatgatcattactgtgctattttggtcaggtattaggttctgctatgtttccagataaacattccatcaatgtttttatgcgattacagattttttttttcctgtatgaatgttataacatagcagctcatgcatgatgagtatgatggattgtatttgaagctttgtggaaatctgtcccgtttttt

SEQ ID NO: 7100 - DNA, 1209 bp, Glycine max
ccacgccgccgcccgcgccctccctgattagtccctttgtgattcctgggaaactcatttcattagagtgagagagagagagagagagagagagaggtatcacagtgaaacgaagaagccctaactacgcacgcactcattcttgagaaagctcaatattcattcgtccatggcactctcttctcgtctcttttccaaatccaaattgatctatggctgtcaaatacttctgcaaaaggagcatgctattccagttcgtcactttgctaaagagtctgcccctcctgcccttaagggagatcagatgctgaagaacatttttgtggaggtgaagaacaaatttgagactgccataggaatattaaagaaggagaagatcaccattgacccagaagatccagctgctgtttctcattatgcaaaggtcatgaaaacagttagagagaaggcaagcttgttgtcggagtcccaagacatactatccaccattgaaattgagactcaggatattccagatgctcggacctatcttctgactttgaaggaaataagagtcaagaaaggtcttacagatgatcttggtgcagaggctctgatgatagatgcattggacaaaattgaaaaggatttaaaaaaacctttactgagaaatgataagaaaggaatggaccttctcttggcagagtttgataagattaataagaaaattggaattcgaaaggaagatctaccaaagtatgaagaggagctagaacttaaagtagccaaagcacaactggaggagctgaagaaggatgctctcgaggcaatggaaactcaaaagaaaagggaggaattcaaggatgagcctgaatcggtcgatgtcaaaactttggacatcagaaacttcctttaaaatgtcttcaggatgtttttgcacacactagaaattattgcatttggataatgatgaagctgtgttcaataagtagacaccactggtttgaagtgcaacattgatgccagtttgaatattcttgagttttttcaagatcttttttgtatttcagattccatgttaaactggaagttgaggctgtcaaattttctaaatttttcttgtcacgttgtttcccaagtatttattcttattgattttatggctgttccgcgaccctggtaacaatcttacgacatataatttaaaataaatactactctcttcatccc

SEQ ID NO: 7101 - DNA, 1226 bp, Glycine max
gcgaagcccgttcaccagatctggggctttccgtacctgattactccctttgtaatccccggcgacgagacgacactacaggagggtgagagagaattatcaaaggtgaaacgaagaagccctaactacgcacgcattcgtgagaaaactcaatattcgtcgctcatggcactctcttctcgtctcttttccaaatccaaattgatctatggcagtcaaatacttctacaaaaggagcatgctattccagttcgtcactttgctaaagagtctgcccctcctgcccttaagggagacgagatgctgaagaacatttttgtggaggtgaagaacaaatttgagaccgccataggaatattaaagaaggagaaaatcaccattgacccagaagatccagctgctgtttctcattatgcaaaggtcatgaaaacaattagagagaaggcaagcttattgtcggagtcccaagacatactatccaccattgaaattgagacacaggatattccagatgctcggacctatcttctgactttgaaggaaataagagtcaagagaggtcttacagatgatcttggtgcggaggctctgatgatagatgcattggacaaagttgaaaaggatttaaaaaaacctttactgagaaatgataagaaaggaatggaccttctcttggctgagtttgataagattaataagaaacttggaattcgaaaggaagatctaccgaagtatgaagaggagctagaacttaaagtagccaaagcacaactggaggagctgaagaaggatgctcttgaggcaatggaaactcaaaagaagagggaggaattcaaggatgagcctgaatcagtcgatgtcaaaactttggacatcagaaacttcctttaaatgtcttaaggatgtttttgcacactagaaattattgcatttggataatgatgatgctgtgttcaataagtagacaccactggtttgaagtgcaacattgatgccagtttgaagattcttgagttttttcaaggtctttttgtatttcaaattccatgttaaactggaagttgaggcgatcaaattttctaaatttttcttctgtcaaaaaacccaagtatttattctttcttgatattatggctgttcccattggatcccatccatcgattaattgaaattctcgaccctggcaaacaatctaaaaaaagaaaaaaaaaaaaaaaaaaaaaaaa

SEQ ID NO: 7102 - DNA, 1528 bp, Glycine max
  misc_feature (2)..(5): n is a, c, g, or t
gnnnnaaaagcatcacatcaatacaaaataataaacaagctgacagaagctaagaagtgccttcctgaaaagtgaaaagccaaattaaattaataatgtcaaaactacaaaaatgatgaatccgagatccaaaatcacaacttgaattcgcaaaaacactcggacagagcagagcctcttccattggcaaaatcatctctgtgaagcttccatagggcttgcatcaacttctttcctctaagaccctgtgaggttaattgtgcaaaacctcttctgctcaaaaatagagtcttgtataaaccattgaaagctctcattgctgcaaccatcttatccatgttcccaaaatatgtggctatatatgaatcactgttaatagatacataataatccaaagcagcttttgtattgccatgcatgcttgtgaagtcttctctactgagaatacttgatttggtaactatgttggtgtaggtatctgtcaaaccttcaatttccatcaaaccatctccagctgccaggtatatatttgtggttggtgggatggaaagagattgaagtattaaagctgtctcattaggcgtaagtggacatttcccacgtagtctccaaacacgggctaactctccagtccatggttttctgtccacttgtgctgcttctatggctttcatggaagcaggagaaaggtctggatactcccactggctgtaagcaaccatgtctggctcaaaacgaagatgaagagacaaaaagggtttaggtattgcatctagaagctgagaggctttcatttccaaggatctggtgagacgcaatgccttgtaacaagcttgacacagagcagcttttgcatacaaagggtatctgtcccttctttgagacattgctggtgtgattgaaatgtacttgtgtttcaacagagatggaagaacgctttcaacataatcaaattgccctttccgtttgctacagtccactcgaactggttcttttgaagcaatctctggtggtaactctttgacaactttgacaaagccattcatatgctgtataaagtaatctacatcatatacatctgcaaaaccacttgtttcattccaatatgaagccacttcaaacttcggcaagacaagggttgcatttaacagacgagcaatgcccacaccatcacagaaatctcttcgcatctgattgagccccccatagcaatccactctgatatatccataagtttctaatggtagagctgtttgacggccttgtagccaccaattgcaaggtctccattccatgagtctccgaacactccatatatccacctcccctaaggagggttccccataaatgtgaacttgagagaaaagggaagaaggcaattgcagtgcgagaaggaagaggagtgagagggagacaacgagaattctgaagaaaggtttcacagagaaaacgaccatttgatttcacggaacttgtgatgatggatccctgcgattgcgacgacggcggaatgacgctcgacctgaat

SEQ ID NO: 7103 - DNA, 3266 bp, Glycine max
  misc_feature (3169)..(3171): n is a, c, g, or t
  misc_feature (3180)..(3184): n is a, c, g, or t
  misc_feature (3213)..(3217): n is a, c, g, or t
  misc_feature (3261)..(3264): n is a, c, g, or t
caaacgcggctcgccattctcatttctctctccagaagataaaaaacccttttatatttttatatttttatcactagaaaaatcaaacaaataaaattttcattttcattttcttttcttttctcgctcttgttttttcggggaaattgatttcaccgtaataggagccaagaaaaacaaaacagaaaaattccgaacccgtgaactcttttacctgctacaaatgcatttctctctcttttctcacactttttctctgctaaactcgcaaacacgaacactgtttctctctctctgaagtgaagtaatgaagcttcatcttcagatctcgagctgaatcaccgatctctgtgtgtgagagaggagttggattattgattcatggaaacgcggagatgaagttctacatatcaacgaaggggataaagagagtgacgatatcgaacggcgagggaaagggatcggcgaagacgacggcggtggcggccggcgccggtcgccggatatcggctcggacggtgtttccggtgatggtggtgctcgggatcgtgctgccgtttctgttcgtgaggatcgcgatcttgatgctggaatctgctgcggcgtgttcctcattggaatgtgctgggtggaggtttttcagtggagtcgacacgtcactggaactcagagatgagctgaccagagcgctaatagaggcaaatgatggtaatgttaatgagggagcagggtcgttcaatgaacttgtgaaagagatgacctcaaaacaagaccttaaggcttttgctttcaagaccaaagccatgctatcacagttggaacgcaaggtgcaattagcgagacaacaggagtcggtttattggcatctagcttctcatggtgttcccaaaagtctacattgtctatgcctaaagttggctgaagaatatgctgtaaatgctatggccagatctcgtctaccccctcctgaatttgtatcgcgccttgttgaccctacctttcaccacttagttctcctaactgacaatgtccttgctgcctctgttgttgtaacctctacagttgaaagttcaatcaacccagaaaaactagtttttcatattgttactgacaaaaaaacttatgctccaatgcatgcttggtttgccaccaattctattaaatcagttgtggaagttaggggattacaccaatatgactggtctgaagaagtgaatgctggtgttaaagagatgctggcaactaatcacttaatttggaagcaatactataataaggaaaaggaccttgactatactcaagagaatagcagatatttggaggctttaaggcccagcagcctatccttgatgaatcaactccgcatttatttgcccgagctctttccagatctcaaaaagatagtattcttggatgatgatgttgtagtacaacatgacatatcttctttgtgggaactagatcttaatggcaaagtcattggctctgtattcaagtcgtggtgtggagacggctgctgccctggaagtaaatacataaactacttgaacttttcacatcctcttgttgcatcaaactttgacggtgatcagtgtgcatggctctatggcatgaatattattgatcttgaaacttggaggagaacaaacattacggagacctaccatcaatggttgaaacttaacctcaagtccgggatgacaatgtggaatccaggagtgcttccacctgccttgatgacatttgagggtcaagtgcatcctataagttcatcaatgcttgtgactgatttaggttatcgccatcaatcagcagaaattagcaaagagaaattagaagctgcagctgttattcatttcagtggccctgcaaagccatggcttgaaattggtttcccagaggttcgaagtttatggagtagatacgtaaatatctctaataaatttattgggagatgtagaattacagggtgaaggaacaaagttttttcacctcccatatttattgagattgaaacagtgataccgtatgggatttcagagggaagaaggttctgccttcagtctctgactcatacgctctgcacagtttgatatgagttacgctatgccatgtccatataatatagtaaatagatgaagctaccacacaataccctactagaagcatatctgtggttaagaaagatataagcatcattgatctagctgcctgacaatactgtaaacttctttttcaaattactttttgaagtggagaaattgtattgcatgatttgaaatttcagttagtggattctcaagtcttggtacataaaactctcaggtaaagacgtgaaataggttatcatgcagctttgagagttcatgcgtgtttggaaacacgttccctacccaacaaatcatgtcaaatgggttaaagacgtgaaagctagaactaggaacttctattcagatgtgagaatccatgttcgtgatgtatgaccaaacacgctattcatccctttggttttttaaatgcttattctaggagccagtcaaattagtttgtgcattgctttacatcacttccacttgtgtgtacgtggagcttgttacaaagaagactaaatgacacacgagtttaacatctgtccaaactcaagatgtaaatgacgtaaaacaaatgcggtgttcaactcaactcatgtggaaaaagatctcatgctgcttttccttattttggtctaggggctggctcacaaaaggcaatttctgtgttgacccttgtgcagtttatcactatgaatgaaatggccgtggaatattatgcaatacgctgccgaaattgttgagtatttagtacgttgctaaaaggccccaacacaacttttgatttgtgcacttataattactaaaacttttatattgggatagtgtaaacctctgaaaagtggcataaataatatttacgattgatagctacaatttcccggtgatccaaactagacaaataacatgatccggtaactatatgtgccaaatttggtcactgttgcaagaagtcaagaactggagaaagcaacatttgagatcctatcattctatctgtttggggccatattatgcaaaaaatttgaacttgctcaaatcaaccacgtggagttatcagctcaaggctttcaagtttnnncatagaatnnnnnaagatttgaatttgcaagtacggggtttnnnnnttgtggaacgagaattttgacttctatgattcttatcttgattnnnnat

SEQ ID NO: 7104 - DNA, 1274 bp, Glycine max
gcctttgggtccatcaagagtaaactctgtaatggtctggatgttccaagccttgacagcattttgcaggaccaccaaaaatccatggcccctcacttgatcaaagaggtaacctcagcaccaagattgatgactttagcacattgaccagtatggcagtcccatatcctaactgtcccatcagtgctgccagaataaagtttgtcggatccaacaggaagtgcgatgccagtgataaccttcttatgttcttgaagtttggttacggtggaaaacccatcaccacaaaaccatgaatgcagatacaggcattgttcaccatgtacacaattgttgttgatccagtatttacatatccttggtgatgatttcttgaaagccttagcaacccttgtcgcatctcctctatctccattatctctaagcaatgctttctttgaaccatatttcggggtattctcagaggaggaatggggcttttttccgtagctatatgcagtattcccataaccacaagcagcaggtggagatggtgtctctatgtgcaaaaatctgcaaggatttctgttacatcttccagctctccaataagagcatgttgttctaccaatgcgctcagtccttcgtgcaaactttgtatccatgatattctaaaaaacaaacatggcattgtaatgacatcccagatcaggtactgtatcctatcaataaaattctccatggctcatgctttcagtcattaactcaatgattaaatcccagccatagacttaattcttcatccaaaacccaaaaccttttggctcccaaattttccattcccaaaataacaatcgtaaagcaagtgatgaacggcaacaaaactatgttgatcgaggaagatcaacaacatcaagatcaaaacccattgaagacttggatcaaagaccaataatttaaccctgatcagcaacgtcaatagagactctcccaaaaccccaaattcggacgccgggggccctcgcggggtcccccggaataaataaattgaaaggaaccctaaacgcgaaaccctatatttgcatcgtggaagcgcagaaaacttcactgagataaatgaagtcggacagaacatagattctcgtagatcatccatcacaaaccctaaaagaagtattagattttcgcgttcggagaaacaaacctgagtggtagaaacgaagcttgatttgttcgaacgattgttgagagaaagaacagagagcaaaataaggcttctttttccttatccaacc

SEQ ID NO: 7105 - DNA, 1591 bp, Glycine max
tcagctacgtaggccccccccccgtttagcataggaaacacaagattactactctcttgtcttgtcgagtttttatgactacgactatgtctctgtctctgagactgaactgaataacattaacacagcgatgtcgttgaaaacgttaacaacctctcctctttcgggaatcactgttttggtccttctcctcgctctccttctcagattttacatcaaattcgacaccgctgagaggttgttcagtgctgaagagctatcattgctcaatggaactgatgaagggttgccaatccttctaggaattcttggatccgtgtttgatgtaaccaagggaaaatctcattatggttcaggagggggatacaatcattttgctggcagggatgcttctcgcgcatttgtctctggaaatttctcaggagatggtctcactgactcattgcgtggtttatctagcactgaggtgaagagtattgttgaatggagggatttctaccataaatcatataagtatgttggcaagctagttggccgatactatgatagccaagggaatcctacaaaatatttaaaaggagttgaagcgaaggctgccagaggtgcacagcttctagaaaagcagaagattgaagaggcgaaactaccttcgtgcaattcgagatggagtcaagatgaaggtggtgagacacgactactcctttgacaattgtccggatgctgtttgacaactgggattaaggctctgtttggataattctcaagaaagcaaaatgaaaaagtttcttctgtagaaactctcgtttagtttctccaaaagtttattttaactagtgcataatctaattttaagtttataaagggaagtttaattaattttactttcttttctttttctgcaaatgcttagtgataagtttatccaaactgactttcccactgtgggggaaacacaaatttatttgttgcaactgaaattgtctgaaagcatgttttctaattgtcacttcattatagccacattgatgcagattgcttacaagttattttgacacagatttggctcttttgatcaggtatggtgtgatgttggttaccctagattggttcagaggccactagagattgctttgacagggaagatgagtaagcgttgtgcatgctttgaagattctcagttggaccaacctggcttagaggtatatgaagggtgtgattaccatgctaccaggtgcaaagtttaatcaggaatcaaacaccaacggaagaaatttttttttagctatctgtatgtatattaaaagcttaatttagtgaagctggtaattatttttgtacattgttgcttttattttgagggttgctttatgctatttttattccggaataatcactcttctttaacgattaaatttaaaattgtgctatatgccccgcactctgtaacaggaaaaaaaaaaaaaaagtcaagtatatattaatatttaatggatttgtaaataaaattagggtatttctttactgagaaataagtagatattattaaactcttgtttttggagtcaataaaataagataattattttgattc

SEQ ID NO: 7106 - DNA, 1895 bp, Glycine max
cgatcctcaggcacccaaattaccagatgacattcttcggcgatactcacagcatgatctatttgctgcttttatctctctttgcgtcgacattggtctggttgggggcactggcaatgaacgtttcgaactatcacaacagttcttgcagagcgtttccaagtcaccatttccatttaatactggaaagcaagctgttaaattttctgcatggctggaggaaagaggcaaagacctcacagaagtgggcactaatcttgctgaagatctacaatgtggggacatttttcatttgtttgctttagtctcttcaggtgaactttcaatttctccattcctaccagataatggtgttggagaggctgaggacttgagaagtgcaaagcgtaaatctgatactaccgagtcttcatatagtgataaagccaaaaagtcaaaatccttctttggagtagaaggtgaaattatttctcgtcgggaaaaaggttttcctggtatcatcatttctgcacaccaaacaacaatttcaagagctgatattttaaatttgttgaaggataatgataactgtggccaaccttttgacgaagatttccaattaaacattggccaaagcagtaattattcacttcctgaccatatcttggaaatcactaaatcttctgaccctgtacctctggaagaaaatcatagtgaatcaccctgggaagctatggcaggctaggcacgacatttgttgtcagaatattccaataaaaaacatgcatatgcaatttgtgctgaggtcttcagagttgtttatgctgccatccaaaaggctggtgaccaaggattaagcatgggagaaatttcccaggttattaacttgccaggagcagagatagatgtcttgattgttgatgctcttcaagcatttgggcaagccttaaaggttaatgcttatgatactgtccgtgttgttgatgtcttataccgtcacaagtactttttgacacctatgtctgattttcatcttcgtgttgtacaaccttcctcatcaaaaaccatcgagaaaagtgatcatacatgtgagctttatgaatcggaggaaagggatactacttctgttgatacttcgaggtaaagaaacgccgctattgatagcgtgcagacattgacaattctcaatcttccacatggggatgtggatcctgaaaatcaagcttgtgataggaatgaaggctgtaagcaaaacagacttggcttatccagagtcaatcataagaaagaaactctcgaattttcttctagtaaatcatgtgtgccaatattgccatgggtcaatggagatgggatcatcaacaacattgtttacagggtactcagacgtcgtgttcttggaatagtgatgcaaaaccctgggatattggaggatggtattctacatcatatgcacgtgttgaatccacagaactgtagaactctcttggaattgatggttctggataaacacctaattgtgaagaagatgcatcaaaatatgttagatgggggaccctccttacttccggaacttatcggaagcaaatccagtcaaccgaagttgatatgccgagagcatttcttcgccaatcccatgagtacttccttgttgtagggaatctgtggtattgacattagacattagtacttgttatataaaaaacatatttataggaaattttggatactggtttaagttatatttggaagaattgtaacttaggcaatcctagtaaatatgtttcaggctaggaacttaggattttggatatttgacaagtttggttgctacaatcctacttgagtatagcaggttggtaaacacatcattcagattttttcttatttactagcgcttcctaaaaaaaaaaaaa

SEQ ID NO: 7107 - DNA, 1046 bp, Glycine max
aattcggctcgaggtggttacctgaccaatggactcaccatactgtctcaaaagtggaaggcacattcggctaccttcctcctgaattcttcatgcatggtatagtagatgaaaagacagatgtctatgcttatggtgtactattattggagctcattactggtcgacaagctttggatagctcacagaaaagtctggtgatgtgggcaaaacctttgctaactgcaaataacatcaaagagcttgtggatccagttttggctgatgcttatgatgaagagcagatgaagcttgtaaccttaacagcttctctctgtgtagaccagtcctcaattcagcgaccggttatgagccaggtgttagatatactaagaggggaagaagagagcttaagaatcatggaagaacgatcgaagtcaaaacttcagaggacatactctgaagaactcttagatgcagaagagtacaactcaacaaagtttttgagtgagagggatcgacacatggagactattctaggctgcagtagctctgttacagacgatgaagagaaaatctagcatatggccagtgattcagataatgtgtgtacaaggaactacataagttgaaattataggtcagtgtgatttatttgcagaacatgaactgattctgattccacttgaggatccagagctggccagcacatgatggggttgaaggggttaacaaagacagaaactgaggtagaggcagaacctcgtgtggatgtagcatgcttgtcaatatttttatttagtcaaaatgatgatgaagttggggtataatttgtgaagcccaattaaagcttcagaatggttgcagtgtcaatgatcatcatcaactgcaaatacccttttcagcaagttgtttaattttctgttgtaaccataagcagatttgtccaagaaaatttccttttatttgttcaatttgtgccatgtgatttttattttatatctcttccgtagttgtaaatttttagcttttagttttcgaatataaatttaaaatttcaaaaaaaa

SEQ ID NO: 7108 - DNA, 1923 bp, Glycine max
ggctcgagaagaaaggcaagtaccatttttatcaatcttatcacccttttgcattgcacctacaaaagggccaccccttcttcccttctcaacttgtacttcatctaattcaatactacaacttctgaatcacttagttgaattgaattatcttcaaaatgagagaaatccttcatgttcaagctggtcaatgtggcaaccaaattggaggcaagttttgggaggtgatgtgtgatgaacatgggattgatgccactggaaattacgtaggcaattcccatcttcaacttgagagggttaacgtgtactacaatgaagcaagtggaggacgctatgttcctcgagctgtgcttatggaccttgaaccagggaccatggatagcttgcgttctggtccttttggaaaaatattcagacctgataatttcgtgttcggccaaaatggagctggtaacaactgggctaaagggcattatactgagggagctgagcttattgattctgttcttgatgttgttcgaaaagaagctgagaactgtgactgcttgcaggggttccaaatttgtcactcactgggaggaggaactgggtctggaatgggtaccttgcttatctcaaagatcagagaagagtatccggataggatgatgttgacattctcagtgttcccgtctccaaaggtctctgacaccgtggttgaaccctacaatgccactctctctgttcatcaactagttgagaatgcggatgaatgcatggtccttgataacgaggcactctatgatatctgtttccgtacactcaagctcacaaatccaagttttggtgatctgaaccacttgatctcaacaacaatgagcggggtaacgtgctgcctccgcttccccgggcagctgaactccgacctccgcaaactcgccgtaaacctaatccctttccctcgcctccacttcttcatggtcggtttcgcgcccctcacatcccgcggctcccagcagtaccgctccctcaccatcccggaactcacccagcaaatgtgggacgcgcggaacatgatgtgcgccgccgatcctcggcacggcaggtacctgacggcgtccgccatgttccgcggcaagatgagcaccaaagaagtggaccagcagatgatcaacgtgcagaacaagaactcctcctacttcgtggagtggatccccaacaacgtcaagtccagcgtctgtgacatccctcccacgggcctctccatgtcctccaccttcatggggaactccacctccattcaggagatgtttcgccgcgtctccgagcagttcactgtcatgttcaagagaaaagccttcttgcattggtacactgccgagggaatggatgagatggagtttaccgaggctgagagcaacatgaatgacttggtggcagagtatcaacagtatcaagacgccgccgccagcgaagaaggcgagaacgagatcgatgacgaggaagccatggctgcatgagagcctcattaaagcctctccggaagaaattattatataatctagattaccacgtcatcatggtcgactcaattttcactgttacattaatcaaaatttttaatatacaataacaaattttgattagatgcaatgtgaagattgatcaaaattattactatttaatgatttctagtgatgtcatgagaaatgcaaatcaaaacacttggtatatgccatatggtgatggtaagggaaaggaaaggaaaggatgtgtttgtatagttaatgctaggtacatatgagatgtggggtgagtagtattttttacggattttgttttgatatttttctttcttattggcttcgttgtgggttttgtttgttattgttaatgctattatttcatggcgtttgttttgtaaaaaaaaaaaaaaaaaaaaaa

SEQ ID NO: 7109 - DNA, 1195 bp, Glycine max
tcagctacgtaggcccccccccaaaccaaaccaacaagctaagagaatacaccaaaacccaacatgaaaacccttaacaaagcctcacttattttattccctctcttgttcctttccctattcaagcattcccatgctgcaggaatcgctatctactggggccaaaacggtggagaaggcaccttagcagaagcttgcaacactagaaactaccaatatgtgaacatagccttcttgtccacttttggcaacggccaaactccacaactcaaccttgcaggtcattgtgaccccaacaacaatggctgcactgggttgagcagtgacatcaaaacttgccaagaccttggcatcaaagtgttgctctcccttggtggtggtgctggaagctactccctcagctcagctgatgatgccactcaacttgcaaactacctctggcagaatttccttggaggtcaaaccggatcagggccattaggtaatgttatattggatggcattgactttgacattgaatctggtgggagtgaccattatgatgacctagccagggcattaaatagcttcagctcacaaaggaaggtgtacttgtctgcagccccacagtgcataatccctgatgctcacttggatagagccatccaaactgggctttttgactatgtgtgggttcaattctacaacaacccttcatgccaatactccagtggaaacaccaacaatttgatcaattcatggaaccaatggatcacagtgccagcttctcaaatcttcatggggcttcctgcatctgaggcagctgctccaagtggtggctttgtgccctctgatgtgttgacttctcaggttcttcctgtgattaaacagtcttcaaagtatggtggagtcatgctctggaacagattcaatgatgtccaaaatggttatagtaatgctattattggaagtgtttaatcatgttatagacttatagaaaaactatgtcattaattccattatttaaataatactaatcaccgctcgtgattggtttttctactatatatatattcaatgtgctttgaacgctactatatatattcaatgtgttttgaacgctacatatgtttattgtaatatgtcacctacaagttacatatggtataattaccaaaataataaatagttcattgcgaaaaaaaaaaaaaaaaaa

SEQ ID NO: 7110 - DNA, 1143 bp, Glycine max
  misc_feature (1088)..(1088): n is a, c, g, or t
aagattatggataataagagcaggaacaaagtaatggttttggaagcagaagaagaagttggcggtggtgagtttgagcatctccctgaaggttgcatagcgaatatagtttcgttcaccactcctccagatgcctgcgttctctctttggtctcttcctccttcagatctgcctcagtaaccgacttcgtatgggaaaggttcctcccctccgattatcaggctatcatttcccaatcttccaagccctccactctcaccaattactcttccaagaaggacctctacctccacctatgccataaccccctcctcatagacgctggtaaaaagagctttgcactcgataaactgaacggcaaaatatgctacatgctctcagcccgaagtctctcaattgtttggggagacactcccaggtattggagatggacttctgttccagcggccaggttttcggaggtggcggaacttgttagtgtgtgttggttggaaataaaaggtggaatcaaaagtggcacgttgtctgaaaaaacattgtacggggcatacctagtgtttaagcaaaggagcgggggtgcgtacgggttctataaccagccggttgaggtgtcggttgagggtcggaggagaacggtatacttggaagaagcggagacaccgcggaggccacgtgagcagatagttcctgggatattcagccgcgttcgttctcgttttctggatagtttcgatgcagcaccgccgcctccaccgcctaatgctaaggggggaggtgaatatccgaaggagagaagcgatgggtggatggaggtggaattgggtgacttcttcaacgtcggcggagagaaggagaaggagaaggaggtggagattggagtctacgaggtcaagagtggtgggtggaaagcgggcattctcgttcaaggaatcgaaataaggcccaaacacaaaaattaaaaagcatgcacaatttacaatgttgtttcttctcttttttttttttttttttttgcttgttctaccaattaaattttttatataaccacgctcactcgcctgctctaaataaaaaaaaaaaaaaaacnttcatttttttattgttagtcttaaattgattttataaaatgctagtagttattc

SEQ ID NO: 7111 - DNA, 1275 bp, Glycine max
gaattcggctcgaggtcacaacttcagtgctatggtgaatcagtgtattgcacaggttcggacttgctaagcatgtgcaacaatggtcagagtccacttgataggttcatatctgtggtagcatggtgcatatctaccactcgccctgtgacttttggtgttgctccttataatcccattctccctcgcgcccgccgtcgcgcggggggaaatcttaatgtgttattggagcagatttcacatcaccctccagtaactgctctccatgcaacagatgagaaggaaaacattgaaatgttatggtgccagcgacctgatccaaagtttaatggcacatcagttgaagctaaagtgcatggaatacgccagttgaagctcctaaatcatggtgaaacatatgaaatgaattgtcctcgccttttacttagaattcttccagttcctggtgctgattgggctggtacagttaatatacggtgcctagagaaaggtctagtagctgaattatcctacagatcaagttcttttctaggaattggggggaatcatagagtgatcaaagggaagatccttgactcttcatcattgaaagttctatatgaagttgatggtcattgggataggaccgtaaaagtgaaggacacaaataatgggaaagtaagagtgatatatgatgcaaaggaagttatgtcaggtctcgaaactcctatactcaaggacatagagggtgtgtggcaaacagaatcagctcatgtttggggtgaattaaaccaagccattgtgagcaaagactgggagaaagcaagagaagcaaagctaaaagttgaggaaagacaaagggagcttgtgagagaaagaaaatcaaaaggagaaacatggatttctaagcattttgtagtttctaacaacaaagaagggtggcaatgttcacctattcataagagtgtacctgcggcccccatcacagccctataattgttgtcactgtcaagtagtgtaaagcattaaagtacattttagaagagaatgttcataaaaaaatttaatggttgaaattttgacaacaatgaagtatataacaaaatttaaaattagttacaattttaatcgttgatttaaaaaaagggcgcccgccgaggacaaaaatccaggtaaatgtcaaaagtatccttagatttgacatgcgtaaaaaaataacaagaatcagatatgtaaatttcttatctagacaatatatatatatatatatatatatatatatatatatatatatat

SEQ ID NO: 7112 - DNA, 1343 bp, Glycine max
gatcagcaacttacggctgcgagaagacgacagaaggggggcaccgatacacacatacatcaccaactgatatataatactagatttcttgcagtctattattagagagaagaattgagttggaagaacccagaaaaagaaacaaaaaataaataaaacgatgtggtggccattcagcagaataggatcttctgggttttcatcatattctactgccgaggaagttactcatggaatcgatggaagtggtctcactgctattgttacaggagcatctagtggtcttggtgctgagactgctcgtgtccttgctttgcgtggtgtccatgtgattatgggggtgatagatatgattggtgcaaaaactatcaaggaagcaatacttaaggagattcccatagctaaagttgatgtcatggagttagatcttagctctatgacatctattcggaattttgcatcaaatttcaattcatctggtctttcattgaatattttgataaacaatgcagggatttgtgcagctccttttgcactatccaaggataacattgaacttcaatttgccataaattacttaggccactttcttttaacaaatatgttgttggatactatgaagaaagcaacaagtgaaagtaagaaacaaggaagaattattaatgtctcctcaattggttatcgattcacgtatcgtgaaggaatcatttttgacaaaattaacgaccaatcaagttacaacaattggtgtgcatatggccaatcaaagcttgctaacattttacatgccaatgaactcgcaagacgtctcaaggaagatggaatagatattactgctaattctgttcatccaggagccactgtttccaccaatattcacattcatagtggtttattaaatggtttacacaaaatagcatggctatttggactcgagaagatattgggatatatggcaaaaaatgtgcagcaaggagcatcaacaacatgttatgtagccttgcacccacaagtgagtggaatcagcggcaagtattttgaagataataatcttgcagaagtatactcacatggaagggacatgaatttggccaagaagttgtgggattttagcataaatttgactaagtaaaatgcataatgataattgtcaatgtaaatggaatactgtattagagaataaaaatgccaatgatcatattgtgactgttattaagttaatctatatgatgttactatttttaagagagttgtgttgttcaagctagtctacaatttagtggctctagtacaagcacggaatttcctttatgtgaaatacttggaacatatactttcaaaca

SEQ ID NO: 7113 - DNA, 1099 bp, Glycine max
cgattgggtaccgggccccccctcgcctcagctacgtaagccccccccccagtgtatatattttggctgaatcattaaaatctcttctgaaagagttgtaccttgatgattgccaaggcattgatgctgcactaattgtgccagcactaattgagcttgaacatttagaagtgttgtcagtagctggcattcaaacggtttgtgatgaatttgtcaagaactacattgttgctcgtggacaaaacatgaaagagcttgttttgaaggactgtataaacttgactgatgcatcaatcaaagccattgttgagcactgtccaggattatgtgtgcttgatcttatgaacctgcacaaattaacagatttatctataggacatcttgcaaatggttgtcgtgcacttcatacactgaaactttgccgtaacccattcagtgatgaagcaattgctgcatttgtggagaccaccggagggtccttaaaagaattgtcacttaacaacattaagaaggttggttaccacacaaccttatcacttgcaaaccatgcaaaaaatttgcattctctagatctatcttggtgcagaaatttgacagacaatgcactgggtttgattgtggatagctgtttggcactgaggtcacttaaactttttggatgcagtcaggtaacagatgcttttctcaatggccactcaaaccttcagatccagataattggtttgaaaatgtctcctgtgttggaacatgtcaaagtgccagatcctcatcaaggtgctttgaattattcatcagtctccgtagatttggtataaattaggatcggaatctaaatttgtagcggcattttgcataactatgtctacgaagatatttccagtaatcccagatcagacgaaaaccttctctgctaacatggcctttaattggaaggggttttgactgttgtctgagttgcccgttctgtgatgcctgttgaaggaatcttaactgtattacattttcctttacaaacattaatatatgtactaactatttttcagccttaatataaaaagaaaatatatccagccttactattttatcaaaaaaaaaaaaa

SEQ ID NO: 7114 - DNA, 4438 bp, Glycine max
gacaacacaactgtctccattcccgcactaaccgacgcgcgccgccgccgccgccgccgccgtaacctcaatctccgaacaactcacttgcttcaaatttcaattcctgtctctccgcgcttatcttctactacattccaactgttagtaaaatagggtttgcttcggttagggtttcttcctcagatggataacgcccgatcagcgaacggcgaggagaatgcggcgggaatcccggacgatttgcggtgcaagaggtccgacgggaagcagtggcggtgcacggcgatgtcgatgccggacaagaccgtctgcgagaagcactacatccaggcaaagaagcgcgccgcgaattccgctatgagagcgaatctcaagaaagcgaagaggaagtcgcagtcgctgtcgctgaacgagtccgataatgtttatatggagagcaagagcgacgatttcgatgttcctctctcctccattggcctctctcagaagaagctctccaagaaccagttccgctacgagccggagcgcgacgcgccgcgaagaggctcgtccgcgagacgctcttcgaacctcaacgacgatgatgatgatgacgatgacgacgacgtggatggggatgcggatgctgatgtggcgctctatgaggaagagaattgggtctcctgtgactcgccgccggattcttcgcgcaagaggtcgcggaggagcttggaagctaatgctaccactgaatattcggacggaacctccgccggttcttccgacgaggacaccggcgggcagacttgtcaccagtgccggaggaatgaccgcgaccgagttacttggtgtcaacggtgtgataggaggggatattgtgatagctgtttatcaacatggtactcggacatttcattggatgaaattcagaggatatgtcctgcttgccggggtatatgtaattgcaagacttgtttgcgaagtgataattcaattaaggttcggatacgcgagatacctgttctagataagttacagtatctccatgtgctgctgtcgtctgtgctacctgtggtaaagcagatccactgtgaacagagttttgaagttgaacttgaaaagaagttgcgtggtgctgaaatagatcttccaaggataaaattgaactcagatgagcagatgtgctgcaatttctgtaggatacctattactgattatcatcgacgctgtccaagttgttcatatgatttgtgccttagttgctgtcgagatcttcgagaagcaactgcagatcacaataaagaaccccaaacagagcaagcaaaaacttctgatcgaaatatattaagtaaatttcctcattggagatccaatgacaatggaagtattccatgtccccctaaggagtgtggtggctgtggttattcttcactaaatttaagccggattttcaagatgaactgggttgcaaagttggtgaaaaatgtagaggaaatggttagtggctgcagaattagtaatgccgatggtccaccggaaaccgggctgaatgatctgaaactttgccaatattctcacagagaagccagtgatgataattatctttattgcccagcatccgacgatatcaaaactgatgggattgacaattttagaaagcattggaaaactggtgagcccattattgttaagcaagtatttgatgggtcatccatttcaagctgggatccaatggtcatatggagagggattctagagacaatagatgagaaagcgaaagatgaaaaccggatggttaaggccatagattgcttagatgggtctgagattgatattgagcttgctcagttcatgaaaggatactttgaagggcttattcttgaaaatggttggccacagttattgaaattgaaagattggccttcacctagtgcttctgaagaatttctgttgtaccaaagacctgagtttatcagcaaactacctttacttcagtatattcactccaagtggggccttctcaatgttgcagctaaattgcctcattactccttgcagaatgatgtaggacccaagatatatatatcttatgggattagtgatgaacttggtagaggtgattcagtgacaaatctccacttcaatatgcgtgacatggtgtaccttttggttcatacaaatgaagtaaagctgaaggactggcagagaactaaaattgaaatgatgcaaaaagctaaagctaataaggaatttgaggcaaaagaatcacatggggatcctcaaatatcttcaagggggagttcacctgattcctcacttggtacaaaaagtagtggactggaaatagactcaaaccagaataagtcaattatggatcaagggtttgaaatttattctagtgctgaaggtaatacggccaattgtaaacttccattcaatcaaaatggagacgtctctgagaaaacacatcctggagttctttgggatgtttttcgtcggcaggatgttccaatattgactaaatatttgaaaatacattggaaggaatttgggaagtcagatgatcttggaaatgaatttgttgaatggcctctttatgatggagctatttttcttgacaaacaccataaaagaaagttgaaggaagaatttggagtggagccttggtcatttgaacagaatttgggggaagctatttttgttcctgctggttgccctttccaagcaaggaatgttcagtccaatgttcagttaggccttgatttcttatctccggaaagcgtgggtgatgctgtaagattggcagaggaaattcgctgtgtacctaatgaacatgaagcaaagcttcaagttttggaggttgggaagatctccctttatgcagcaagttcagccatcaaagaagttcaaaaacttgtacttgacccaaaacttggcgcccagatcggttatggagatcctaatttgactgcaatggtttccgagaattatgagaagatggttaagcggaggcagattacttgtgcttgaacttccacactcggtcattgaatccggaaagaggggggattgtgtacattagttgtatttgagcaatattttatgggttggtattttcagtgtagttttgatcaaatacctaggtaatcatttaaatgtgtataatagttacgttagagaatcatgtaatgaccaacttcaaatctgattttatttcaaaatgtggaaaagaaacaatgtaatatatacaaagctaaaaatttgtgtctgtttttttttaagttaagaaatgcttgtgaccttatttttcattgaaatggtaacagacgcacccaaaaaattgaaattggttcggtttagaggacattctctagccatgcaattcaaaaacatagcttcggaaaccaaggagttacaaggtcgacctaagagaagccttttttttgggtcttggcttgtgaccttatttggcaatgaagcttcgttttgaaccacttaaattgtgaggctaaatgaattagcaatcctatagaattctgacttcaatcctggccactctgattcaggtgcctgagcatttaatgtaaaaagcctgccatcacgagcgcagcaaacggaaacgttgtgtcgcctaaacgagggactctcaactctgaactccagttcgtagtatttgacatttgtaacggaatcctctctcaaacttgattttattaatgtccccttaacgtcagggcgttgccctgatcctgttatgcttcgaaccactgcttcacccacctcatctggccccccaaatgcttcaatcgagaattctggagcaacagatgaaacaatgacactaacattgagttctccagtggaaccgggaggaccaaatgcaacaaccggttcattgatgttagaacgccgccgttcattcagcggaggaggatccaatgatcgttccatctctcttttcttagcagctcgatacagcagcgtctgatctcccacccaatttgctgggtatatgaattcgaatccttcctttgtgtcaacgcagcggctgtaacctccaatgggataaagcacgtccagcttgagattacgcccactttgtggcgacaaaccgagaagaaaactggtgatgccaccaaagtttgcacccacagccactagtgaagctgacccaacccccacaagaagccgcctctgaaatttggtggctaatggtgcaaattcctccgccggaggccgccctccatcgtcacgatcaccggaacattgtggtattcgaattgggttgcatgcccctaacctggcttgcactgccatacccatgtgctgttctcgcggagagggcccccgtcggtcctgttatatggatgcaaaatttaatttacgtcttccttttggttccaatcacgagaagggatgcaatccaagtccgagacacaataatctagtggtggat

SEQ ID NO: 7115 - DNA, 1294 bp, Glycine max
tcagctacgtaggcaaacagcaacgagcaaacaaaagaagcaatgatgatgaatgtcatagggctgagtctgagtctggtgttaacttcactggcagcagcgagcaccatcgtcaaagaagggcacagagttgtcgtggttgaatacgaccaaggtggccatcagaacaccaaaatctcaatatcaccagaacaacctacgcatgctaatcttaaagatcccatttgcgacgcctatggaaaatgcaagcacaaaatcgtggatgcaatggagaagtctcaagaggtcatccatgagaagaaggacgagattgccgccaacaaggaggcagcacgccaagttgctggtaaaaccaaagagagagtgtatgataaagcccgtcatgtccacgaatacgcccaaaacactgtagaaacagccaagaaccatattgcctgtaacgtgtcaaacgccaaagatgcattcaagcgtctaatagcaggatctttggagaggcagagccttaattctttgatgggggtggctaacatgttggggttttccacggcttatgggatgtgtgtgtgggttacgttcatctccagctatgtgcagtccagggctatggcaaggcaacaatttgcagtggtgcagagtaaaatatatcctgtttatttcagggccatgtcttatagcatcggggtcgctttattcgcccatgtcttggcccatagaaacaccttgctctccaacaagtctgacttattgcaagcatataatcttctggcctcccttgtcacacttttcttcaattctctttacttggagcctcgggccaccaagttgatgttcgagaggataaagatagaaaaagaggaaggaagaggcagatcagaagatgtgagtagcagaactaaagagccagcttccacgaccgcagaccaggatgcagtcagaacaaggataatcaagctcaatgacaagctcaagaaactcaattcctactcctcattcctcaatatcctcaatctcatgtctcttacttggcatctcgtttatttggctcaacgacttccccatatttgctaaaccaaatactacgttccttttgtcttttctactaatcacttgttttctgtgtttcttttctgtttctatcatgtttgttgatatttgcaaatacttcagtctctagatttttgtatcttttagctttgggaacaatacagtgtttaccactccctgtatttaatttgtgttaagtgtaaaactcttgttactttgctttaaccaaaaaaaaaaaaacccttaaaaa

SEQ ID NO: 7116 - DNA, 2730 bp, Glycine max
cggaattcccggggctccccccgccccggaagaaagcagcgattttgaagtctctccaaaccattatggttgtcttcctgctgatagtactctttagcagcaacaccaaagcagaaaaagaaacaatccacgaccatgcaaacaaaaagacctacataatccacatggacgagaccaccatgcccttaaccttcaccgaccacctcagctggttcgacgcctccctcaaatcagcgtccccctccgcggagattctctacacttacaaacacgtggcccatggcttctccgccagactcactcccaaggacgtagacacacttgcaaaacaacccggcatcctctccgtcatccccgaactcaaatacaaactccacaccacaagaactcccaacttccttggacttgacaaagccaccaccttgttacccgcctcggagcaacagagccaggtggtcattggactcctcgacaccggcgtctggcccgagctcaaaagcctcgacgacacgggcctcggcccggtcccttccacctggaaaggccagtgcgaaattggaaacaacatgaactcttccaactgtaacagaaaacttgtcggagcgaggtttttctccaaaggctacgaagccgcacttggacccattgacacaactacagagtcaaagtcagcgcgtgacgatgacgggcatgggagtcatactttaaccaccgcggcaggctcggttgtacccgaagctagcctcttcggcttggcgtcgggtacggcgcgtggaatggccacgcaagcgcgtgtggcggtttacaaagtgtgctggctcggcgggtgttttacttccgacatagccgcgggaatcgacaaggccatagaagacggcgtgaatgttctgtccatgtccattgggggaagcttgatggagtattacagggatataatagcgattggatccttcactgccatgtcacacgggattctggtgtccacgtcagcggggaacggtgggcccagtcagggaagtttgtccaacgtggcaccgtggataacaactgtgggagcgggaactatcgaccgcgatttccctgcttacataaccctcggaacagggaaaacatacaccggagcttctctttatagcggtaaacccttgtcggattcgccgcttcctcttgtttacgctgggaacgcgagtaactcttctgtagggtatctatgtttgcaagattctctgattcctgagaaagtttcagggaaaattgttatatgtgagagaggtgggaatccgagagtggaaaagggtttggtggttaagcttgctggaggtgctggaatgatattggcgaatagtgaagcttacggagaagagttagttgctgactctcatcttcttcctgctgcgtctttgggacaaaaatcaagcgagattttgaagaactatgtttcatcttcacctaatccaacagctaagattgctttcttagggacccatttgcaggttcaaccttctcctgttgtagcggcttttagctccagaggaccaaatgcactcaccccaaagattctcaaaccggatctaatagcaccaggagtcaacattttagccggttggaccggtgcggttggaccaactgggttgactgttgacacccgccatgtcagcttcaacataatttctggaacatccatgtcatgccctcatgtaagtggcttagccgcaattctcaaaggagcacaccctcagtggagccctgccgccatcaggtccgcactcatgacaacagcgtacacgagttataaaaacggtgaaacgattcaagatatttcaacaggacaacctgggacgccgtttgattacggtgccggacacgtcgatcccgtggccgctcttgatcctggtctcgtctacgatgccaacgtggacgattacttagggtttttctgcgcactaaactactcgtcatttcaaatcaagcttgctgcgaggagggactatacgtgtgacccgaagaaggattacagagtggaggattttaattatccttcttttgcggttcctatggatacagcttcggggattgggggaggttccgatactctgaagaccgtgaagtactctagggttttgactaacgtgggagctccgggaacgtacaaagcttcggtgatgtcgttgggggattcgaatgtgaagactgtggtggaaccgaatacgttgagtttcacggaattgtacgagaagaaggactatacggtgtcgtttacatacacttcgatgccgtctgggacgaccagcttcgcacgtttggaatggacggatgggaagcataaggttggtagtccaattgcgttcagctggacatgatgggctgtggaaaatgtatgacccaaataaaagggcccactcaagtgttgtaggctcttcgtggtttgcttttgggcccggcccgatacggcttgtttttattatgtatctcacttattcactttgctgtttttattccgtaggctgaagttcaggagaaaactttatatatggaataataacaataattgtacatagaaaaagataatggtcgcatctgtatgtatgtatcataatggctttgaatctgaattatccatatcttcccagctttgcatcttttagtctttacttgttctatcattttcatgtggcaggcggcattctaaaattaatagtattttatcccatgtggatatcaattatattt

SEQ ID NO: 7117 - DNA, 473 bp, Glycine max
gtatgcacaaaacccagtgaaggatcgcgaacctggtttatgggttgaagtttggttcagcattcgtgggggaagataagagaactcacaccatatccgttctcgctcctctacgaattttcatatccattcatatttttctcatcatggacttggccgcgaagcttcaccgtttagacctcaccggcgtggtcattttggacgcacgaaagccctccgtactccgccaccttccgccacgcatcctcaccaaaacaaacaccaatttaatctacacgaaccggttctcgggcccatcgaggcccaattccgcttcctcttccacgataaccgttgaggacgacatcgagtctctcttctccgagacgaattcggaggaggagaggcgctcgaggaagcaaccgagcagtggcgcgtcggggatttcctctggagtgaagctcgagaacgtggggaaagcctacaagggcgtg

SEQ ID NO: 7118 - DNA, 1102 bp, Glycine max
ggctcgagcaaaattacaaaacccagtgaaggaagcgcaaaattttccaacagttggcgaaactggtttatgggttgaagtctggttcaggatttgtgggggaagagaagagcactcacaccatatccattatcaatggacttggccgcgaagcttcaccacttagacctgaccggcgtggtcattttggacgcccgaaagccctccgcactccgccaccttccgccacgcgttctcagcagaacaaacaccaacaccaatttgatttacacgaaccggttctcgggcccaccgaggcccaattccgcttcctcaacgggcctgtccatgataaccgtcgaggacgatatcgagtctcttttctccgagacgaactcggaggaggagcggcgcgtgaggaagcaacctagcattggggcgtcggggatttcctccggggtgaagctcgaaaacgtggggaaagcctacaagggcgtgacggtgctgaaggacgtgagctgggaggtgaagaagggggagaaggtgggcctggtcggcgtgaacggcgccgggaagacgacgcagatgaggataatcgcgggccttgaggagccggatttcgggaacgtggtgaaggcgaaggcgaacatgaaaatcgcgtttctgaaccaggagttcgaggtggcgccgagcaggacggtgagggaggagttcatgaacgcattcaaggaggagatggaggtggcagggaagctggagaaggtgcagaaggcgctcgagggtgccgttaatgatttggagctcatggggaggctcttggatgagttcgatttgcttcagaggagggcgcagaatgtgaacttggatgaggttgatgccaagattagtaagttgatgcctgagcttggttttgctcctgaggattctgataggctggtcgcgtctttcagtggaggctggcagatgaggatgtgtctcggcaagattctacttcaggtgcctgattgcttcctgttggattgtcctgaatcatcttgaaatatcagctaatgttatttcaagtaaatgttcacatgtttgttttcatgttgaggaattacttcaattgattttgagttgagct

SEQ ID NO: 7119 - DNA, 1842 bp, Glycine max
gacgacgcagatgaggataatcgcgggccttgaggagccggatttcgggaacgtggtgaaggcgaaggcgaacatgaaaatcgcgtttctgaaccaggagttcgaggtggcgccgagcaggacggtgagggaggagttcatgaacgcattcaaggaggagatggaggtggcagggaagctggagaaggtgcagaaggcgctcgagggtgccgttaatgatttggagctcatggggaggctcttggatgagttcgatttgcttcagaggagggcgcagaatgtgaacttggatgaggttgatgccaagattagtaagttgatgcctgagcttggttttgctcctgaggattctgataggctggtcgcgtctttcagtggaggctggcagatgaggatgtgtctcggcaagattctacttcaggagcctgatttgttgctgttagatgagcctacaaatcaccttgatcttgacaccattgagtggcttgaagactatcttaaccagcaggatgttccaatggttatcatatcccatgatcgagcttttcttgatcagctgtgtacaaaaattgtggaaactgacatgggtgtgtccaggacgtttgaggggaattactctcagtatgtaatttcaaaagcagcatggattgaagcacagtatgctgcatgggagaagcagcagaaagaaattgagcagacaagagacttgataagtagattaggtgctggagcaaattctggccgtgcttcttctgctgagaagaagctggagagacttcaggaagaggaactagtggagaagccttttgaacggaaacaaatgaaaatcaggttccctgagcgtggaaggagtggaagatctgttgtagcaattaataacttggaatttggctttgaggataagacacttttcaaaaaggcaaatcttacaattgaaaggggagaaaaaattgccattattggtccaaatggatgtggcaagagtactttactgaaattgattatgggtttggaaaagccaaccgggggtgaagttttgctcggggagcataatgtgttacctaactattttgagcagaatcaggctgaggcacttgatctggaaaaaaccgtgcttgagacagtagaggaagctgcagaggactggaggattgatgatattaaagggcttcttgggcgttgtaattttaaagctgatatgcttgaccgaaaagtttcactattgagtggtggtgagaaggcacggctggccttttgcaaattcatggtaaagccatcaactatgcttgtgttggatgaaccaaccaatcacttggatataccttctaaagaaatgctcgaggaagcaataaatgaataccagggcactgttatcacagtatctcatgaccgatactttataaagcaaatagttaatagagtgatagaaattaaagatggcaccatacaggattatgcaggtgattacgattattatttagagaagaattttgatgctagggaaagagaacttgaacgcgaggctgagcttgatagcaaagctcctaaagtgaaagccaaatctaagatgtccaaggctgagaaagaggcacggaagaaacaaaagatgcaggcctttcaggcagcaaaacagaagtccaaaggcgtgaaaaatgccaagagatggaattgagtgaaccatttcattgttacactaatttaccgccagaaggtgatgtagctagcatattgggttaagctacacagcctttgtataatcatgtatctattcactaactcatttacggaaatataaaaggatgattacaccatatgtgattctcaaaaactcgagactagttc

SEQ ID NO: 7120 - DNA, 1228 bp, Glycine max
  misc_feature (1071)..(1075): n is a, c, g, or t
  misc_feature (1082)..(1090): n is a, c, g, or t
  misc_feature (1113)..(1113): n is a, c, g, or t
  misc_feature (1118)..(1124): n is a, c, g, or t
  misc_feature (1158)..(1158): n is a, c, g, or t
  misc_feature (1166)..(1166): n is a, c, g, or t
  misc_feature (1193)..(1197): n is a, c, g, or t
  misc_feature (1220)..(1220): n is a, c, g, or t
tttaaaagaaatggcaccgttgcagtggtaatattgtggttctgggaaagcgtagattacatagtgatagtagcggcgggcgaaggtttgatactgagtgtttgagaatggcatcatcgaaggtaatgtgtaggttgtcgtgtcggatacagagtgttgttgctcataatcataacaagttcaccaaaccctcaccactctctcctctttctctctctctctctgcgcgacgcctttctcgcacttcccggttaccagtggaattgggaagcttggaatcaatgatgccgttgcatagcgcggtagcttcagctcgattagtgtcaagcttgtctattgagtctctgggttggggattagttcctcaaggtatttccatgcctttatgacagcatttgtctgcagttagttgctgaaaggtagcattttcattggatggcaggctcatgttgatgttttcatttgttgtaatcttgaggccactggcatagaatccttcatctgacatatttgaggaacatgccgtgcaactgatgttgcttacgtattgtttggttcattttatcgtcatatatttctggaataacatttttggtttttccagtctggatgaattttctgtcaactaataatgcattaaagtgcattatatctgaggatttaatccatttactcgttaatgtttccatttttactacagttctatggttttataactataagtcattgcctaaccaggtatgatatagtagtgtagaggggtctagcaaatgggaaatgagactcgcatataaaagttggactcacccgataacatttctcatgtaggaaagagagggctaaagagtggattgctaagatttctcgtgtagtgtgtgattctgcatccttggttggacagatgacatgggtggaatgggaacaaaatagatggttcatggttgctttagaacatgctaaatcattacctgctgctgttgattacctacccttttgtttctacatgttgtaatcttgtaacaattccattttgcttttgttttaatgatttcctacaatggtctgattggnnnnnatcgcannnnnnnnnttgtggatttagttgaatcctgngtttnnnnnnnttatatagcattttattgcaaggtgtactagttntcactcanattttattgctatgacccaagaaaggnnnnnctgttgagtggctttgaacctgnttcatctc

SEQ ID NO: 7121 - DNA, 685 bp, Glycine max
  misc_feature (666)..(669): n is a, c, g, or t
  misc_feature (671)..(673): n is a, c, g, or t
  misc_feature (675)..(681): n is a, c, g, or t
ccgggaatatgtggtcctgggcccgcgcctccgtacggctgcgagcggccggcggagggttaatactgagaagaagaatggcaatggcatcattgaaggtaatgtgtaggttttcgtgtcggttacagagtgttattgctcataaccataacaagttcaccaaaccctctctctctcctctttctctctctgcgccatgcctttctcgcacttcccggttaccagtggaattgggatgcttggaatcaatgatgccgtttcatagcgttgtagcttcagctcgattagtgtcaagcttgtctattgagtctctcggttggggattagttcctcaaggtatttccatgcctttatgacagcatttgtctgcagttagttgctgcaaggtagcattttcatcggatggcaggctcatgttgatgttttcatcaattgtaatcttgagaccactgacataggatccttcatctgacatatttgaggaacattcagtgcaattgatgttgcttacataatgtttggttcattttatcttcctatatttctggaatatcattttttggtttttccagtctggatgattttcttgtcaactaataatgcattaaagtgcattatactgaggatttaatccatttactagttaacgtttccatcattagtaannnnannnannnnnnnaaaa

SEQ ID NO: 7122 - DNA, 2883 bp, Glycine max
tcagctacgtaggccccccccccccaaaaggcatagaattgaattccagagagagtcatgaaaacaagcactactacaactacaaccatattagccatagccacctcttacttgtttcttctgatcacgccaacccaaaaatccacgtaccactctctcttcatatccgattccctatcagacaatgcctccatatacaaccaccttaaaactctcacccgcagaccccatgtcgcaggttccaaagccaacgctgaagctgcctcatacgttgtctcagtcttcacctcctcatacataccatcacacatagtttcctacgaggtttctctcacgtaccctttgtcacgttcgttggttctaataacgaacccttctacaaccttcactctccaccaagaaacctacgagggtgatccttatgctgacgtggcagatgaggttgtccccactttccacgcgtatgccaagtcaggcactgtggctgctcctgtgtgttatgtgaactatggaagagtggaggactatttgactctgaaggataaaaatggtgtgaatgtttcaggcactgttgtgttggcaaggcatgggaagatatatagaggggacattgtgaagaatgcttatgaggaaggtgctgttggggtggtgatatattcagataggaaggactatggtggtgaggaaaagtggtttcctgatgagaagtggttgccaccaagtggggttcaggtggggacagtgtatggtgggttaggggaccccacaactcctggttgggcaagtagtagtagtggtgatggagagtgtgagaggttgaacaaggatgaggtggagaagggaggtgatgttcctctcataccttcattgcctgtgtcagctgctgatggggagaagataatgaggtcaattggtggaccagttgctgaggatgattggcagggaagcaaggatgcccctatttacaggcttggaccaggaccaggaattctcaaccttagttacaaggggcaggatgttatagccacaattcaaaatgttattggtgtgattgaaggggcagaagagcctgaccgatttgtcatactaggtaaccatagggatgcatggacatttggagcggttgatcccaatagtggcactgcagcactgcttgaggtggctcaaaggctagggaagcttcagaaaaaagggtggagacctagaagaacaattttattatgtaattgggatgctgaggaatatggccttataggatcaactgaatgggtagaagagaacagagaaattcttgcttcaaaggcagttgcttacttgaatgctgattgtgtagtaggtggaccagggttcaatgtccgtgccactccacagttagatgaattgatcaaaagagcaactcaggaggtcaaagaccctgataactcatcacagagcatttatgaatcttggactagttctggtagttctcctctgtttgggaggttaggaggtggaggatcagactatgcatctttcttgcagcatgtgggaatcccggctgctgacatagcctttggaggagatgttgcaggatacccggtataccactcactctatgatgacttcgtctggatggaaaaattcggcgatcctatgtttcaaaggcatgttgcagctgcaagtgtttggggtctggtagcactttggttagcagatgaggaattcctaccttttgattatctatcttatgccaaggagctccagcttagcgtggagaatctggaggatgagatttcaaataaagacataaatttgtcacctatattcaagtccatcaaggggcttgagaaagcagcaatcaagatagatagccagagaaaggaaatagaagctggtaaaggttggataacagggaagaaggaccacttgagagtgagagagctgaatgatagattgatgatggctgagcgtgcattcactgacagagatggcctctttggaatgtcatggtataagcatttgatttatggaccatcaaaacataatgactacggctctcaatctttccctggaatcgatgatgctgttaaaatggccaaaaatctacatactgcagaatcgtggcatcgtgtacagcacgaagtttggagagtctcaagagtcatcaaacaagcctcgctagttttattcggtctactatcatgaatatcaatttagttgtatatttcgattcatggtaaattatatctccgtaagaataaatatgtatatatgtgtgatgattcataaatctcaataactcaagaagagatttaggattttgtttttccccgcttctctcatctgtcaaattcacttcgcaattcgaataacaagttgcaaaatatatttttttcatgcatggtacagaggctgccatagttctgtaataagaagccaacacgtaaatccctgatccgaattagatcgtttttattgtgtttgtaaatattacgtttctttatgaaccttgtcatgaaatgtccctatcatcacttttgcacaatgcttgcgtatatttcctaaacatctctgatgattggtggaaactgaaccagaacctcgcacccaagaaagtaacaagcacggaattttcatccatggtctgaacactaattcattttttattcctacttcctatccctatcattaagcacatatttggatttctgtccaacttgttattgcataaattcccagacaaatccaatgatccaacgcaaaattaaggagtagacgctatttcaaacatccttttctatcaacatctgtttgaaacggatacaaaaacatgttctaatacattatacattttaaaggggaaatgatttaaatacaaaattctgttttttggttgggtcaaaa

SEQ ID NO: 7123 - DNA, 1463 bp, Glycine max
aaaaaaataaaataaaaaccatcagctacgtaggcccccccccctgagtgagagagagaacaaaaaataaaaatggtgatgcttcatcccctcacaaaccccaacccaaacgagcttctctcactctcatgctcttctatattccaccacaatgcattcacaacttccgtttccttcaagcccagaacaacaaaaattgctcctcaacgcctaagtcgtcgtttcggttcggtgagatgctcctacgcttacgtagataacgccaaaattaaggttgtcggcatcggcggtggcggcaacaatgccgttaatcgcatgatcggaagtggtttgcagggtgtagacttctatgcgataaataccgatgctcaggcactattaaattctgctgctgagaaccctattaaaattggagaagttctgactcgtggattaggtacaggtgggaatccacttttgggggaacaagctgcggaggaatccagagatgctattgctgatgctcttaaaggatcagatttggtgtttataacggctgggatgggtgggggaaccgggtctggtgctgccccagttgtagcccaaatatcaaaagaggcaggttacttgactgtaggtgttgttacctatcccttcagttttgaaggacgtaagagatgcttgcaggcctttgaagccatcgaaaggctgcagaaaaatgttgacacacttatagtgattccaaatgaccgtctgcttgacatagctgatgagcagatgcctcttcaggatgctttccgtcttgcagatgacgttctacggcaaggagtacagggaatatcagacattataactgtacctggacttgtcaatgtagattttgctgatgtaaaagctgtgatgaaagactctgggactgcaatgcttggtgtaggtgtttcatccggtaaaaaccgagcagaagaagcagcagaacaggctactttggctcctttaattggatcatctattcagtcagctactggggtagtgtataatattactggaggaaaggacataaccctgcaggaagtgaacagggtttctcaggttgtgactagtttggctgatccttctgctaatattatatttggggctgtcgttgatgatcgctacactggggagattcacgtgactatcattgcaactggcttctcacagtcttttcagaagaagttgctaacagatccaagggctgcaaagctgcttgacaaggtggctgagggccaagaaagcaaggcagtccctcctccccccaagtcctcaatcaaggttgaatctagaccatccccgcgaaagctctttttgtagttgcatggttcttttacccttttcttttttccaattattatattgtaagtcattctgtagtacaatgatcttgatgcttaatttagtgagatatcattctcttgatgttctttccgaaaaaaaaaaaaaaaaaa

SEQ ID NO: 7124 - DNA, 1164 bp, Glycine max
gctcggtccaatcaagtagcccgctaagcaaaaacgacaatacggattcctttggctaagtgcttcaagctccaaaacgacaccgtgagtgagagtccgaatcctgaaacgctgaacagttgattgttggtagccatggctgcagcagccaccgcgaaaccgcttctgtcactgtggtttatgcttctgctaccgtcgtttcttcggatcgccgtcgcttaccgacccggcgacatcgttcccatgagctgcatgggtcaataccactcctcgcgaaccgtgtggcaggacctcattggccgccactgccccatcttcgccgtgaatcgcgaggtgttgatgcccatacccaagcccacgggttacactggtgctgatgcttataaaatattgtttcaagttggaagggaaaagtttttaatcccgtggcttcttgtggtgaatcggaaaagtacagaggttccaatgatcgaagtagatctgaggtattcaggaaatgatttgcatggtgtcacagctaaagttgtggatatgcctcatcactatgttgaagttcatcctgagattagtaaacaattctgggattctcagcattggccaaagcatatacttgtccgatatacatggaaggaacattcagagatagatgtaacttcaggattttttgttctgtttggttcaggtctcatgttgtctttcatcctttcaatctacgtattgcaatcatcacgtgacaaattggaaagatttgtaagggaaacggttgtagaaagcagcgtgcctggtgaggtggtagcaaaggttgaatgatgcatccctggtgtcaatgatgcaatgtataacattgtaatattgtattcgtgaattgacaagatcaattttggaggagggggagaagggaatgttgttcttgcatatacaaagctatgaaccagttgtttcttttcttgatgaaggaggtgactcaggtgagtgagttggattggattaattttatcaggacgaactgtggagtgagaggcagtaaaagttgagagattgggtgtattaattcatagggaaggctggctttgtaacaatacatgaggttaaatacttgaaaagctataaaagaataaatcaaaatgtagggtattaatttcgcaatcaaaaaaaaaaaaaaaa

SEQ ID NO: 7125 - DNA, 1635 bp, Glycine max
tatgtctctatttcttttcctcgagccgaaataagcagccttacaactcttcttaatcccatcaaatcgaaccctttttaaacgctcaaatacaaatttctggcaccaaatccttcccactctcctcaattccattcatttcaactcaacaatctctcagatccgtcaaacaaaatataaaagatagaaaaccctagttctgtaaatatataaaggaaaaaaggtctgatagatacccattgtcaataagatctaattcttcacacacggatttccccacaatttcttaacgattataacctgattgcgggaaaaaaaaattgcccttttgttgatttttttttgtcaaaaacaattttgtgtgtgtataaaaccatccgtgatctgggttcttttaaaaattggttcttttgtgtattttgttacttttgtaaggaaaattgagggttttggtactgatcactgtggaacatggtggttttcgttgatgggcagctttttgctggttttgaggcatagcattaaattggattttgattattcatggctgaacaagcattggaaggtagccaacctgtggatttaacaaagcacccttctgggattgtgcctacccttcaaaatattgtgtcaacggtcaatttggactgtaagttggagcttaaatcaattgcacttcaagctcgaaatgcagaatacaatcccaagcgttttgctgctgttattatgaggatcagggaaccaaaaactactgcactcatttttgcatctggcaagatggtctgcactggagctaagagtgagcaacagtctaaattggcggcaaggaagtatgctagaattatccaaaagcttggtttcccagctaaatttaaggattttaagattcagaacattgttggctcttgtgatgtcaagttccccattcgacttgagggtcttgcctattcccatagtgctttctcaagttatgaaccagagctgtttcccggactaatctatcgcatgaagcaacccaagatagtcttgcttatatttgtctccggaaaaattgttctgacaggagccaaggttagagatgagacttacacagcttttgagaacatatatccagtgcttactgagttcaggaaaaaccaacaatgattactactgtcaagagagcaggagcaagacttgattgaactgtaaatatgaagaccagagatagaaatatctgtaatcaggattgagttttaataagacacctgtgtttgttctgtctttttctctcttttaagaaaagggatcctgctttagtaaagtggaagaaaaaaaaaaccgtgtattgaatttgactgtagaaaaagagatatataagaggcagaatgaaaagaaaaagtggaagcttgtgcaaatcatgaatatctttcactgaagtggaaactatttttggttcatttcaactatgagcaactttgttttttagttaatcaagttctaaagcttaaggatagtgtcttcgtatactgttcaaaacagcaacgacgtgtttaatacactatgttttatgaagctagcaacatctaggtattttaatttcatattggaatttgaagacgttatgataaataaaacactacatttgataactaa

SEQ ID NO: 7126 - DNA, 1364 bp, Glycine max
tcagctacgtaggcccccccccccccaaatctatcttactataggttgattcttaccctcttctgttctctatatgtctctatttcttttctctctctataaataagcagccttacaactcttcttaatcccatcaaatcgaaccctttttaaacgctcaaatacaaatttctggcaccaaatccttcccactctcctcaattccattcatttcaactcaacaatctctcagatccgtcaaacaaaatataaaagatagaaaaccctagttctgtaaatatataaaggaaaaaagctttttgctggttttgaggcatagcattaaattggattttgattattcatggctgaacaagcattggaaggtagccaacctgtggatttaacaaagcacccttctgggattgtgcctacccttcaaaatattgtgtcaacggtcaatttggactgtaagttggagcttaaatcaattgcacttcaagctcgaaatgcagaatacaatcccaagcgttttgctgctgttattatgaggatcagggaaccaaaaactactgcactcatttttgcatctggcaagatggtctgtactggagccaagagtgagcaacagtctaaattggcggcaaggaagtatgctagaattattcaaaagcttggtttcccagctaaatttaaggattttaagattcagaacattgttggctcttgtgatgtcaagttccccattcgacttgagggtcttgcctattcccatggtgctttctcaagttatgaaccagagctgtttccaggactaatctatcgcatgaagcaacccaagatagtcttgcttatatttgtctctggaaaaattgttctgacaggagccaaggttagagatgagacttacacagcttttgagaacatatatccagtgcttactgagttcaggaaaaaccaacaatgattactactgtcaagagagcaggagcaaggcttgattgaactgtaaatatgaagaccagagatagaaatatctgtaatctggattgagttttaataagacacctgtgtttgttctgtctttttctctcttttaagaaaagggatcctgctttagtaaagtggaagaaaaaaaaaaaccgtgtattgaatttgactgtagaaaaagagatttataagaggcagaatgaaaagaaaaagtggaagcctgtgcaaatcatgaataactttcactgaagtggaaactatttgtggttcatttcaactatgagtaactttgttttttggctaatcaaacactacatttgttaactatgcttcatgcttacaataacgttgtaattgaacaaaggaattggtttatcaaaaaaaaaaaaaaaaaa

SEQ ID NO: 7127 - DNA, 1314 bp, Glycine max
gctattaccttcaaatctttccacacacacaacacaaatacctctctttctctctcttcttcgcattcttcggacatacaaaaactcacactctctctctctcttcaaatcaaaacccctcacaaaattcacaacaacatacacacaaatcccaaatcctgtcttctcatataaaagaacccttctttcgaatccttcccgctctctctctctcttattctttttccctatccgattcaattcgcgcgcagttccaaaccctagtccccctctccgagctctgtgatttttgggttgataaaaaaaattagggtttgatggctgaccaaggattggaagggagccaaccagtggatctacagaagcatccttctgggatcgtgcctacccttcaaaatattgtgtccacagtcaatttggactgtaagttggacctcaaaacaattgcacttcaagctcgtaatgcagagtacaatcctaagcgttttgctgctgtcattatgaggataagagatcccaaaacaactgctctaatttttgcttctggcaagatggtttgtactggagctaagagtgaacaacaatctaaattggcagcaaggaagtatgcccgtattatccaaaagcttggcttccctgccaaatttaaggatttcaaaattcagaacattgtcggctcttgtgatgtcaagttccccatacggctggagggtcttgcatattcccatggtgctttctcaagttatgaaccagagctgtttccaggactaatctaccgtatgaagcaacctaaaatagtcttgcttatatttgtctctggaaaaattgttctaacaggagccaaggtgagagatgagacttacactgcctttgaaaacatatatcctgtgcttacggagttcaggaaaaaccaacaatgattgctgtttcaagaaagagcaggagcagtggtctggcagagaagttcgtggaactgtaaatattaagacaaaggagataatctaaattgatatataaattaaagacagcctgtgttgccttgtcttaattttttgattggtcatgatgtagtaaagtggcagacattgttctattgaattgacatttttaagaaaaaagaggattctgagtcagaatatgagggaaaaaaagtttgagagctaattggaaaagtagcacattgtgtctgtccctgacagtagttggaaactcttttgatagcatctactatcaatcgagcgtagcgtgatctgactactgagtatggaatatcttgatcaacaaatcgaaaatttgagctgctaaatttgtaaa

SEQ ID NO: 7128 - DNA, 1466 bp, Glycine max
tccccgttccgtccctagtgcgtcctaaccgaaaaactattcttaagccgaattcgacaacaccgtacagtacttgcttcgacttactgtattgtgcgttgcattgccccttcatcacatcatcaacaacgttcactggtaaatggtgcgtaattttcttctcattgcaagattaactgcatcgttcacacaccacagaagtaccccaatccaattgggttctctgctgcaacacaaacacaatgcttcaatttttttcttcaattccttcacttcaggaatctcttctgattctgaatcagatgatgaaaaccaccacaaaggtgacacctttactgtgtcttacctcatcaactcatgggggttgtccccaaaacgggccagggaactctccaacaggatcaatttgaaaaacccagatggcccaaacgctgttattgatcttctcaacaactatgggtttgaaaaaacccatcttgcaaaacttgtggagagaaagccctcagtgcttcttgcggatgcagagaatacccttttgcctaaactcaagttcttccgttctattgggatttccaacactgacatgcctaaaatcctaattgctagccataatatgttgttcagaagcttgaacaaatgcctcattccacggtatgagatcctaaagagtgtacttcgtgacaaaggggaagttgttagagctttgaaaaatgccccatttagttttacgtatggtgacatgatgaaacgcttggttccaaacattagggttttgagggaatctggtgtgcctcaaggttccatttcttatctgttgatgcattctaggtctctagcttacagggaccattccaaatttgtggaagctgtcaacactgctaaggaatttgggtttaatcctttgagaagaacttttgtcgtgggtgttgaagttcttgccattaagagatgggaatcaaggtttgaggtttatgagaggtgtggctggaaccgcgaaatagctcttcgagcagttcgaaagtttcccagtgttgtgaagttgtcagaggaagtgtttataaaaaaaatgagttttctagtgaaggatatgggttggccatcagaagatattgctgaatatcctcaagttgtaacgtacaacttggagaagaggattatccctagattctcggtaatcaaaatgttgaaatcaaaaggtctgctcaagaataatttgcactttagtggcattatttgcataaccgaggcgaagtttttgaagaaatttgtcattagttttcagaaagatttgcctttcttgccagatttctacaacagtttggcaaatcaacagaatgtattataggctttgaaggcttttgctggtgattgccctaacttccagcttgtctctttcattgacaaaaaaaaaaaaaaaatttgctggtttttcctttttgtgtcagtagttttgagttttattttcc

SEQ ID NO: 7129 - DNA, 772 bp, Glycine max
atatacaagctgtcacctctcactctggctttgccttctccttctcttcttcgccaaatcccaatctcaatcccgaaaaccatttcactgatcccctacccctccccctccctccaacaatgttcccacacccttaaaaaatcaaaacctcaaaaaccaaaaaacatcaaaccatgttttccttccctcacaatgtcttcctacccatccttgtctttccaatcattatttgttgctgctccgcctccttgttgggtcggagcaatgcgacgacaatctacgaggtcctgagcgagcacgggctgcccatgggcctgttcccccagggcgtgcgggagttcgcggtgggcgaggacgggctcttctgggtgcgccttgacgaggcctgcaacgccaagttcgagaacgagctgcattacgagcgcaacgtctccggccacctcagctacggcatgatcgacgccctctccggcctcgaggcccaggatctcttcctctggttccaggtcatgagcatccgcgtcgacgtccccagcaccggcctcatctacttcgacgtcggcgccgcctccaggcgcttccccctctccctcttcgaaacgccgcccggatgcgtccccgttatttcaaaaaacaaaagcccttcccaccacagggacggtcaattggaaaggttcggaaaagctaaccggaaccccggaagaaagtcctaaagatatttgcctttgaaaaaaggggaagggggaattttttggaccacaactttgggttt

SEQ ID NO: 7130 - DNA, 2090 bp, Glycine max
attcgtgaccgtgaattcgtgctccacattttacccacaacacaaacacaaagacctaccacgatatccgccatcatccatcatcacccacccattaaccaatcgaattaagactcaacaaaaagcaccacccttcactgttcccacatagaaagcttcgaactttggaatttcctagctgaaattcgctcgtttcggttactgggtcggtctccgagctatgcgtggagctgagggtggtgatggtggcttcgccgtcagaggcggtaacatctactgggggagaaaagaggaaactgatttcagaggaatcgttgtaatcttcgcttgggtttctgttccgcagaacctgttacaagaattcgttgatctgtgttcttctttgaagtggaattcccttgtttgttttgcccattatctatcagctttccgtgatgaaagtgccatgccattggcattttgtgttcttgatgaacttattgaggagctgagaactaggtcatgccctgttgtatttgctactttttctgctgggtcaaaagcctgtctgtacagggtatttcagcttattgatggaaaatgtgcaactccgctcaacttggtgaaactccgctcaacttggaactgtctttctggacacatatatgattctggtccaatagatgttacaagtgattttggcttccgcttcacactacacccctccattgtaaaagtgcctggaccatcaaaacttgtttcttgggtagcaaaatctgttacctctggtttggatgcgttatacctgactagatttgaatcccaagctgctgaacattggcaggctttatattcttctgttaattttggagctccatttctcattttatgttctgagaatgatgaccttgtgcgataccgaagtatctatgattttgcccaacaactacgcaatctcagtggtgatgtcaaccttgtaaatttcagtagctcctcccaccttggtcattacaaacaccatccaattgaatatagagctgctgtgagccatttattagagaaggcttcttcaatatattcacaaaaaatgttgcttgaacgagaaagaactggtatggatggtacacaggatgagatatctgagttaatctgtgacctgcagaaggtggcaatcaattcaaataagagccttagaagagttgcagttgggccaaccgaccacttctttttgcctagttcagcaggacattacagtgatagagaatctggtgctccgcaagacgaacaaaaagaaaaacctgtttttgtacctagcttcccaagcatcagcgctcatagtgtccttggccaatttcttttcgacgtttgtgttccaaagaatgttgagggttgggatgtgaaatcttctgggaatctaaatgggaggtcatgtgcttcagctccaaggcattcactattcaggggtactaaacgcatcggtcggtccaaattatgaagttgttcccatatctgacttgaggagatactttatgataaacctgtttgaaacatcagcagtttccctagacaatacaggaaggtatgatagattttggtgcaatgattggctgttatgtctggcaggggacatgtaatggctgcaatggttcaacaattaattccttggcacttttgagaaagtgatggggtgatgtggataaaggttacttgagttccattccttctaatggccctcagaaaaagaaaaaaaaaaccatgactgttgtatcagaaaaaagagcttctgatagttcaaacaggttgatgcttggctatggtaattactcatttggtaattgcatttgcatgaaatgggataaactgtactgacacttatttgtagttagagcaaaagtaaatagatgtacataatatatttttgagggaataaaacgtctcttgtttaaggatggaagaaacttgtaaattagacatgtctagcaatgtacaaaagaggaaaaagaaggatatcatccctcttttgttgttttatttgtttttgtttgttagcaggatttttgcatcttctaaataatgtttggcaggagttaagtaaaaaaaaaaataaaaaa

SEQ ID NO: 7131 - DNA, 1495 bp, Glycine max
ccacgcgtccgtacggctgcgagaagaccacagaaggcggcgaaggtgactgactgagagagaagagaaaaacaatgtcagggctgaaggaattgctgaagaaagggttaggtttaggcgacatggcgttcaacgccggcggcggagccatcacctggttccccggccacatggccgccgccacacgcgccatccgccaccgcctcaaactcgccgacctcgtcatcgaagtccgcgacgctcgcattcccttctcctccgccaacgccgatctccagccccacctctccgccaaacgacgcgtcgtcgcactcaataaaaaagacctcgccaaccctaacatcatgcataaatggacgcattattttgagacgtgtaatcagaattgcgttgcgataaacgcgcacagcatgagttccgtgaagaagcttctggaggtggtggagttcaagttgaaggaagtgatttgcagggaacccacgctgcttgtgatggtggtcggtgttcccaacgttggcaagtctgctttgattaactccattcatcaaattgcaaagtctcggtttcctgtgcaggagaagatgaagcgtgctgctgtgggtccgctacctggtgttactcaagacattgctggattcaagatagcacataaaccaagcatatatgtcctagataccccaggggttctggttccaagtatctcagacatagagacagggttaaaactggctctggcagagtctgtcaaagattcagtagtgggtgaggagcgtattgctcaatacttattggcagttttggataccccgggggactccacttcactggaagcacctaaataacaggagaatagatgggattgaatatgaagctgaggaaaatcatgaatatagtctgaaaaatcttaagccaaagagaagaaatctgccaaatagatctgatttggtctatgttgaggatcttgtaatgcaagttcagcgtgcactctattcaagtctatcagaattcaatgggaacgtagaagatgagagtgacctggagagccttattgacctgcaatttagtgcactacagaaggcattgaagatacctcacaaggcttcagaagcgcggttaatggtatccaagaagttccttactctattcaggaccggtaagcttggacctttcattctagatgatgtcccggatgtcaagcctgtgtcataaggtagattgaatcatggtttttccccctcctttttcttgtgtattagatctcctacctttcctcctttcccatttgtgcaatatgtatttcaatccaaattttgctgtaacttgtaaatatcgatgaatttaagttagaaagagaaatttgaacttcctgtggatgcgggggatttgccagaatttcagttctaagagtcttttaccctaaacaatttaggcatatcaacatttagtcccaaaaaaaaaaaaaaaaaaaaaaaaaaaaagcggccgctctagagga

SEQ ID NO: 7132 - DNA, 1276 bp, Glycine max
tttttttttgcttaagttaagtcgatcaatattgaatgattgataatcttattaagatgtcacaatgaaggtgaactaaatcattgtttacaatagattaagcaccagcacaaatatgaagaagctcttacaatgatcaatttccatgtcacaaaaagttattaaacggtagtaatgcagggggacaatcagtcctggtagttccatgatggcatattgattaaaccaagggtgttaacagtggatttccaaggaaatgagcgtctaggtttccaaggacaaggtcagccatggcagttcgagtttctattgtgccacttccgacatgaggcaacaagacaacattttcaagcccaaatagctcttctggaacagtaggctcattttcaaacacatctagcccagcaccacccaaacgaccttctagcagagctggcactaactctgcctcatcaacatgcttgcctcgtccaatgttaataagataacccttgggacccagtgcattgatcacctccctgttgatgatgtgatgagtttcctccgtcagtgggcaagcaactaccagtatgtcgcagttagatgccagttctacaacactaggatagtacttgtagtttgagtctcttttttgagttctagagtagtagcatatggggcagttgaatccttcagctctcttagcaattgcttgaccaatcctccctagcccaataatgccaacagttttcccagagaacttagtggtcagtttgtagtcccctttcttccacttgccgctcctgacataacgatcgcactcgcagatcctcctgagcagcgccagcatcaatccgatagcgaggtcggcgacttcatcggtcagcacgtccggcgtgttggtgacgcgaattcctttctccttgcacctgtccaggtctatcctgtccactcccacgctgaagctcgacacgatctccagcttcggcagcgcctcgatcagctccgcgtcggcgccggcgttcgagtttccgaccaccgcacggatcgagctcgcgtgctggcttagaacctgcgccgtctgcggctgatcatacgcccgaaacagcttgtagcgcttgtccagctcttgctccaggtacggtatcacctgagccaccaggagtaccccaattgatcccatttcgccacacaataaattagggttagggattccacagacactcgaaacgcaacaaagacagactcggagtcagacactctctgcgtcccgcgggcctagttcgctctgtctcga

SEQ ID NO: 7133 - DNA, 1141 bp, Glycine max
ccacggcgcatcctaaggcagaaaagatatttttgtatccatcatcccatccaagtttgaaggcgtgtttgttgtgtgggtggcgtttagggtttctcgatcttcgtcaataatcgtcgtctccatttcagtcagggttttagtcttcctctcctcccaatacacactgcatacagggtgatcgcttggaagcatgcgaacttcatgggctgatttggctgccaattcggcgtctgaaaatgcgggaacctctaactccacagctccttcgcggccggtttatgtgcctccgcatctgaggaaccgtggaccatcagaatcccttgctccagcacctccatccaataataataataatgtgggatcacggtggggtgctctgccacccagaaacggatgggggaacagaagtggtggttgggatcggcgcgaagtgaatcccttcggaggtcaggaggatgcagcagcagaagaggagttgggaggcgaggagcagcaggagagcacgggaattaactttgatgcgtatgaggacattccggtggagacgagcggtgaaaacgtgcccccggctgtgaatacttttgcggagattgacttaggcaacgcgcttaatcagaacattagacgctgcaaatatgtgaagccaacgccggttcagcggcatgccataccgatatcccttgcggggcgggatttgatggcttgtgcgcagactggttccggaaagactgcagcattctgtttcccaatcatcaatgggattatgagaggccaagcccaacccctccagaggccccctcgcggcgtccgcatagtctacccacttgcccttgttctctcaccaactagggagctatccatgcagatacatgaagaggctagaaagttttcataccagacaggggttagggtcgttgttgcttatggtggagctccaattaatcagcagctccgggaacttgagagaggggtggatatccttggtgcaactccaggaagattggtagatttactggagagagctagagtttcattgcagatgatcagatatttggccttagatgaggcagatagaatgctggatatgggttttgagccacaaataaggaagattgtagaacaaatggacatgccccca

SEQ ID NO: 7134 - DNA, 1132 bp, Glycine max
ttcgtatctgcaaccgaaccaaaaattagggtttctcgatcttcttcatttgtcactgctctcaccgtttcagggttttaccttcccaacacgacacagggctggttctgagcaattttgttcgttttgaagagtatttatctgtttcagcagtttttttgtttttcccggtgtcgacccgcgcgcccccggcacaggtgttatcccgattctggaaaggaggtgttttccctttgaatttcgcggacaactgttgactacgagaattgtgattgactatgcgaacttcatgggctgatttggctgcaaattctgcagctgagaacgcaggtcctggttcttctgctaacaatgtgggaactggtagcaatttagctcctacgcgacctgtttatgtacctccccatctgaggaaccgtcagccagcagcagaatcccctgcccctgctccagcatatagtggcccttcttctggtgctggctctagttctggtgctggtaattctggatcccgttatgctgcacccagaaatgattatcgtcctgggtatggtggtggtggtggacgtacaggtggatggggaaacaaaagtggtggatgggatcgtggcagggagcgggaagtcaatccctttgaagaagaggataacgctgaagaggcattcagtgagcaggagaatacaggaataaattttgatgcatatgaagacattccagtggagaccagtggtgacaatgtgcccccacctgtgaatacgtttgcagagattgatttgggtgaagcacttaatcagaatataagaaggtgcaaatatgtgaagccaacacctgttcagcggcatgccataccgatatccctagctggacgggatttgatggcttgtgcccagactggttctggaaagacagctgcattctgcttcccgattatcagtggaatcatgaggggccaacctgtgcagaggccacctcgtggggtgcgtacagtgtatccgcttgcgcttgttctttctccaacgagggagttatcaatgcaaatacatgaagaggcttggaagttttcataccaaactgggggtagggggagttggtgcatatgggggagcaccaataaaccagcagctgcgggatc

SEQ ID NO: 7135 - DNA, 2096 bp, Glycine max
tacggctgcgagaagacgacagaagggggctgggaaattcctgtcaaactgcagagaagagggcaaacaattagggtttttcaaattcaacatttcttcgtttaccaattttaggtttttttctctcctcactctgttgccttacctttcaattgcaattcgtacaggaggttgttgtattctcatgcacaattgaaactggcaaatgagtgatgcaaaagaaaacgaggaagctggccagggggtgccctcggtcgtggaagaaaaccagcagttggttgatgcagaggttcaagatcaacctgaagctgcctctgctcctgttccagtagaggaaacttcaaatcatgttgaaattgggtcagatcatgttgaaaatacgaaggaagagccacctgctgaggataaaaatgtagaattagaggttgtttcagagggaattccacaagatgttcaaaatactcttctctctgtcccagtagaggctgatgctcaaattttggataggactgagtctgaagaagctgaagcttctggtgcgaaggtggaggctgatgaattaccacagaataataaggaggctgagaataatgatgatattcatcaaaaaagtaatggcgatgttgagatggctgtggaggttaagcctgaagactgtggaatggctgatagtaaagcatgtgataatggtgaccctgtgcttgcaagtcataatgagcctgctacgccacagcctgctcctgcagatacaaacactgaaattatgaatgtattagaagttgagaataaggttgatgaaaagcaagtggctgaacctgcagataacgggaattcaaactcaaagcacatgcttttcttggatgccgaccattcctatgatggtaatgagtcaggaacagaggaagaacagtcagcatttatgaaggagcttgaaaacttctttagggagaggagcatggaattcaaacctcccaaattctacggagaaggactaaattgccttaagctgtggagagctgtaacgagattgggcggctatgataaggtgacttcatgtaaattatggcggcaagtgggagagtctttcaagcctccgaagacatgtaccactgtctcatggacttttcggggattttatgagaaggcacttcttgattatgaaagacataaaataaaaggtggtgagctgaatgttcctgttgcttctcatccagagcctataaatattgaaaatcaggcctctgtatcaggtagagcacggagagatgctgcagcacgagctatgcaggggtggcactcacaacgcctcctaggcaatggtgaagttagtgaccctattattaaggataggaattctgtgtctgtgcaaaagcgtgaaaagcagcttaaaagcatcaatatacacaaacgtaagaagccatcttcaccttacatggataatgcagtcaaagctgcacgcagtaaaccgtctaaaccacaattggacacaactgtgattgatattggacctcctgctgattgggtaaaagtgaatgtacaaaaaactaaagattgttttgaggtatatgctttagttcctggcctgctgagggaagaggtccgtgtacagtcagaccctgcaggacgcctagtcataagtggggagcctgaacatcccaacaatccttggggtgtgacacctttcaaaaaggttgtcagcttgccctcaagaattgatcctcatcagacatccgcggtggtgacactgcatgggcagttgtttgttcgtgtcccgtttgaacatttagaatagtggtcgcttatgctttcaatgcctctctctttgaccatgatatgtatgtaggatagttgacccggaaaccatgtagaaaactatttctgcctgtaaaacatgccaatttctagcttagcgtagcatttactttaatgtttgagttcacttataaattctcgtacatgattttctcaaacaatactttaaccttgttaatatgagttaggtaggttctgtaattgccgaggatcaatgttgtaatattgtaactttgttagtgatattacatttaacttttgacctttttaaaaaaaaaaaaaaa

SEQ ID NO: 7136 - DNA, 800 bp, Glycine max
tacgttctagatcgcgggccaagagaatataggaatataagaactaagatggattggatcggagcgtaccgcggaggccagagaagcagggactggtgcgacccttcatcaccattcactgatttgtgggaccctcgtcgtgtcggtgacgctgatgatatcacctcctctctcgcccatgctcacgttgactggcgtgagactgataaagctcatatcttccgtgctgatcttccaggggtgaagaaagaggatctgaaggtgcaggtggaggagaataagatcctgcagataagcggggagagggtgaaggagaaggaggaccagaacgacaagtggcaccgcgtcgagaggcagtgcggaagcttcctccgccgcttccggctgccggaggatgccaaccccaaccagatcagctgcacgctcgaaaacggggtgctgaacgtcaccgtgcccaaggtggagaagaagccggagaacaagaacgtgaggcagattgatgtggtttgatgatgatggagcatcatgaggacttgtaatgtttgaatgagttttgtgttatgtgtgtgtgcgcaactgtgcatattactgtacaagttaataactacgtgtctgccatatgaatcaatgtaagtttgatatgaatgggaggaaactttgtttgcatagtttgggaattttttttctttttcttttctttgttttcatcttattaattaaggtgggagttgtgcactgtggtctgtcttgatgcttgttctcttcaataaatggtcagtctttttttcttttgttaaaaa

SEQ ID NO: 7137 - DNA, 1475 bp, Glycine max
tcagctacgtaggcccccccccctctctgtgttcaccataacaatagtgtacatctttcagtgggttgatacttaggggtctactattttctcccttcattctttgtgatcaacactccaacttcatatgaaatggagaacctgacagctagcatttgttgggaacttgtacgaaaggagggctatattgctatatggcggaaacctatggacaatagctgctaccttagtcgagacattgatgcacatcctccattatgtgagtccaatgatgaccccgataatgtttggtatgttggtcttaaggcatgcatcactccattacctaataatggatatggaggaaatgttacagagtggcctttgcggcttcatcaaccaccagacaggcttcatagcatccaattggatgccattatatccagagatgaactcttgagggctgacacaaaatattggtttgaaataatagaaagttatgttcgggctttccgttggcaggactacaacctgagaaatgtaatggacatgagggcaggatttggaggagttgctgctgcgctgcatgatctccagatcgactgttgggttatgaatgttgttcctgtcagtgggtttaataccttgcctgttatatatgaccgtgggctgataggagttatgcatgattggtgtgaaccatttgatacatacccaagaacatatgatctgctgcatgcagcaggtcttttctctgttgaaaaaaagaggcaaaagtgtaacatctcaaccattatgcttgagatggatcggatgctaagaccaggaggacgtgtatatatacgtgacaccacacatgttataggtgagcttgaagaaattgcaactgcactgggatggtcaaataccataaatgatgtaggagagggtccctattcaagctggaagatattaaggtctgataaagggttctgaattgctcaattgtgtctgtaacttatagaacaccatatattggctcatgcaaccggaacatggtactccaccagaaatctcattttgtgccagaaatgtggccaaaactaacccataaaaaattctgctatttgccagaaatggtagtcttaattacaatgttgaatccctactaacaggttttcttgtaaacactttaaagaacttgccttgtatcaatctctacagcattactagatatgtttagatgactttttttttttttgataaacagatattttagatgataattttgtgtatatgattctagtatgatgtaagcttaagttattgggtagaatggaccaaatgctggaaatttgtttatgatgtgtcaataaagtctcacttgtgatatggtctgttcccttccctcccaccagcttggggttgaaatcggttatgtttactttgttgttgtgacaagatggctgcttgttcgcaaccacagcatttactattaagatactgttctttgactc

SEQ ID NO: 7138 - DNA, 2224 bp, Glycine max
gacgaagctcgaattcgctcgagacggctgcgagaagacgacagaagggggaagccagataaggcacaatgactgagaattagttgtcattgtacatcatgttcaattaacaaccatgaagccaccattaatggaagtactaagtaacaacttccccatgatctcctatgcaattctcaagcttagatataagtcttaattaaacaaacttggcattgtagtagtagaaccttatttgactcaggttttcatggctgcatttcctatgttctacaaaacgccttacaaggaccaaaatctgccaacccaaaatgtaatgaggcagaatgagaagaggttcatgtatgagtgtgataatatgaagaggttcatctcttcaactcctggtcaaatttgcaggagtagccaaccatggaacaaagtcaacaatgtcctcacaaaatcaaacacaaaagagaggaatgttcctaggagcatacttcatggcagatgctctttgcataagaatgtcacaaaactttgtggttcagacagtcacctaagcctcattaaggaatgttattcaaagacagaaaacctttccagagtttggtgttcagcaggttctagctcaactgagaagcaactaaggtcattagattcttattttggaaaactccaagataatgcaaaattgcgtacatttgattcatcacacaaggtgatacagttgcatcacatagatcgtcaagctagatcaaaaactggactggaatctcttgaggagtatcttggcaaactaaatcatgaagcaaaccaagaaccttgtgtgccatcgtatgttgagaatcatagtgaagaaaatttagcaccaaaacgatctctcagcaaagatattgaaagatcaaactttaggaaacaaaatgcttttgtggatataagaaggctaaaacgtttacatgatccaaggtctgctatagattcacagcagcaagttgaaacctccagtctttggtgcagtggcatattggcttctgtaaacattgcagtgtttctatttgaaatagcaagtcctataaggacttctgatttagagctgttttctattccactactatatggagcaaagataaatcatttgatcatggttggagaatggtggaggcttgtaacaccaatgtttctggtacacaattgagaattggcatgcaggaatatttcacatggctgtcagttgttgggcccttttaacatttgggcctcaagtttgcaaaggctatggttcatttacatttttcttgatctacatactgggtggggttgcttgcaacttcacaagttttctacatacatcagatcccactgttggtggaactggacctgtatttgcaataattggtgcttggctcatgtatcaaattcaaaacaagcatgttattgcaagtgatgcttcagagaacctgttccagaaggcagttattatgacagctcttattttcatattaagccactttggtccaattgacgaatggtcacactttggagcagccttctcaggcatggcatatggctttttaactagtccaatacttcagttgaatgattcatcatcaggaactggtcaagaagaaggactcaaacttgttagaaaatatggtgattcttgcaaatcactattgatattcacaatgttcatcattgttttaagctccttccttttcttcatggagcccccacctaatgcactggcatctgtcaatgcagcagctgttgatgccttggaatatatgttgatatttggctgatgcaacatgtcataaggtttctgccctaagaaggacttataccttggaaggaaggcagtcgctactgccctacaaagacatgtattgtaaaaaaggaagtaaaaagtgagaaatgcattagaggcactaattactgagattaggctctactgtttcttctagtatataaatattatagggttacaaaagtataattgtgtaagctcagtccccagcccaataaactaagttttgcacaagcactaatattttcaagattagattacaattctcatacttgatagatgcttaaaatagaaagttattttcctccattttaacacactccacaattgagagattaatatgtgctatagtttagtccattttattgtaaatgagctgtatagacataatttttatgtgtgtgtgatgctgtcagcacatgcctcagagttttc

SEQ ID NO: 7139 - DNA, 1387 bp, Glycine max
tcagctacgtaggcccccccccccccccccccaatttgacaatgattgaacatatacagtgaagcaacctggttccacataaaagcaagaaaacaaaaccaccctcccgctcggcaacctggatttggactgaatgaaaatataaagaaagagaagagagaaataattttccgggaaaattcaagttccaatcggaaccggaaatgaatagggtttggtttctactattccttctgctgatctcgaaatgcgatcatgtgtggagctcttacgcgggttccgctagctccgtcatcaacccttccaaggtcaaacagatttcctggaagccaagagctttcgtttatgaaggtttcctcacggatttggaatgcgaccacttgatctctctagcgaaatcggagcttaagagatctgccgtagcggataatctctctggagagagccagctaagtgatgttcgaacaagctctggaatgttcatttccaagaacaaggatcctattgttgctggtattgaggacaagatttcgtcatggacctttcttccaaaagaaaatggggaagatatacaagtattgagatatgagcatggccagaaatatgacccgcattatgattacttcactgataaagttaacattgctcggggtggacatcgcatcgcgactgttctcatgtatctcactgatgtagccaaaggcggtgaaactgtcttcccttctgcagaggaacctccacgtcgcagaggtgctgaaacaagcagtgatctttctgaatgtgccaagaaaggaatagcagtgaaaccacgtagaggggacgcacttcttttcttcagtcttcacacaaatgctaccccagacactagcagtctccatgctggatgccctgttatcgaaggtgagaaatggtccgcaacaaagtggattcatgtagactcgtttgataagactgtgggagctggaggtgattgttctgataatcatgtaagctgtgagagatgggcttcacttggagaatgcactaaaaatcctgagtatatgattggatcttcagacattcccggctattgtaggaaaagctgcaaggcgtgttagaaattttactgaatgctttcctagatactacaagccatctctgcctcgggtttcaaatttcaactagttcttgattttttttcccggactgtaaagtaattctgcattattataatggttccaatcagggttctactatcacaaccccacttcaagtggaagaattgagaccttctcgggggattctgcttttttctttcattgcctatacttatcttctatgtataaaacgatataacaaatacaaattaatttattattaaaaaaaaaaaaaaaaaactcctcgtgcc

SEQ ID NO: 7140 - DNA, 1413 bp, Glycine max
aattcggcaccagaaaatcctaatcgtcccattgccagcttcatcttttctggtccaactggtgtggggaagtctgaattggccaaagcattggctgcatactacgttggctccgaagaagctatgattcggcttgacatgagtgaattcatggaaaggcacactgtctccaaacttattggttcacctcctggatatgttggttacactgaaggtggtcaattgaccgaggcagttcggcgtcgtccttacactgttgtactgtttgatgagattgagaaagcccatcctgatgtgttcaacatgatgcttcagatcctggaagatggaagactaacagacagtaagggcagaacagtggatttcaagaacacacttcttataatgacatcaaatgttggaagcagtgtgattgagaaaggaggccgcaaaattggatttgatctggattacgatgagaaggatagcagttataacagaatcaagagcctggtaactgaggagctaaaacaatacttcaggccagaatttttgaatagattggatgaaatgattgtcttcaggcagctcacaaaactggaggtgaaggagattgctgacataatgctcaaagaggtgtttgatagactgaaggtgaaagatattgaacttcaagtgacagaaagattcagggacagagtggtggaggaaggttataaccctagttatggagctagacctctaagaagagccataatgcgacttttggaggacagcatggctgagaagatgcttgccagagagatcaaggagggcgactctgttatagtggatgttgattctgatggtaatgtgattgtgctcaatggtagcagcggagcccccgaatccttgccagagacgcttcctgtataatgcggttaatttgctaatactatgtacttaatttgtttaaaccatagtcatagtatgttttacttgtcaatgtacctaaagtttttaatggaatacctggtaggcctcatcatgttttttgcctataaagcaaatcaaattcagaaaaagggtagcggggttaccagggggatatagggaaaaactgaaaaaggatttgtggggaaggtgaaaatcagcgccgtattcggtataactttggcaccaatgaactattccgtcggaagctgggggtgtttgtatgtttccactggtttgactatgatgtaatattaatatcccagcattactgtaaatgatcattatggcgtattcattgcttgagattgcaatgcatgtaatgacaggtttagggtattagatcaatttgaatacgacagtgtccccaaatcatctatacacaagtttaaaatgtaaggcggatgcggagtgaatcaacgtgattcatgtattatatcggttagttttatgttggccgtc

SEQ ID NO: 7141 - DNA, 1785 bp, Glycine max
gctaaagtgacttgcggattatagccttaatttgaagcaaaacccacaaaactaacagtgtatcaaaatttttgaacctgaaaattgttattttgatagggtttacagcaaatgcagcatagcctgcctcgtcacaaaatactgaacgccgcagctctgtggttgatcgacgcattcttcacttcaatcccacaatgtctataacgcacagcctcaccacttcactctcttcttcttcctctgctttcttagctccctcttccttcaattccagaggacaggtttcgttgcctgtgaagagcgtgagcatttgcaaatgcgttgccacacccgaagctgagaccgcctacaagacaggggtcactcgcaatccaaatatggggaaacttcaagctggctatctctttcctgagattgctagaagaaggtctgcacacttgctgaagtaccctgatgctaaagtaataagccttggaattggtgatacaactgaacctattcctgaagtcataactgatgcaatgtcaaagagatcacatgcattgtcgactatagaaggatacagtgggtatggagctgaacaaggtgaaaagccattaagaagggcacttgcttcaacattttacagcgatcttggcatagaagaggatgatatatttgtctcagatggagcaaagtgtgatatatctcgtctccagattgtctttgggtcaaatgtaaaaatggctgtgcaagacccttcatatccggcctatgtagactctagtgtaattatgggccagactggcctcttccagaagaatgttgagaagtttgcaaacattgaatacatgaggtgtaatccggaaaatggtttcttccctgatttgtcttcaatttctcgaccagatataatatttttctgttctccaaacaatcctactggtgctgtggcaacaagggaacaactgacccaactagttcagtttgctaaggacaatggttctatagtaatccacgattcagcttatgcaatgtatatttctggtgacaaccctcgctcaatatttgaaattcctggagccaaagaggttgccattgagacttcatcatttagcaagtatgctgggttcactggagtccgattgggttggactgtggttccgaagcagttgctgttttctgatggatttcctgttgccaaggacttcaaccgtattgtatgcacttgtttcaatggtgcttcaaatatttcccaggcaggcggtctggcttgcctttcaccagaaggtcttaaggctatgcgtgatgttattggattctacaaggaaaatactaacataataatggagacatttgattctcttgggtttaaagtctatggagggaaagatgcaccatatgtgtgggtccattttcccggccgaagctcatgggatgtattcgctgagattcttgagaagactcatgtggttacaacccctggtagtggttttggacctggtggtgaaggttttatcagggttagtgcctttggtcacagggaaaatgtcttggaggcatgcagaaggttcaagcagctatacaagtgaagttagaatatctcatttggtttcaagagttgttctcttggactgaagctagggctgtcttatttaaataatgcaattgattttccgtggagtttagattataagatgtaaagacagggtttatcaattgaggaagtatatttttctaaaaaaaaaaaaaaaggccggccggttaaactctagcaatttaatacactaagtagtttttagccag

SEQ ID NO: 7142 - DNA, 2220 bp, Glycine max
cccacgcgtccggtttgctaaacatgtatagcgcatttggctttctctttctaagagcgaaagtcgcccggcgaaacatcttctctctttaccttccttgtctcaagtgaaccttttttctcaaaagcttcccttttgagttatatgttcaccaccaccattttgaattgaaactcgagaatgggagacaaagaggtaaaggaagaagaacaaaaaggtggattcagggcttccatgtttatttttgtgttatcagcattggacaacatgggttttgtggcaaacatggtgagcttggttctatacttttatggggtgatgcactttgatctgtccaactctgccaacaccctgacaaactttatgggctcaactttcttgctctcactcgttggtggcttcatctcggacacttacttcaacagactaaccacatgtttgctttttggatcactcgaagttctggctttggtaatgctgacggttcaagctggtctggaccatttacacccagattattgtggcaagtcaagctgtgtcaaaggtggcatagctgtcatgttttactcatcattgtatttgttggctttgggcatgggaggagtgagaggctccttgactgcatttggtgctgaccaatttgatgaaaagaagaacccaggagaagcaaaggctcttgctagcttcttcaattggattttgctgagttcaacattgggatcaattataggggtcactggggttgtgtgggttagcacccaaaaggcttggcattggggattcatcataataaccatagcttcctccattggatttctcacccttgctcttggcaagccattttaccgcatcaaaactcccggccagagccccattttgaggatcgctcaggttattgttgtggcttttaaaaaccggaagttaccactgccagagtctgatgaagaactttatgaggtctatgaagatgctacattggagaagattgcacacaccaaccaaatgaggtttctagatagagcaagcattcttcaggaaaacatcgagtcacagcaatggaaagtttgcacagtgacacaagttgaagaagtgaagatcctaaccagaatgttacctatactagccagtaccattataatgaacacttgtttagcacagcttcaaacattctcagttcagcaagggagtgtgatgaacctgaaacttggttctttcactgtgcctgcaccatccattccagttatcccccttcttttcatgtccatcctgattcccctctatgaatttttctttgttccattcgcaagaaagatcactcaccacccttctggggttacacagcttcaaagagttggcgttggactagtactttctgccatttcaatgacaatagctgggataatagaagtgaaaagaagggaccaaggaaggaaggacccttcaaggccaattagtcttttttggttatccttccaatatgctatatttggagttgcagacatgttcactcttgtaggactcctagaattcttctacagagaagcacctgaaaccatgaagtcactgtcaacttctttcacatatttgtccatgtctcttggttacttcttgagcacagtctttgtggatgtcattaatgctgttaccaaaagggtcactccaagcaaacaaggatggttgcatggcttggacttaaaccaaaacaatctcaatttgttctattggttcttagcaatccttagctgccttaatttttttaacttcctttattgggcctcttggtacaagtacaaagttgaagacaacaattcaaaggtgaatttgaaggctcctctcaaaacggttggtgagagaaaacaagaaaaaaaaaaaaagaaaagtatgagagtgaaggctagagaaagcagccaaacaagtgaagccaatactgagggaccctcttcctctgatgaaacagatgacggaaggaactctagggaatggaagcacagataaagtcaggaggctcaagacatgatttggtattaaggactagataagataaaacatgttatgtggaaacactgaaaaagatagtggttgttgaaatctctcttatcttgcatgtgtgcttcttgtatgattgattagcattgttgcttctggcaccatctgtgtgtctgttgtgtgcagggtcaaaggtttttttattttctttcatttaacatgttcttttttgtt

SEQ ID NO: 7143 - DNA, 1057 bp, Glycine max
ctctgacttatccatgaattcagctgctgtggttgagtcttcagtaaatctgaaaaagaagaatatcaggaatggcaaaaacaaacagaaacatgaagaaggttcatctcaggctgcactaccatcggcaataccaaaagaatccaatctttccaaaagctcagttgaaagtgataagtccaaggcttcagactttgagttagatcagggcccacttcagccagcacccttgtctaaagatccaaatcagttttcggagcaacacagatatttagcaaatgaggaatcccatggtagaatgaatagccagtggaaatcacagcattctcgtaggatgccaaaaaatatgcaggccaatagaccggcagagaaatcccatgggactgatgctgtgatgtgggcacctgttaaacctcagagcaagagtgagatcgtggatgaattgagtgagataagtaaaattgaggcagttaatcctctaaagagtgagcagcaggtgcataatttaaaaaataagagggcagaaatggagaggtatgttccgaaacctgttgcaaaagaaatggctcagcaaggaaacatacaacaggtagcttcatcaagcagtcaggctcctactgatgatagcattgggagagttgattcggcatcactgggcccccaggtcattcagcataccaatttagttgttggaaaagtgggttctggaatggagtctaaaaacaaagatggaaggcatattaagcagggaaaagcacatggatcatggcggcaacggaatctaacagaatcaactaatgtacatgaggtgcatgatggactggaccatgatttaaactctgaaccaacagagcatcatcatgatcagaaggctgaagtaagctttgtgaaaggacaaacaaagcattttaatgactctggtgatattgatggttcatacaattctaacagcaataatgcagctgctttgggctcagctcctgttattaaagattattcagccacaggtagagggaggcggccccctttcagagggcacaagggtgctggggggaac

SEQ ID NO: 7144 - DNA, 2062 bp, Glycine max
cattcggcgcgccctttcattaacccaacagtgtcgctgcaggagaagaagatcgaatcgaaacgaaacgcgaataagtttctttctctcttgctggacgaataatggttctgaggaggaagaagatggagcagcgcttcaccttcttctgctgatgttgatttcatggccacctcccagtcccagcatcgctgcgttttcgttgggaatataccgtatgatgccacagaggaacagcttattgaaatctgccaggaggttggcccagtagtctcattcagactagttattgacagagaaactgggaaaccaaaaggttatggattctgtgagtataaggatgaagagacggctttaagtgctcgacgaaatcttcagggttatgaaattaatgggcggcaattacgcgttgattttgctgaaaatgataaagggaatgatagaaaccgagaacagggtcgtggcggtcctggaatgactacaaatgttgaccatcagaaacaagttggcatcccagctgtccttggggaagctgttcagcatcagcctattggtcttcatattgccataacagctgcagctgtcatgacagcagctctaggtggtgctcagtttggcatccagtcaaatcaaaatagtttgcagagtcagtcagcattagcacatgatcctttaactctgcatctggccaaaatgtccaggagtcagttgactgagattatctctgagctgaagggaatggctacacagaacaaggaactggctcgtcagctgttgctttcaaggccacagttgcccaaggctctttttcaggctcagataatgctaggaatggtgacttcccaagtgttacaaatgccgaaccttaggctggtttcagatcaaacctcacagtctttaatgaatgaaggccagctgggtcagccatcattggttcaaactctgtcaggccttcctcctcctgggcagggcaagttgcagcctggtttgacaccttatgctcaagaaggccaagtcaacaccatacctcataatcctttggctcctaatcaattaactgcacatccaaagcctccagtgcagcctcggattccccttcagcaacatccaaacaatcttgtactgccaggaacattgtcagggcagtctaatttaatgcttccttctgcacgtcctccaggtttgggcagtttgtctgttaggcctctaattcaaccgggaaacttcaactgctctgaaccagcaaatgcatccctctttgctacagcattctgtacatgttggaaactcaactgtaggacataatattcaaatgcattgcccctccatgtcatcagcaaattctcagttactgagtaaaggtgataaatcttctaaagttattgaggatttaaattgggccaagagagctaatacacattcaaaatcaaacattcctttgggagtagagaaaacaaacatggttcatgattcttcagaatcttttactcggccgtcaaaggtcatgaaattggatgagggaaggagtgcccctctttcttcaggaatttcagacatgcctttcaccgatggatcatctcatatcctgggaagaagttcattacctgtacatgcagctcctaaagcggaagggcaatactctgagcaacaattttctcagcttccacctgatgtggagtctgttttgctgcaacaagtattgaatctgacaccagaacaattgagttccttgccaccagatcagcaacaacaggtcattcagctccagcaggctctacggcgagatcagatacagccctcataacaaacagggaactcatcaacagttcaaatagcataaacttatttgtatactagcattttctgtagattagcatcagaatatccaaattctttcaaccactattgcttctttttgtaatttgttttctaattccttgtccaaatattcgatgtagcattgaggggctccagatgggcgtataaatcatttagaagagatgtacaataataattttgacgataaatttttttccgttgacataaaaaaaaaaaaaaaaaa

SEQ ID NO: 7145 - DNA, 1561 bp, Glycine max
caagaatctacttgccctcctggtactgttgacctcaccaaagatgatgatggtttggatacagtgggctcttgtgatattgtagaaagaaaacctaccccggcatctattcatagtcagtttgtcaccccaaattcaacttccttgggtatgaactctactggtgttaatcaaaatgttgccactcaaatagatgacttttggcctggagtttgttttgtccgtagtaggtctgataccccaacagttggtaattctgagctacctgttctgcctgatactgtttctcctacatttagtcaggaatctgctggtcatgacaataaccctgttgttaactctgccatgcataatcaattttcgggaccaagcaacttgcagatgcagatgaatcatatgaattcagttaacgagtatggcaggtcatcctcagcgccaagacatattcataggactccggtagctgttcaggccctcccagtccaatctcaggcattgggaccacagcaaaattcaataactaatttgaatagttccttgctacctagcaattcctctgctgctcctcatatttctttgtccaaccctgcctctgtagatactttgaatgccatactaagtgatacggaaagacaacaacatttttctcgaaccccaatgaatctgcctcaggtctcaggtgtaaattcacctgcatttcagcatcacactgcaacacagaatcggggaccacttataaatacgtcagcaccaactcaaccgcagaaccaatacagagcatatgcgttttctgaatttagaaatttgcatctgcagcaagctctgaatctccggccacccccaccaagatcatctaatgcccaatggccccacatccagcaaggtgttccgcaatctgggaattttcaggcggcagccaggggtgcttcagtggctgctggacaaggtagttcccatgctaggaatgttccaacatctggagctactactcatagccatcaagctagaggtatggttgctaaccagcctgccaggccatctgttttggttcaaaatcaaagtaccgtagcaggcacccctttccacgggttaacaacagagcaaagaggaaatacagcacagtcagtttctaggcctgaagaattattcagttcgcaatcagaacagaattgggctcccactggacgaatgcgtggaagtctagatttaagtcagcttaacgatgagtctattgcacagcgaataattacgccaacacaaggtcaaaattcaaggccaccaggtccacaacccattcgacggaccggtatttcctctttgcaacccgccacgacccaacaggatgtgcttattgcaaacaatagaaatgcaaatgctcataatcgttcttccagtagataacatttctgcaaggctccactcacacattggaagacttaaagaaagctgcacctgaatttcatctttgataggctgtaaatacagttatcttgtggcaatatatattttgactataaccagacagacatattaaaggttttttatttttattatgtaaaaa

SEQ ID NO: 7146 - DNA, 1814 bp, Glycine max
cctcgagccgaatcggctcgagtcagctacgtagcccccccccccgcaacatttcgcagtgtggaggatcgtcttcttcatcccacccacacagagttcagttcagttaggatatctattttttaatggctaatagaccggatccggatattgatgatgattttcgtgagctttataaggagtacactggccccctggggactgctactacaaacatgcaagagagggcaaaatcaaataagaggtctaatgcagggtctgacgaggaggaggaagcccgggaccctaatgctgttccaactgatttcaccagccgagaagctaaggtttgggaggctaagtcaaaggctacggaaaggaattggaagaaaaggaaagaggaggaaatgatctgcaagctttgtggagaatcagggcatttcactcagggctgtccatctactctcggagcaaatcgaaagtctcaagatttctttgaaaggatacctgccagagacaaaaatgtacgggcacttttcacagagaaagttttaagcaagattgaaaaggatgttggctgcaaaattaagatggatgagaagtttattattgtcagtggtaaggatagattaattttggccaaaggtgttgatgctgtgcacaagattcgagaggagggtgatcaaaggggatcatctagttctcaaatgacccaatcaagatcacctgaaagaagtcctgttagtgctcggtttcaacgctctgagccccaaaggtctcattctggaccacgaaatacatctcagtttcaacaaaggtttggtaggcaagagagggctgttgaagaccgtatcagggatgatgttcaaaagttttctagaggttctccacaagcttatggaaatagtggagctagaggtcgttcaagccagtcaagatctccaaggcatgccccttatacaggaaactcatataattcatttgatgatcgtaatcaaaacatgggtgcttataggaatgaaggatgggattctcatagaagagaatctggtatccagcctggtcatcagtttgattacaacgcctccccacagactttagaagaattagagttggagtataagaacgaggcaacagagctaatgaaaattcgtgacagagaagaagatgaagaaaatttcaagcatcgtgaggctattagagatttgagggagaagtacatgagcaaagtttccttggtaagggtcacacatgcaaaacagttggaagaatttcttcagcttgatgcgcagaggcgtcgacagcaagtgggtcaacagatgtcttctggttatcggggttttaaacagcagagttttcctgaatatgatgggtccactgccaatcctcctacttatgctggttctaatataccattggaatcgaggaacaggttctcaggcaacatggaaacttatcctaataggcctcatgataattttggtgaatttcataggcgtggagattttgcaaaagcttacaacagatattaaaattctgtatatcaatcaagtgggtccagattgatcgagtaggcagtttaatgcactggaggccataaggtaggtaagtatgttgattaatcttaggattggatggacatggatttcggttgatgggtctggttttcatttgaaatatggttgctcagattaagaactttgctgtaagttgtgatgcactattgggttattatccttgacttattaacgtgctactgcagcttggattgtgttacggggagatcctttgaaagattgattgattttagtagaatcaaatctacttttgttccc

SEQ ID NO: 7147 - DNA, 895 bp, Glycine max
cccacgcgtccgcccacgcgtccgcccacgcgtccgtacggctgcgagaagacgacagaagggagatgaagaaaatttcaagcatcgtgaggctattagagatttgagggagaagtacatgagcaaagtttccttggtaagggacacacatgcaaaacagtgggaaggatttcttcagcttgatgcgcagaggcgtcaacagcaggcggttcaacagatgccttctggttatcggggctttaaacagcagagctttcctgaatatgatggatccactgccaaccctcctccttatgctggttctaatctaccattggaatcgaggaacaggttctcagacaacatggaaacttatcctaataggcctcatgataattttggtgaatttcataggcgtggagatttcgcaaaagcttacaacagatattaaaattctatatatcaattgagtgggtccagattgatcgagtaggctgtttaatgcactggaggccgtaagggtaggtaagtatgttgattaatcttaggattgggatggacatgcatttcggttggcgggtccggttttcctttgaaatatagttgctcagtcgtgttaagaactttgctgcaagttgtgatacattattgggttattatgtttgactggtaacgtgctactgcagcttggattgtgttatgaggagatcccttgaaagattgattgcttttagcagaatcaaatttacgttttgttaaaaaaaaaccgaatttggtaccctatagggtgcttatgatttatttacttgctataaatttcttgagggggtggtctggttagtatctttaacacttttctgaatgatttacctacaacgaaatggttttacgataatgaatgttatcggatgtgctt

SEQ ID NO: 7148 - DNA, 1796 bp, Glycine max
tacggctgcgagaagacgacagaagggcacagaggcactccagccgagccggcggcggaaaactgcctcgtgggtaaggaagtgtgtattgcagcttggtccaactttcattaaacttggtcagttatcatcaacaaggtcagatctatttccacgtgaatttgtggatgagctcgcaaaattacaggacatggttcctgccttctctcctaagaaagcaagaaaattcatcgagagtgaattgggagctcccattaacatattatttgaggagtttgaagatcggccaattgctgctgctagtctcggtcaggttcatcgtgctattctgcataatggggaaaaagtagtcatcaaagttcaaaggcctggtctgaagaagcttttcgacattgatttgaaaaacttaaagttgattgcagagtattttcagagaagtgaaacttttggtggtccacttagagattggattggaatatatgaagaatgtaaaactattttgtatcaagaaattgattatataaatgaaggaaagaatgctgacagattccgccgagattttagaaacataaagtgggttcggatacctctggtatattgggattatactgctttaaaggtgttgaccatggagtatgtaccaggcatcaaaatagaccaggtggatacattaacttcgcgtggttatgatcgattgcgtatctcatcacgtgctacggaggcgtacctgattcagatattgaaaacaggtttctttcatgccgatcctcatcctggaaatcttgctattgatgtggacgaagcaattatttattatgactttggcatgatgggacagatcaaatcttttacccgggagagactgcttgaacttttctatgccatatatgaaaaggattccaaaaaggttatgcaacgccttatagatctcggagccctccaacctactggggacttgtcatcagtgaggagatctgtgcagtttttcctggaccatttgctaagccaggcaccagatcaggagcagaccctttctgcaattggggaggatttatttgcaatagcacaagaccaaccattccgttttccatccacctttgcctttgttctcagggcgttttcaacacttgaaggcataggttacacactgaatccaaatttctccttttctaagattgctgcaccctacgcacaggagcttttagagataaggcaaaagcagcgcactgcaccacagcttgtggaggagataagaaagcaagcagatgatgctacaacctataccatgtcaatgccatacagagttcaaagaatagaagagtttacaaagcaacttgaggcaggggatctaaaacttcgggtccgagtgcttgagtctgaaagagctgctcggaaagcaacgggtttacaaatggcaactatgtataccgtattaggaggaactctgctaaatcttggtatcactatgagcagccaaggcaacataactattgcgaatggatctttcattggtgcaggtatttttatgacactatttgtcagatccatgcaaagggtaaaaatgcttgataagtttgagaaaatgatataaatggttaccaacaaattcgattctttcaaacttatgtaaagttatcctcatcttcattttcttacttgtaatttgtaaatgttcaattttttaaattacacaagcatagcaaatttcacgaattttacagaaacatgatttgatgatgacactacaaggcattttatgacttcaagacaaagagaaaatcacagttttctaagtg

SEQ ID NO: 7149 - DNA, 826 bp, Glycine max
tacgaagacgacagaagggggcgaagggtaagaaaggagagagagaagctgcgcaccttttcatactagtgctgattgctgaaactgccatcgctcgccatttgcacaaagatcccaacaacacttgaaagttgaaacagaaaaacaccaatccctcatcgtactgttccgttatcaattctcgtgtttaagtctgcctacgttccgcttcctttgccatcagagcaagtccacgctttgaacccagtcgggtcacacatggctacaccaccacaatgggaatttagctgtgacatggaaatgtattttggatcggaggagaatgcttccattgtgtatgctgccttagcagttgacaaagagttacagcctgataaagtaaaacgacttatgacagtgtctgatggaaagctatcagtgcactttgaggcaacagaagccagatttcttcgggcatcatttagtgcttttgtagatgtcctgacactagccaccaaaactattgaagaatttggtcaagtaatgaagttgtgacgtctcctcatatattgaatgttagattgttgaagtggactatgacttttactgtctgaatgtacccttatttgtttctttcaagcaggaaaagattttcacattgttttgaatttgtattacatgatgtttcaagggtttaatatgtaatgcttagtcactctaattatcttcttctactactacctactctcaattcctgaatgctaattgttgacatgacacagacaaacatgacacttgttttcttatatttagaaatttgtaatatattgtatttgtttaaagaaaa

SEQ ID NO: 7150 - DNA, 593 bp, Glycine max
gcacgcggaaaggagagagagaagctgcgcaccttttcatactagtgctgattgctgaaactgccatcgctcgccatttgcacaaagatcccaacaacacttgaaagttgaaacagaaaaacaccaatccctcatcgtactgttccgttatcaattctcgtgtttaaggacacaatttgcttgatacattttcaagttttcatctccatgttttgattttgaagaataaggagtatgcaattgactactacagatatggttttactataagtggcctgtatatggttttgggtcttgcaagtgtaagcagtatggaggatattcaattggatatcagttgggacgatgctgtctgtcccatatgcttggattttcctcataacagtgttctccttcggtgttcattttatgataaaggatgtcgtgcttttgtttgtgacacaaatcaattgcactctaattgtttggatcgctttaaaaattcatgtggcatgccatcctctccagcgtctaatgcaatttccactgaaagtactgaaaatagtgatgatcctgaggtatcaaatggtcaatgcaatctgacttgccccttg

SEQ ID NO: 7151 - DNA, 1282 bp, Glycine max
aagatcacattttaggttgttttgagaaagcaaaaagaaaatcagtaggcgtagagaacagcaaagaaagaggaataatggagcaggaagagcacgaagtgtacggtgcagacattcccgacgaggagattgacatggacgcagacgccgagcaacaagatgagcaacttgcccccaatcacacaaacaaggttagggttttggtgttaggtttaggttacgttacttttcttccctctctctctctctctctctctctctctcattagcctcaaatcaacgagtatcgtgaaattgttaggaactggaggacatgaagaagaggctgaaggagatcgaggaggaagctagcgcccttcgcgaaatgcaggccaaggtcgagaaagagatgggcgctgttcaagattcgtcgggcacttccgcaactcaagctgaaaaggaggaagtggatgctcggtcaatctatgttggtaatgttgactatgcatgtacgcctgaagaagtccagcagcattttcagtcctgtggaactgtgaacagggtgacaatactgacagacaaatttggtcaaccaaaagggtttgcttatgtagagtttgttgagattgatgccgtgcagaatgctctcctgttaaatgaatcagaattgcatggtcgacaactgaaggtgtctgccaagcgtacaaatgttcctggaatgaagcaatattttggaagaagacctgctggtttccgatctaggaggcctttcatgtctgctccattctttccaccatatggttatggaagggttccaaggtatagaagacccactcgatacaggccatactagtgcacattctcagtttaataggtgatcacatattaattatgatgagacagggcgttgttaatttgccattgtaataattttcgttggtggagcaagaacataagctttcgtttacacagaagttagatgtccttgcctgttaacgctgtagaatgtatgatgcgaacaaatgtagttttgatcacttggctacccatcttgaatgttgatagcactcggcactccggtttttacttatacagtgatggaggcaactatgcaggggggaatttcaatagtttgttagtttgaacatcaaaattagactattcagtgcaatgttggattttttaaagaattgatattaacagtgttggaattggttaaaaaaaaaaaaaaaaaaaaaaaaaaaaaaaaaaaaaaaaaaaaaaaaaaaaaaaaataaaaaaaaaaaaaaaaaaaaaaaaaaaa

SEQ ID NO: 7152 - DNA, 1115 bp, Glycine max
acggctgcgagaagacgacagccgcaagatcacattttaggttgttttgagaaagcaaaaagaaaatcagtaggcgtagagaacagcaaagaaagaggaataatggagcaggaagagcacgaagtgtacggtgcagacattcccgacgaggagattgacatggacgcagacgccgagcaacaagatgagcaacttgcccccaatcacacaaacaaggaactggaggacatgaagaagaggctgaaggagatcgaggaggaagctagcgcccttcgcgaaatgcaggccaaggtcgagaaagagatgggcgctgttcaagattcgtcgggcacttccgcaactcaagctgaaaaggaggaagtggatgctcggtcaatctatgttggtaatgttgactatgcatgtacgcctgaagaagtccagcagcattttcagtcctgtggaactgtgaacagggtgacaatactgacagacaaatttggtcaaccaaaagggtttgcttatgtagagtttgttgagattgatgccgtgcagaatgctctcctgttaaatgaatcagaattgcatggtcgacaactgaaggtgtctgccaagcgtacaaatgttcctggaatgaagcagtattttggaagaagacctgctggtttccgatctaggaggcctttcatgcctgctccattctttccaccatatggatatggaagggttccaaggtatagaagacccactcgatacaggccatactagtgcacattctctgtttaataggtgatcacatatttaattatatgaagagacaaggcgttgctaatttgccattgtaataattttcgttggtggagcaagaacataaagctttagtttacacagaagttagatgcccttgcctgttaacgctgtagaatgtatgatgcggacaaatgtagttttgatcacttagctacccatcttgaatgttgatagcacttggccctccggtttacttatacagtgatggaggcaactatgcaggggaaaatttcaatagttttgttagtttgaacatcaaaattggactattcagtgcaatgttggatttttttaaagaattgatattaacagtgttggaattggtt

SEQ ID NO: 7153 - DNA, 1878 bp, Glycine max
aattcggcaccaggattggtaaagtattgaatcctgtgcatacatcctcacttatcctcttcctgcgactctcttctcattggttctccgtattctccctcaatcctattatccgtttcgtcggccccccccccccccattctataatcaatcaatggcaatggcttcttcaatccctaatgcgccttctgcgttcaattctcagagctacgttggtctcagagcgccactgaggaccttcaacttttcttctcctcaagctgccaaaattcctcgctcccaacgccttttcgtcgtcagagcctccgattcggagttcgaagccgccgttgtcgccggtaaggttccgccggcgcctcccgtgccgcccagaccggcggctccggttggaacaccggtggttccttcacttccacttcaccggcgtcctcgtcggaaccggaagtcgccggcgcttcggtcggcttttcaggaaacgagcatttcgccggcgaatttcgtgtatccgcttttcattcacgaaggtgaagaggatactccaattggggctatgcctggatgctacaggcttgggtggaggcatggacttgtagaagaggttgcaaaagcacgggatgttggtgttaatagtgttgtgctcttccccaaaattccagatgctttgaagtctcccacaggagatgaagcatacaatgaaaatggtttagtgcctcgaacaatacgtttgctcaaggataagtacccagaccttgttatctatacagatgttgcattagatccttattcatcagatgggcatgatggcatagttagagaagatggagttattatgaatgatgagacagttcatcagctatgtaaacaagctgtagcccaggcccaagctggagcagatgttgtcagtcctagtgatatgatggatggtcgggtaggagcactgcgtgcagctctggatgctgaaggctttcagcatgtttctataatgtcctatacagcaaagtatgcaagttctttttatggtccatttagagaggcactagactcaaacccccggtttggagacaagaaaacttatcagatgaacccagctaattacagagaggctctgactgagatgcgggaggatgaatctgaaggagctgacattctcttggtgaagcctggtcttccttacttggatatcataaggctgctcagggataattctcctttgccaattgcagcataccaggtttctggtgaatatgcaatgataaaggctgccggtgctctcaaaatgatagacgaagaaaaggttatgatggagtcactgatgtgcctccgaagggccggtgctgatatcatcctcacatattctgctctgcaagctgccagatgtttgtgtggagagaagaggtgaagttctctgattatgtagggcgttgttcatgtagaaggttgaagagtttataataccagtatctgctggattttggttattgtaaattgtttaagagggacatggaggtttgtgtatagagagacattcataataaaatattatggcctcgtttgatttaatatatttaaggacataatagaaaaagacttggccgttgtttttggtgttaattgtaactttacgtgtggattgtcaacccattgtatgaatgaaagtgtgcactcacctgcagaatatttcgtactgtaactctgttggtgctgaaatcaaggtgcattctgggaagtaaaaaaaaaaaaaaaaaaaaaaaaaaggggatttaaaaaaaaaaaaaaaaaaaaaaaaaaaaaaaaaaaaaaaaaaaaaaaaaaaaaaaaaaaaaaaaaaaaaaaaaaaaaaaaaaaaaaaaaaaaaaaaaaaaaaaaaaaaaaaaaaaa

SEQ ID NO: 7154 - DNA, 1344 bp, Glycine max
  misc_feature (185)..(185): n is a, c, g, or t
tcgagtcagcacgtaggccccccccccagatgaacccagctaattacagagaggctctgtgactgagatgcgggaggatgaatctgaaggagctgacattctcttggttggttcactttttatgtgtgtgtgtgtgcgcgcatgtgcatgcgcatgatctttgattataatttatactttttttnttctttatctatactattttcttttacaaacttgtaaaaaactggatttgcaggtgaagcctggtcttccttacttggatatcataagtctgctcagggataattctcctttgccaattgcagcataccaggttcttttctttgcccattctagcactaggcaaaacgtttctgataaaaagttgatcagatattcaatacattttaaccagtgaattctgctttaagcttgctgcaagtgacagaagtctatacgtagtagacaaatatcacacctctagtttaatatcaggctgaggtacaagtttatggttgctttaacagttattgctcttaggccgatatgctattacatggcattaaattctaatccaattcttttaaaaaatgattgaacggaaatatgtccgtaaccattatatatgctgcatttaagtcttgtaatttgggaatatgaactccctgcactgttaattcaattttcaactgtcaactaatgaaattcccgataagtacagaggctattttgatatgaagttgaagaagaaatttatttgttgtgctagtttagtagtttattaattataagatatcctaagttattatgcctttaaagctgggaataaaaggaaacttcagcatacttttatgtgaatgaaaagatatagttccgagtagtttaaaaacaagtttgttttgctttatcattttccccgtcctttttcataataattcttaattcgtggaacaggtttctggtgaatacgcaatgataaaggccgccggtgctctcaaaatgatagacgaagaaaaggttatgatggagtcactgatgtgcctccgaagggccggtgctgatatcatcctcacatattttgctctgcaagctgccagatgtttgtgtggagagaaaaggtgaagttctctaattatgtagggggtattgttcgtgaagaaggctgaagagcttataataccagtatctaaggctggatttttgtcattgtaaattgttttagaaggacatggaggtttgtgtagagactagagagacattcataataaaattttgtggcgtctttgatttcgaaaaaaaaaaaaaaaaaataaaaacacaaagcggccgctctgggggccaagcttactacgctgctgcgac

SEQ ID NO: 7155 - DNA, 1522 bp, Glycine max
gagaattgaacggtgggggtggtgagagtagattcaatggaggtgtgaataagtaaaagaatggagtctctttccgtcattgtcaaattggagcaaacgtgggcgcggctgttcccaactccctccctcatattcattcatttctcccacccaaattcatcgccctcccaatttgggaatttttcgaaaccctaaaaagatgaacccctacgacagcagatattctgacgcctcttcttttcgcggccgtcgtagtgatttcgttggacctattccgccgccgtctttcgtcggccgcggcggcgcggtttcctacggcgtccctggacccaacgggttccgatccgcacccgttgctccggtcccaccctttgtgcctccttccggaggctttaatgtaggtcgaggcggtggcagagcgggctatggtcatgtgagtgatagaatgggtcgtagcggtggtggaagaggtcgtggtggtggcggcggcgggggcggtagagccggagctcacggttttaggggctccgggagaggaggcagacacggtggtggttcttctagggatgatttgaacaacattgcacttccaaagcaggattttaagaatttggtcccttttgagaagaacttctatgttgagtgccctgcagtgagggccatgtctgagcaagaagttttgcattaccgtgcccgcggccggatcaccgtgccagggaacgatgtgccgaagcctgtaaggatgtttcatgaggcgaattttcctgattactgccttgaggttattgccaatctggggttttgcggagcccacccctattcaggctcagggttggcccatggctcttaagggtagagacttaattggcattgctgagactggctcgggtaaaactttgtcgtatctgcttcctgctttagtgcacgtcaatgcacaacctcgattggcacatggggatggtcccattgtcttagttttagcaccaactagagagttggctgttcaaattcaggaagaggctcttaaatttgggtctcgggcaaataaaagaagtacgtgcatctatggtggtgcaccaaagggtccccaaattcgggagcttaaaagaggcgtcgaaatagttattgctacacctggtcgtctaatagatatgttggaagctcagcacacgaacctgcggagagtgacttaccttgtcttagatgaagctgatcgaatgctagacatgggttttgaacctcagatacggaaaattgtagcccagattcgaccagataggcaaacattattatggagtgctacatggccaagggatgttgaaactctggcaaggcagtttctgcacaacccatacaaggtaattattgggtcaccatacctgaaggcaaatcaatctataaatcaaattgttgaagttgtaacagacatggagaaatacaatagattaatcagactgctgaaagaagtgatggatggtagccgaattttaatatttatggagacaaaaaaaaaaaaaaaaaa

SEQ ID NO: 7156 - DNA, 1205 bp, Glycine max
ctgattactgccttgaggttattgccaatctgcgttttgctgatcccactccaattcaagctcagggttggcccatggctctgaagggtagagatttaattggcattgccgagactggctcgggtaaaactttggcgtatttgcttcctgctttagtgcacgtcaatgcacaacctcgattggcacatggggatggtcccattgtcttagttttagcaccaactagagagttggctgttcaaattcaagaagaggctcttaaatttgggtctcgggcaaataaaagaagtacgtgcatctatggcggcgcaccaaagggcccccaaattcgggagcttaaaagaggcgttgaaatagttattgctacacctggtcgtctaatagatatgttgttggaagctcagcacacgaacctgcggagagtgacttaccttgtcttagatgaagctgatcgaatgctagacatgggttttgaacctcagatacggaaaattgtagcccagattcgaccagataggcaaacattattatggagtgctacatggccaagggatgttgaaactctggcaaggcagtttctgcacaacccatacaagatgtgaaagacataaaatgtgtgatcaattatgattttccaacaagcctggaagattatgtccacagaattggtcgaactggtcgtgcaggggctaaaggaactgcatacaccttttttacacatgccaatgccaagtttgctagggatctgattaagattttacaagatgctggtcaggctgtgagtcctgctttgtctgcattggttcggtcggctggttctggtcaatttggatcagggggaagttttcgctcaagaggacgaggaggctatggaaatcgaggtttaacgtcaggttccaatgccattcctctaggttcgaagcggccctggcattgtctatagttttggtgctgctttgggcaaattcttagttttacaaatgttggggtgttgattttgaacatgcatctatttgaccacaattacacttgaaacagcacattgttagattttaggacaaaaattgatcttattttttcaacgactgaagtccggaaagcatgtgttatgaatgattaacatacatttatcttattttttcatagacttggtaagaacagtagcttgataatagatgatcaaatattttcttacagtctttatc

SEQ ID NO: 7157 - DNA, 2674 bp, Glycine max
  misc_feature (2656)..(2656): n is a, c, g, or t
ggctcgaggtacttggttggcattatatacgaaatagcacttgctctcttccacttcttgttctgtccttatgttcttgttctagttcttctaccctcttcttcactcttgttccatcactgctttcagagcttgctatttctctttgaagaagaggggcacagacccatgaagagtctcgtagctgtgcttttagttatagtattaagcactgctctggaaagcaatggagaagatgatcatgaacgatgtaaacaggaagcagtggatcctaggcctcacagcgtgtcaatcttagagttcggagcagttggagacgggaaaacgctgaacacagttgcattccaaaatgcagttttttatgccaagtcatttgctgacaaaggtggggctaaactatatgttccatctggcaagtggcttactggaagttttaaccttaccagccacctcactctcttccttgagcgaggcgcaaccatcattgcatcacaggattatgcacactggactgcaatggaccccctaccctcctatggtcgaggaattgatgttcctggtgggagatatcgcagtttaatttatggacagaacttaagtgatgtggtgattacaggtgataatgcaattattgatgggcagggttctgtctggtgggacctaatcggtactcattccttaaattacagcagaccacatattatagaacttgttggttctgataatatcacaatctcaaatttgacatttttaaactctcctgcctggagcatccatccagtatattgcagtaacgttcaaatccagaagataacagttcatgcaccaactgagttcccttacacaagcggtatagttccagattcttctgagcatgtttgcatttacaacagcaatattagcactggtcatgatgcaattgtgctgaagagtggttgggatcaatatggagttgcctatggcaaaccaacctcaaaggtccacatccggggtgtttatctacaatcttcatctggcgctggcctagcatttgggagtgagatgtctggaggcatatctgatataattgcagagcagctccatattaccaactcaactattggcattgaactgaagacaactaggggtagaggtggttatatgaaaaacatcttcatttctgacgcaaaattggaaaatatttacttgggtatcagcatgacgggaagctctggctcccatccagatgacaagtacgatcctaatgcagttccggatgttggtaatgttacttttgagaatgtgattggtacaaatattgctattgctgggaatttttcaggaatagttgattcgcctttcactcctatctgtcttttgaacgcgaccttttcttccagttctgagtcatcatctccttcatggttttgttctgacataatgggaatctccgaggaagtgtttcctgagccatgtcctgatctgcagaacacgtattcaaacttttcctcttgcttttcttccctacatccgtcgtctagttatgtctcaagcgcatgagatcgccatctctaagaatctagtcatttctttgattcaacctgtacatgagacacaaaattcatattccatcaggaacttcattacaattttccaataaaaggaaattcttgatgtaaagatgttctttctcttcaacatttcaatgaaccttcctcttgtctgtgcatgaaaagtccgtctctgaatagtatattttatgtacagcctcaatttcttcattcatgtaaaagaaatttttgatgttggtgtacagcctaaagacattatttgctttcaacttaccatgtataatatggagtgctacattgatttgttgtccatggctgggctttgtgagggtgtgtggtgtggtgtgcagcttttgacaaaattacggttttctttgcatagttctctttatgtgataacctctggattaatctagactatctttgctcgttgtttcttgacattacattttgttttttggattgataaaatttagaggaaggggatggtgccccaatacaagataaggaaagcctttgggcttaaagtgtgcttaattgggtttgaatcgttttgttgtcatgacatgacaagtactaccaatctttaactaattaaggtaggagccatgggagtgctgcatggtctaaagttgaaagattgctgtcctaatgtcggggtagtgttttggattcatctcaagcattttgtaattgctagacagagctacatggtgacagtggtaaaggctatttccttgtcaccactaagtccatcaatggtagttaattgtaccactcttacccatcttgggaacctataacaactcgtgtcaactttcttatgaaagtaccgggattggatcgagcggaaggagttagtcttttacagcgtggtgaaccaaggtttgaaaccctattgaaaggggtttatatttagtgtttgatggtgctcaaagaggatttggagactgggaaacaaaaaaactttcttatggaagtagcactaaactggcatatgacatgcaaaacatggtgatcattatcatcaaatctacgggtgacactttccatcaattagtgtaatggtacctgaattagacaaacaacttttaatttgtaagggnaaaaaaaaaaaaagattt

SEQ ID NO: 7158 - DNA, 1151 bp, Glycine max
cggctgcgagaagacaacagaagggtacggctgcgagaagacgacagatggtgaaaggagaaaacaaaaaaagaaaaaaattgacttgtgtagcttctaatgtgtggacattaaactcactttctctgtagccatagaaattcacattttatcttttgcattgtgcaacttcctcgcgccatggctgctaccatcatcacatgcaagctctcactgcttttaagccttctctcagtttcactattgctgggtgtgagttcatcagatacccttcagaatgtaggggcaattcccccaacatgcaagcgcatagagtgtcccagctatgatgtcattcactttggcaacggctacgaaatccgtcgctataattcacccgtttggatttcgaacagccccattctagacatttctctggttgaagccacaagaaccggcttcaggaggctatttgattatattcaaggtaagaataactacaagcagaaaattgagatgacagcgcctgtgatcagtgaagtattacccagtgatggacccttctgtgagtcctcatttgttgtgagcttctatgtgccaaaagagaaccaagcaaacccgcctcctgcgaagggccttcatgttcaaagatggaagactgtattcgcagcagttagacagtttggtggatttgtcaaagattctagtgttggggaggaagctgcagccttgaaggctagtattgctggaaccaagtgggctgatgcagttgagaaaagccagaagagagctggccatgcttctgtttacaccgttgcacagtacaatgccccttttgaatatgacaatagggtcaatgagatatggttcttgtttgatattgaaaatgaaccacaaaccgtgtgacaaagtaagctttcaacatgaaagcaatatgcagagtgctgcagcactgaggtgttaggacaaggacatcatgaatggatgaataaagtgttttgcatttagctaaaacactgttttctgtttgacttgctttttggttcattgtagctatatagttcagaggtaattttactcttgaaaacttttcattatgaattgatatggttgttgaaatgagcatgtggtacatatatacttttttccaaaaaaaaaaaaaaaaactcgag

SEQ ID NO: 7159 - DNA, 2352 bp, Glycine max
  misc_feature (34)..(34): n is a, c, g, or t
  misc_feature (2343)..(2343): n is a, c, g, or t
catactctcattcaatgggcgcaacacgttgcanaatttttcacgaactcatagtccgtgctagctagagtgaaatgaaataggaataaattcagatgaaaattttgaattgaattaaattaaaataaaacctacaaatgttcatctcaccgttttctattgctagtattatttatttcactcatttttaattttctttttttatgacaataccaaataaataaataaaaaaaaagaagaggacaaaggagtgacgcgtcacgcgtaaattgtaaacattgtggaagtgttgttgttgttgtttatataaaggccgctacggagcccccccccccgggaagagtaagcgatagacagaggagagagaaagagagggagtaagtgggtaaaggaaagaaaactaaagaaacaaacctaacacaacacaaatccttgaaacgacgacggaaatggccgtttcgagctcgcacatgcgtttcacctttgagtgccgctccgatcccgatttctcgccccccccgccgtccttcgacaacctccgccgccgaaacttccgctcctccgcaggatccggcgcggcgtttcacggcatctcctccctcatcctccgcttccctcccaacttccagcgccagctaagcaccaaggcgcgccgcaactgcagcaacatcggcgtcgcgcaaatcgtcgccgcttcgtggtcgaacaacagcgacaactctccggccgccggggctccggcgccgcccgcggccaccgccacggacgccgctacggtgcctctccccgtcgtcgtcgccgccaacgaggacgtcgttgtctccgccgcggcagacgagaacggggctgtacagttaaacagtagttcttattcttcatttttgaaatccgatgcaagcaaaacgattcatgccgctgaaagactgggtaggggtattgagactgatggaattaccacccctgtggttaacacttctgcctacttttttaagaaaaccgctgatctcattgatttcaaggagaatcgtcaagtgagttatgaatacgggcgctatggaaacccaacgacggtggttctggaggagaagataagtgcattggagggggccgaatcaactgtgataatggcgtctgggatgtgtgctagcgtagtcctgtttatggcactggttccagctggtggacatcttgtgaccactacggattgttataggaagactagaatattcattgagacttttcttccaaagatggggatcacgaccactgtaattgatccagcagatgttggagccttggaatctgcattggagcagcacaatgtgtctctattcttcactgagtctcctaccaatccattcctgagatgtgttgatattaagctggtttcagagctttgccacaagaaggggactttgctctgtattgatggtacatttgcaactccattgaaccagaaggcccttgcccttggcgctgatctgattctgcactccttaacaaaatacatgggtggacatcatgatgtccttggtggttgcataagtggttcaattaaggtggtttcgcaaattcggactttgcaccatgttttgggtggtacacttaacccgaatgctgcatacctattcatcagaggcatgaaaacgctgcatctccgtgtacagcagcagaattcaacaggaatgaggatggccaaacttttagaggcacatcccaaggtgaagcgggtctactatccaggcttgccgagtcaccctgaacatgagcttgccaagaggcagatgactggtttcggtggtgttgtcagttttgagattgatggagatctacataccacaataaaatttattgattcattgaaaatcccatatattgcggcctcgtttggtggctgtgagagcattgtggatcaacctgctattttgtcttactgggatcttcctcagtcagaaagggccaagtacaagatttatgacaacctggttcgcttcagctttggagttgaagattttgaggatttgaaggctgatgtcctgcaagctctggaagctatatagacagttttcctgattcacccaagtttttttcttttataattgtgctatttgtttgttatcacatctggcgattcaattgaattttgatcgtctaatgttctgttggaattgtgttaagatgaatggtctctaatttggatgttatgaaacttgtgatgaattgttgaaattgaaacctctatttgatgatattcttacccgtttttcctaccaaaaaaaaacaaaaaaaaaaaaaaaaaaaaaaaaaaaaaaaatatgaaagcagtttcgtgtgaaatttgcncgaatgtat

SEQ ID NO: 7160 - DNA, 3020 bp, Glycine max
ccacgcgtccgcggacgcgtgggcggacgcgtgggcggacgcgtgggcaacactctaatatcatggcttttccttcttcttctccattctctttattcttcttactcctctccttttttgttttcgcttcatcggacgacgctccacaaacctacatcatccacgtggcgcaatcccagaagcccagcctcttcacctcacacacaacctggtactcctccatcctccgctccctccctccctctccccaccccgccaccctcctctacacctactcctccgccgcctcaggcttctccgtccgcctcaccccatcccaagcctcccacctccgccgccacccctccgtcctcgccctccactccgaccaaatccgccacccccacaccacccacaccccgcgcttcctcggcctcgccgactccttcggcctctggcccaactccgactacgccgacgacgtcatcgtaggggtcctcgacaccggaatctggccggagctcaagagcttctccgaccacaacctctccccaatcccctcctcatggaaaggctcctgccagtcctcaccagacttcccttcctccctgtgcaacaacaaaatcatcggcgccaaagccttctacaaaggctacgaatcctatctcgaaagaccaatcgacgagtctcaggaatcgaagtcaccacgcgacaccgaaggccacgggacgcacaccgcctccaccgccgcgggcgccgtcgtctccaacgcaagcctcttccactatgcccggggcgcagcggagaggaatggctacgaaggcaagaatcgcagcctacaagatctgctggaagctcggttgcttcgactccgacatcctcgccgccatggacgaggccgtctctgacggcgtccacgtcatctcactctccgtcggctcttccggctacgcgcctcagttctaccgcgactcgatcgccgtgggagcgttcggcgctgccaaccacaacgttctcgtctcgtgctccgccggaaactcaggacctggtccttccaccgctgttaacatagcaccgtggattttaaccgtcggagcttccaccgtcgacagagagtttccggcagacgtaattctcggagacggaagagtcttcggtggcgtgtctttgtattacggtgaaagcttacctgattttaagcttccattagtttatgctaaggattgtggaagcaggtactgttacatagggtctctagaatcttccaaagtgcaaggaaaaattgttgtttgtgatagaggagggaatgccagagttgaaaaaggtagtgcagtaaaacttgctggtgggttgggaatgattatggccaacactgaagccaacggtgaagagcttcttgcagatgcgcatcttttagcagctactatggtgggtcaaaccgcaggagataagattaaggagtatataaagctgagtcagtacccaacagcaacgattgagtttagaggaactgtgattggtggttctccttctgctcctcaaattgcttccttttctagccgtggaccgaaccatcttacatcgcagattctgaaacctgatgttattgctcctggtgttaacattttagcagggtggactgggcgtgtgggtcccacggatttggacattgatcctaggagggtcgagtttaacataatttcggggacttctatgtcgtgccctcatgcgagtggcattgctgcattgcttaggaaggcttatccagagtggtcacctgcggcgattaagtctgcattgatgaccactgcttataatgtggataattctggtgggaacattaaggatcttggaagtgggaaggagtcaaatccgtttattcatggtgctggacatgttgatcctaatagggcacttaaccctggtttggtttatgatttggactctaatgactatttggcgttcttgtgttctgttgggtatgatgctaatcagattgcggttttcactagagagcctgctgttgaaagtgtttgtgaagggaaagtggggaggactgggaagttggctagtcccggtgacttgaattacccttctttcgcggtgaagttgggtggggaaggtgatttggttaagtatagacgggttgttacgaatgtgggaagcgaggttgatgttgtttacactgttaaggtgaatgctccacctggtgttggtgttggtgtttctcccagcacgcttgtgttcagtggcgaaaacaagacgcaggcgtttgaggtcacatttagtagagctaagttggatggttctgagagttttggatccattgaatggactgatggaagtcatgttgtgaggagtccaattgctgttacattgagtggtgcatattcatcatccatttgaatgaattgctgtggagacacgtctttctcaggctatggatcattggatttagtctctttgtaatttttatcatgtttgcttattgtacaaacgacagaataacgacttcgaagtagttgatgaagggcttctgataatttggggaaatcagatgtgatttttaagatagttggatcagattattgtggtttcattacacgtctcatttgattgatattaggttatgtcatgctaagcgagatgtatatggcagcactgcagctagatggatttgccgaaatatactagggacatttgaatcttgcaagccttttctggcttatctctaactgatgtcaattggggtcggatggagcggtgaaccctcatcatcaatttgaattgcactcgggtgttgctgtggaaacacatcattcattcacaggtgatggatttagtcaagtctctttgtaattttctgtaatcgtattgccttattgtaaaaactataaaatacgttttaggtgtgctctttcttgcaagtgtactcaggaacaactttgaagcagttgacgaaggggttctaataaattattgaactaaaaaatagggtatctaaggtgtaatgatataaaaaaaaaaaaaaaaaaaaagac

SEQ ID NO: 7161 - DNA, 1176 bp, Glycine max
ttttttttttttttttttgaggcataaaatttcatcacaatctctatccagctacaagcttgcaattacaaatgaggggcaaaacaaaaagcagaaaaagctacaaaggaagcaaaaaccaaacacaatagtgtccgtaaaaaatggttgaatttccaatggcaagtatagaacaatttattctctcgttttttttttcctttgaaatacttcaaatttcattttgtctcggttaattgtgggaaagcaatattactatggtgttggcacattttcatcttgcaattgtggaagcacaagtaggatcatctttgtttgaccaactttctttaattcgacaagcctgcattggtctttcaatttggactacttctgcagcttccttctccaattgcctacaatatcttccaaacgtttctacaccaacctgaagtctaaaatctatgccaaatagaaagctcatctcgaacctgtttaattcagatgtgctcactcctccaacttttgcatagtaagcattgttgtagaatgcgtcatctataaactttgctgctagcatgatgcttgttatcagaagccggtgcacattaagtgaagtcaatttgatttctgtgtgctgaataaatctatccacatatatgtgtgccacaacaaagcatgatgggctgcaacctgagtacttgaagatacgatcaatgtactttcgaacactcagagtaggagctcttaaaccgtgaaatactgtaacaacatcttttatgtgctttgcctccaatgatgtttcgtttctctgaactgatctctcaagaagtgaagaaagaagtgataaaacccgaggacctcctactcctttgtctgattccttaagccccagcgaaaggtatatatctgagattacatcctcggtttcaagagcaagactccccatatccaagaaaacaaaattgtgaagttcttcgaagtgatgactgggggggggcctacgtagctgatccttattcttgttcttgtacataagggtgaggcagggaaacagtggtgctgtgaacaagatagatcatctctgtttccccacccacaccattctctgtgtgcagaagcagagcaacagttgaaagatactaatgttgtgtctgtctatgatgtgttgttctgttactcacataaaacgatttc

SEQ ID NO: 7162 - DNA, 1225 bp, Glycine max
aagcgataaaatttaacacaatctctatccggttccaagcatgcaattacaaacggggggcaaaacaataaaacggaaaaataaaaactacaaaggaaacaaaactaaacacaatagtgtccgtaaaaaatggttgaatttccagtggcaagtatagaacaatctattctctctctctctctttttttttttttactttgaaatacttcaaattcattttgtctcggttaattgtgggacagcaatatattgctacaatggtgttgccacatttttatcttgcaattgtggaagcacaggtaggatcatctttgtttgaccaactttctttaattcgacaagcctgcattggcctttcaatttggactacttctgcagcttctttctccaattgcctacaatatcttccaaacgtgtctacactaaactgaagcctaaaatctatgccaaatagaaagctcatctccaacctgtttaattcagacgtgctcactcctccaacttttgcatagtaagcattgttgtagaatgcgtcatctataaactttgctgctagcatgatgcttgttatcagaagccggtgcacattaagtgaagtcaatttgatttctgtgtgttgaatgaatctgtccacatatatgtgtgccacgacaaagcatgatgggctgcaacctgagtacttgaagatacgatcaatgtactttcgaacgctcagagtaggagctcttaaaccgtgaaatactgtaactacatcttttacgtgctttgcctccaatagcgtttcgtttctctgaactgatctctcaagaagtgaagagagaagagataaaactcgaggaactcctactcctttgtctgattccttaagtcccagtgaaaggtatatatctgagattacatcctcggtttcaagagcaagactcgccatatccaagaaaataaaaattgtgaagttcttctaagtgatgatgactatggcgttgtggcgggtgtatgtgctgattcttgttcttctagataagggtgtgaggcagggaaacagtggtgctgtgaacacagatagatcatgtctgtttcccctcccacaccattctctgtgcagaggcagagcaacagttgaaagataatgttgtgtctgtctatgatgttttgttttgcttctccgcggacccccccgtgcctcgagtccgccgcctccctttaattaatcccacaacctccttcc

SEQ ID NO: 7163 - DNA, 2713 bp, Glycine max
tcgacaccggaatctggccggagctcaagagcttctccgacgaaaacctggccccgatctcctcctcctgctcatggaatcccgccggccacgcctcccccgacttcccttcctccctctgcaacaacaaaatcatcggcgccaaagccttctacaaaggctacgaatcctacctcgaaagaccaatcgacgaatctcaggaatcgaaatcgccacgcgacaccgaaggccacggcacgcacaccgcctccaccgccgcaggcgccgtcgtctccaacgcaagcctcttccactatgcgcagggcgaagccagaggaatggctacgaaagcaagaatcgcagcctataagatctgctggaagctaggttgcttcgactctgacatcctcgccgccatggacgaggctgtctccgacggcgtccacgtcatctcgctctccgtcggcgcgtccggctacgcgccccagtactaccgtgactcaatcgccgtgggagcgttcggcgctgccagacacaacgttctcgtctcgtgctccgccggaaactcaggacctggtccttccaccgctgttaacatagcaccgtggattttaaccgtcgtagcttccaccgtcgacagagagtttccggcagacgtgatcctcggagacggaagagtcttcggtggggtgtctttgtattacggcgaaaaattacctgattttaagcttccattggtttacgctaaggattgtggaagcaggtactgttacatgggatctctagaatcttccaaagtgcaaggaaaaattgttgtttgtgacagaggagggaatgctagagttgaaaagggaagtgcagtgaaacttgctggtgggttgggaatgattatggccaacactgaagccaacggtgaagagcttcttgcagatgcgcatcttttagcagctactatggtgggtcaagccgctggggataagattaaggagtatataaagctgagtcagtacccaacagcaacgattgagttcagaggaactgtgattggtggttcagaaccttctgctcctcaagttgcttccttttctagccgtggacccaaccatcttacatcgcagattctgaagcctgatgttattgctccgggggttaatatcttagcagggtggactgggcgtgtggggcccacggatttggacattgatcctaggagggtcgagtttaacataatttcgggtacttctatgtcgtgtcctcatgcgagcggcattgctgcgttgcttaggaaggcttatcctgagtggtcacctgcggcgattaagtctgcattgatgaccacggcttataatgtggataattctggggggagcattaaggatcttggaagtgggaaggagtcaaatccgtttattcatggtgctggacatgttgatcccaatagggctattaaccctggcttggtttatgatttggacactggtgactatgtggcgttcttgtgttctgttgggtatgatgctaatcagattgcggttttcactagagagcctgctgctgaaagtgtttgtgaagggaaagtggggaggactgggaagttggcgagtcccggtgacttgaattacccttctttcgcggtgaagttgggtggggaaggtgatttggtcaagaataaacgggttgttactaatgtgggaagcgaggttgatgctgtttacactgttaaggtcaatcctccacctggtgttggtgttggtgtgtctcccagcacgattgtgttcagtgccgaaaacaagacacaggcgtttgaggtcacgtttagtagagttaagttggatggctctgagagttttggctccattgagtggactgatggaagtcatgttgtgaggagtccaattgctgttacttggagcggtgcatactcatcgtccgtttgaatgaattgctgtggagacgacgtctttctcaggttatggattattggatttagtctctttgtaatttttatcatgttggcttattgtacaaactacaaaataaccacgtacttccaggtagttgatgaagggcttctaataatttgcgggaatgagatgttgtgatttttaaggtagttggatcagattgttgtggtttggtatgtttatcatgttgagattaaaacacactatacatgtctcatttgactgatataaagggtatgtcatgctgaacgagatcaatatgacagcattgcacctagatgaatttgctgaaaatatgtatatggcagtccgtaatactaaggacatttgaatttttcatgccttttgtggcgtatctctcactgatgtcaattggtgcctgatggagccgtggactctcatcatccatttgagttgcattcgggtgtttctgtggaacacatcattcacaggttatagatttatttaagtctcttgtaattatctgtaagcttattgccttatttgaaaaactactaaaatacgttattggtatgctgtttcttgcaagtgtgctcggaacaactttgaagtagttgatgggagggcttctaataaattatggggctaaattaggatctgtgacatgagatgtgatttgtaagattgttggttcagattattgtggttctacgtatttatcatgttaaaattaaaaacacacaacacatgcctcatgcgatatgtaagggtatgtcatggtaaacaaaatgtatatggtgttatatttc

SEQ ID NO: 7164 - DNA, 1041 bp, Glycine max
attttttttggttcgcacgattcatttatctatctgcttctcttctctttgctcaacacaatctatatctatctcactcattcagacaccaacacatcctcatgtgtctaattctaccttgcttgtatttgtagcgctattactccttgctgtgtaaatggcacatgttgatgttattcgattacagtttcagccctttcggttctcctcttcctctttcttcaccccctcaccgctctctgctaagatcctattctctcctctcgcctattcttcttctaggccagcgccaccagctactcttgctttcccccccagaaagcatttgctttctttcaaggtatctgcaactgttgctgaaacaggtcagccaaaatggtgggaaaagaatgcaccaaatatgattgacattcactccacgcaagaatttctgagtgctatgagtcaagctggggatagactagttattgttgaattttatggaacttggtgtgcttcttgccgagcattattccccaagctatgcagaacagctgaagaacaccctgaaattgttttcctcaaagtaaattttgatgagaataagccaatgtgtaaaagactgaatgttaaagtacttccttacttccacttttatcgtgggactgaggggcagcttgaatcattttcatgttcacttgccaagtttcaaaaaataaaggatgccatcgagatacataacacagctcgatgcagcatcggtccacctgtgagcattggcgatctgcttgctgaaccttcttcagttgccaaggatagaccagcagaatctgtgtaaccatagtagtacttatgttctcgcttttgtattataagttgtctcacaaagggaaaccccaaagaaggctgtactccagagaaacttatgatgtaaaggatatatgtactctgtatatttactatttttatattttttttttcgtattagaagaattccgagcagaattgtttgttcaaaaaaaaaaaaaaaaaaccgagactagttccttcgtggcgaaaacc

SEQ ID NO: 7165 - DNA, 2248 bp, Glycine max
  misc_feature (49)..(53): n is a, c, g, or t
  misc_feature (2197)..(2197): n is a, c, g, or t
  misc_feature (2235)..(2236): n is a, c, g, or t
ctgcagttgttttataatttatcaatgaagtccttcttttgtttgtgtnnnnnccgcttttctttcattcagtgcagaccaaagataatggtgttttgctcgatagtagtgaatctgggccactccataagaacttagacaagttatcccagcatctgctccatcgagatgcaaatacttttccaactgttgtggggtttcattgtggtgctgaaaagaagaaggaagacgttgacaattgccgcagcaaatctcctagtgaatacatcaatctcaactcccatgtacctgttggcatgcaaatgatgcctacatcacaatcaagtagtccttttcctgcagttttcaaggcaaagcaggagaaatataattcaaaacttgctgagatgttccagaaagtggaagatcacgattcaggtgaccgaagatcatgcaacatgtccaattcaagtgtatgtgatggcagtcaaatgtctcccacatctgtaacttctgtaaccacagatcttgggttaggaatatgctcttctcctacctgcaataaattgaagaaacctgctgttcaatatacaatggagcctccaaaggaaatcccaagtcgattttctccaaacaataatgtggctgatgggaatatgttgaagcatccatcacagtcttcatcctgcttaagttttgactattgtggacaagttgatgcaaaaaatcccaaaattctttttgaagctctttccaaggaggtatgctggcaagatgaagctttacgggctatcgtcaaaacaattgtttgcagccctacaaagagggttaaacaccgtggaccaaatcagcctggggacatctggatgaattttgttggacatgatagacttggtaaaaagaaaattgctgtttctctagctgagctattgtacggtagccgtgaaagctttatttttgtggatctaagttctgaagaaatgaaaggatgcgatgtgaaattcagagggaagactgcccttgattttattgtaggggagtgttgcaagaaacccctgtctgtggttttccttgaaaatgtagaaaaggcagatattctagctcaaaatagtttgtctctagccatcaagacaggaaaaatttcagactcacatggacgagaagttagtgtaaacaatacaatgtttgttttttctttctcagattaccaaaatagtttgatgccaagaggggaaccttccaactattctgaggaaagaatactgagggcaaaagggggaggtatcaagataaaagttgaacatgtgattggagacatcagaagccaaagcatcagtgtaactaacaattcaatacatgcggttcctaatctaaatatcctaaacaaacgaaagttgattggtgacgataaatttcatgatctgcattttctctctgatacagctaaaagggcacatacaacatcaaattggctgttagatttgaatctcccagcagaagagaatgaacagaaacaaacaaatgatggaaactctgatcatgtctcaactgagaaccaaaacctttggttgcaagatttgtgtgatctggttgatgaaacagttgtttttaaaccttatgattttgaagcacttgcggatagagtgttgaaagtgatcagaagtaacttcaacaaaattcttggatccgagtgtgcattgcagatccagacagaagtcatggaccaatttcttgcagctcaatatgtttcagaccgggatagggaggtggagaactgggtggaggaagttctatgtgaaggatttacagaagtacagagaaggtacaacctcactgctagttctattgtaaaactttttacgtgtcctgagcaagctgctggtgtacaccttcccccaaggataattttagactgacttcaaccagcaaatgttgtcttttctgtatggatgtataatttagctgtagcatatagtgaaactaatttagccttcaatcctattattttgttgggtttgtttgtctaggttttaattgtgtataatatgtaatctgcagctagtgctatgtgtgattatcctttgcatatttaaatcaaatgccttctttgtttcttttattaaaaaaaaggaggctaagctgttgcttgatgtaattgattaatacatatattgatgaatcggtaaagacccaaaaataagaggtttgtgttttatgnttccccccggacccttgggcagccgctctcccaaaacnngcttcgtcgcgg

SEQ ID NO: 7166 - DNA, 2243 bp, Glycine max
ctctcttcatttaactctctcaactatgactttgctttccgcgcgattcaccagctaaaccaatttcaatttcttcagctacgtaggcccccccccccttttccatgtctcaaatgatcagaaaatcaatggaatgaagaaaatgactatccatctatctatgtagtcttgctttcaataatatctacctagatattatattatcatctcttttcccagcacaagcaccggttatagaggctagcttctaacatgctgctttttggttttatatatatttgttttggcagtacctgcttcctcaaaactactattggttttggaatttgccccaggtagctagtttaggacacacgatttttttttctcttcaaaaatgatgtctgaagaaaccttttctgttcctcccaactccaccattagagccacctccttggttcatcatgttcatgttcaacccccaagcccaaaccctaattcaaatccagctaagagaaggagaagtctacccggaacaccagatccagatgcagaagtggtggctctttcacctaagtccctaatggccaccaaccgtttcttatgtgaagtttgcaacaagggttttcagagagaccagaatttgcagctgcatagacgtggacacaaccttccatggaaactgaagaagagaacgaacaatgatcaagtaaggaagaaggtgtacgtgtgccctgagaagagttgtgtgcaccatgacccctcaagagccttgggggacttgacagggataaagaagcactatagccgaaagcatggcgagaagaagtggaagtgtgacaagtgctccaagaaatacgctgttcaatccgattggaaggcccatagcaagatttgtgggactagagagtacaaatgtgactgtggcacacttttctccaggaaggacagcttcataacgcatagagctttttgtgacgctttggctgaagaaagtgcgagggtaacaacaattccagcagctttaagcaacttgagaagtgatcaccatcatcatttgaccaatgctcaagcttcgagaatccctcagattttttcagggtttcactcatcagatcaattcggtggtggctcatcagaagcattattggcgaatcatcatcatcaacaaaagctaaggctaccactatggctagatcaccaccaagtcaataatactcaagtacttcaccacactcttgacaacttctcaaccgaaccgagtgctttcacttcaggaacaaactctgtgcctcatgatctagtacaaacaatagacatgtttgggccacagacacagtttgtgaattaccgttacccagaagcatcatttggaggtggcaatgccaacttgtctgtgctaccgccacatggactgaagcaagaacaagaagaaaacaaacaacacttgtcgcatagcggagcctcttctaataacttgtacttgagtaatagtattcagaacccacctcatcatcactacatgtcagccaccacactgttgcagaaagcggttcaaatgggttctacaaggatcagcgacaacgtatttggctccatcgtgggtaccaccaacagaaacaacaacaacgacaacaacaccaaccttgaggttcagaagctgaacgagttggtgagtatggaagctgggtgcaacaacaaccttggaggtggtggtgatgggtatttattatatgactcgtttggggttgtgaatggcaccgataagggtttggagcacatggtgatgccggtggatgaagagacacaacaagaatcaattgtgggaaactcactatgctcaaataacaaaaatcaacttggtttaacaagagacttcttgggtgttggagataataataataatcttaaccctataagaagacctttttttcaacaagaccttgttgaatttaatgcaatggggtcagcctcagcctcagtcatgaacctgcagagccagtacggtggacactactgctagtgttagctatagtttcagtttcaacttaatttcatactttcctatttaatgaaacgtaacatagagctaaagaaactagtgaagttgtgtcatagtgatatatatagctagctagtagtatctagtagttactcttataaactgaacaatatattaaagtcgagtaagagtaagatatatctttctactcaactcttataaatctttttattatcaaaaaaaaaaaaaaaaaagaattcct

SEQ ID NO: 7167 - DNA, 614 bp, Glycine max
taatcgaaaaaaaaacctcgacgagtacctcagtgtgagcgttctgccatactcctgcgttcaatcgacttcaccatcttcttcttcttctgctgtctcccccatagatggattggcaagggcaaaagctagcggagcaactgatgcagataatgctgcttgcatttgctgtgattgcatttgttggtggatatgtcatggcttctttccaaatgatgattctcatatatgctgggggtgtggttttcaccaccttgctcactgtccccaattggccccttttcaatcgccatccacttacgtggttggatccaactgaggtggaaaagcatcccaagccacaaccatctgtcaatgtaactcaaaagaagaaacccgttaagaagtaggttttttttattataaaccttttttgggggatgatatatctttgaagtacttgatgctttgacagtaatttgcagttcttaacctcttcccccttcagtggatattacagtgtacaacaatttatttgctttcttttagacattacttatagttgtgtagttttgttggtttggttagctattttccttctttttaaaaaaaaaaaaaaaaaaaaaaataaaaaa

SEQ ID NO: 7168 - DNA, 1221 bp, Glycine max
ccggaattcccgcctcgacccacgcgtccgcgaaagtgtaggtgacgatggaattggaagttgacgagaacgacttgaaagccgccggcgctgaactcttcgccgaaggtggccggcgaggcattcgtatcaatggctggttgatcgagactcggaggcactccatactgaactcttccacattccaagagtgggaacagaaactcgatacgtctcatttaccagaaatggtttttggggaaaacactttgattctaaaacacttgagcagtggaaccaacattcattttaatgcatttgatgctctacgtggctggaaacaggaagccttgccgccagttgaagttcctgcggcggctaaatggaaatttagaagcaagccctctcagcaagtaatactagattacgactatacatttacaacaccttattgtggaagtggcactattgagattgataaagatctgaatgagggagagacttctaaggaaaccagtgatatccattgggaagactgcaaggatcaaattgatgtagttgcacttgcatccaaggagcccatacttttctatgatgaggtggtgttatatgaggatgaactcgctgataatggagtatcacttcttactataaaagtgagagttatgcctagctcttggtttcttctgttgcgtttctggcttagagttgatggagtgttgattagactgagagaaacacgtatgcattgtgtatttggtggaagtacaaatcccattatacttcgagagagttgctggagagaatctacatttcaagctttgtctgcaaaagggcacccttttgattctggtgcgtatggtgatccgagtttcatcagccagaagctccccatcataatgcataagacccaaaagcttgtaatttcctcttaaagttataagactgtaaatccccataatgcaaaagggttcttgttcatatttattcatctttaccatggctgtttggaaccataaattgcttcttatgagataagctcatagatgcatgctaatcatgttctgttcttgtacgaaaggttggagggagggttggggtgagatctaactaatatgcgagggattcattttacatgaaaaattgagaagtttattacttatatataggttgaagttaattctataatttatgatacgaacttatgcatttggtcacaattttaactgttaatttctaata

SEQ ID NO: 7169 - DNA, 1175 bp, Glycine max
  misc_feature (956)..(956): n is a, c, g, or t
  misc_feature (977)..(977): n is a, c, g, or t
cccacgcgtccgcccacgcgtccctacggctgcgagctcagggacgcagactggaaggtgaaggtgaaggtgatgatggaattggaagtcgacgagaacgacttgaaagccgccggtgctgagctcttcgtcgacggtggtcggcgcggcattcgcatcaatggctgggtgatcgagactcggaggcactccatactcaactcttccacactccaagagtgggaacagaatctcgatacgtctcatttaccagaaatggtttttggggaaaacactttgattctaaaacacttgagcagtggcaccaacattcattttaatgcatttgatgctctacgtggctggaaacaggaagcattgccgccagttgaagttcctgcggcggctaaatggaaatttagaagcaagccctctcagcaagtaatacttgattacgactatacatttacaacaccttattgtggaagtggcactatggagattgataaagatccgaatgagggagagagagagacttctaaggaaaccagtgatatccattgggaagactgcaaggatcaaattgatgtagttgcactagcatccaaggagccaatacttttctatgatgaggtagtgttatatgaggatgaactcgctgataatggagtatcacttcttactgtaaaagtgagagtcatgccaagctcttggtttctgctgttgcaattctggcttagagttgatggagtgttgattagactgagagaaacacgtatgcattgtgtatttggtggaaatacaaatcccattatacttcgagagagttgctggagagaatctacatttcaagatttgtctgctaaagggcacccttttgattctggtgcgtatggtgatccaagtttcatcagccagaagctccccatcataattcttattttctaaagcttgtaatttcctcttaaagttataanactgtaaattcccagttgtcngagttttccccccctcttaaaaagattcatcttttcccatggctggaaaagagaaaagttgcttattatgagataagctctagatgcatgcaaaacatgttttgttcttgtacgaaaggttggagggagggttgatctaactactatttatgtgagggactcatttacatgaaaaatgtagaagttacagttattaac

SEQ ID NO: 7170 - DNA, 769 bp, Glycine max
aatcatatatcgtattgaagaaaaagaaatactcataaacagcgcctataaattgctacatgcatgcaagaagggacaggcagtgcaaaactcacaacacatctaaacaaatatcaagaacaatggcttatgctaggcttgctcctatggctgtcttcttgcttgccacttccaccataatgttcccaacgaagatagaagcagcagattgtaatggtgcatgttcacctttcgaggtgccaccgtgccgctcacgtgattgtcgttgtgtccctataggactatttgttggtttctgcatacatccaactggactttcatctgttgcgaagatgatcgacgaacatcccaacttatgtcaatctgatgatgaatgcatgaagaaaggaagtggcaatttttgcgctcgttaccctaataattatatcgattatggatggtgttttgactctgattctgaagcactgaaaggcttcttggccatgcctagggcaaccaccaagtaatatggtgggtatgccaaagtgggcatgcttgatgcatcttctactacttaaaaataaaagcttatgatgcatctactgctttaaacaaaagagtgctccactacgcaacttttgtttccaacttatagttggttacgttttatgtaaactcaacccatgtatgttttggagcattccagttaataaaaaatgtttctatacaaaaaaaaaaaaaaaaaaaaaaaaaaaaaaaaaaaaaaaaaaaaaaaaaaaaaaattaaaaa

SEQ ID NO: 7171 - DNA, 2974 bp, Glycine max
ggctcgagcagcgcgtaagagtaggagtaggagcacgtaagacagagcagagaagattgtttcaaatttcaatgcaaagggcgttgcaatcgatcaacgatctacagttgcgggacccaccaaactaccaactacagctccagtggcagcgccgcactcgtcttgtctcaaacaaatgcaacaagcggttattcttatagttattgaggaggagtagtacttataagaggaagcagatttgattctgattctaatttatttgattctttattatttataaattgaaaagaaagtcacgctggcggtgaagaacgtttctgcggcggccgaggaggaggaacacatgacgctgatttccgatgttgagaaccttgcggatgccgaaatccccgacaccgcacatcaaattagcaccgattcatggtttcaagtggggttcgtgctgacgacgggaatcaacagcgcgtatgtgcttggatattctgggaccatcatggttcccctgggttgggcagggggtgtggttggtttgattctcgccactgcaatatcgctctacgcgaatgctcttattgctaggctccatgaatatggaggaacaaggcatattcgatacagagatcttgctggatttatctatggtagaaaagcttattccctcacatgggctctgcagtatgtcaatcttttcatgataaatgccggctacatcattttggctggttcggctttaaaggctgcttatgttctatttagggaagacgatgggatgaagcttccgtattgtattgccatagctggatttgtgtgtgcaatgtttgccatatgtattccacatctatcggctcttggaatttggctgggattttcaacagtcttcagcctagtatatattgttatagcatttgtactgtcaattaacgatggtaatcgctcattctgtgatgtgtctgttacttctcaaatctcaattcaatatgcttcttcaaatcaattggccttgttgatccactttttctcctgtaaagttaacaatttccatctacatgtcatctgacatgtaaacattgtcatttgaaattcatcctatgaatatattcttgtgttagaagaaagtaatgtgcaagactgatgctaggttttctgtttcccagtgcccctgtaaaaaagagtttcttttgttcccgttcatgttattagcaattacaattaactgtgttatctgaaatagagataaataactagtgttcttgcatacatcttaaattcctgtttaaatctcttgatttagttcgttgagtttcttcattctgtcatccctaatctcattatctttgcttttttcttctttgcactccctttttgtgcttatcagtgattataacgttcctcatttgtgattttgttctgctgctggtatactgtgggcagccaattgttttattgctaaaggatataaactagaccttaaagtgcccttcttttatttagtatttcagctgatgcctagtattatgatttagttggtgagatttttttttaggaaattgcatccctcattgttgatttatctttttatattcaccacttgctgtgtctcaatgcaagtcagaaggtattattcgtcggccccccccccaggtacctccacatacttggtattcatgctcgagctggaaacatctacagcatggtggggttaactctctttagtagggatttttttttttcctacccaagattcaaacccactaccttcattaaggggaaacaagtatataccttttgaaccaaccaattggtgtaaaaaagaattctctttgagaactagcaaaaggatataatttattcttaaacaatatacagacttgctctttcatttatatactagagtatagttcgaacatcaaatcatattacagaacattcactataaatgatgattcgcatcttttttcccccatttctcttctaacttgttttcaagctttcagttaggctaaagcattctccagacttttcttcatgggtgactatactataattgagaatcacaatgttttacttcagaacaattgcttttctctatgcttagtttgttcagtttttatatttttattaggtttaacttgatgaactcggagtgaatttgcttaataacctccccccttgcatcaataggtataaaatcaccacctggtgattatagtattccggggacatcaacaagtaaaatattcacaacaattggggcgtctgctaatcttgtgtttgcatataatacaggaatgcttcctgagatacaggcaacaatcaggcaaccagtagtcaagaacatgatgaaagccctgtattttcagtttactgttggagttctgccattatatctggtaacctttgcaggatactgggcttatggatcttcaacagcaacctatttgatgagtgatgtgaatggtccagtttgggctaaggccatggccaatattgcagcctttcttcaatcagtcattgcattgcatatatttgcaagtccaatgtatgagtatttggataccaaatatgggatcaaagggagtgccctggctttcaagaacttgtcatttcgagtcttggtaagaggtggctacctgactgtaaacacatttgtatcagctctgttgccatttcttggagatttcatgagcctcactggagctatcagcacatttcccctcacatttatccttgcaaaccatatgtacctagtgacaaatgagaacaaactaacatccacccaaaagctctggcattggatcaatatttgtttctttgccctcatgtctgctgcggcagctattgcagccctgcgacttattgatttagactccaaaacgtaccatgtttttgcggatttatgattaaatgcattatattctttcagtaattctaatgttaaaaaaaaaaaaaaaactcgagactagttctctctctc

SEQ ID NO: 7172 - DNA, 921 bp, Glycine max
  misc_feature (774)..(774): n is a, c, g, or t
  misc_feature (838)..(838): n is a, c, g, or t
  misc_feature (851)..(851): n is a, c, g, or t
  misc_feature (886)..(886): n is a, c, g, or t
tcgagtagctacgtaggccccccccacatccgacagcaaaagcttttgttactttatgccccatggaaggtccttagttttctctctcttcatctcaaagtttcactctcactcttcttcttcttcttcttcatcctttctgatctgtgctgttttttcagggtacaacaaaattgggtgctttcggttaaactgtgatgtctccgccagtgctgagcataggggaggaggagggtaaaagcaatgtcactttgttggtttcctcatcaaccaccatggaaagtgtgtgtctcaagagcttagaatttaaagagcgcaactacatgggattatctgattgttcttctgtggacagctcggttccgtccttctctgaagagactaaaagtaatctgaacctgaaagccactgaactcaggctcgggcttccaggatcacagtctcctgatagagattctgatctttgcttaagaagctcaactcaatttgatgaaaaaactttgtttccgttgcgtcctttgactgatgatcaccattcttcagccaagactgctgttttgggaaacaaaagagggttctctgatgccatgaacggcttctcctcagaggggaaattcctagttgattcggaggccgccaatccgatactgtctcccaggcctgcttctaacttgggattaaaacctggttctacacttgagaaggttggagttcagcaaaccaaaatgaaagaagtagcaacaacaaaggccaatgaaactagacccactattngatggtcctgcaaataataattacagtgcaccagctacccaaggcttcaggttgtggggatggnctcctattaagancattccgggaaaaattcatttggcttaccactttnaaaggaccaatggaagaaattgattgggaaaaatt

SEQ ID NO: 7173 - DNA, 1486 bp, Glycine max
cggaattcccgggtcgacccacgcgtccgggcacaaagcaaagaaattttgaacaacagggtgtacaaaattgggtgctttcggttaaactgtgatgtctccgccagtgctaagcatgggggaggaggagggtaaaagcaatgtcactttgttgggttcctcatcaaccgccatggaaagtgtgtgtctcaagagcttagaatttaaagaacgcaactacatgggttcatctgattgttcttctgtggacagctcggttccgtccttctcagaagagtgtaaaagtaatctgaacctgaaagccactgaactcaggcttgggcttccgggatcacagtctcctgaaagagattctgatctttgcttaagaagctcaactcaattagatgaaaaacctttgtttccgttgcatcctttgactgatgatcaccattcttcagccaaaactgctgtcttgggaaacaaaagagggttctctgatgccatgaatggcctctcctccgaggggaaattcctagttgatttggaggccgccaatccgatactatctcccaggcctgcttgtaacttgggattaaaacctggttctacccttgataaagttggggctcagcaaaccaaaatgaaagaagtagcaacaacaaagggcaacgaaactagaccagagcattgatggttctgcaaataataacagtgcaccagctaccaaggctcaggttgtggggtggcctcctataagatcattccggaaaaattcattggctaccacttcaaagaacaatgaagaagttgatggaaaagtgggggttggtgcactgtttgtcaaggtcagtatggatggtgctccctatttaaggaaagtagacttgaagaattactctacatatccagaattatcttctgctctagaaaagatgttcagctgttttactatgagtaaatgtggatctcatggaattctgggcagggagatgctgaatgaaaccaagctgaaggaccttcttcatggatcagaatatgttcttacatatgaggacagagagggcgattggatgcttgtgggtgatgttccctgggagatgtttattgaaacatgcaagaggctgaggatcatgaagagttctgatgccattggtctagctcccagggctgttgaaaaatgtaagagcagaacctaggcagtaccagtgttcctcttcgaacatggtgtattggaagcgagaactgaaggcatatgggactggatagaatctcatactaagctgccataatccttctattgtttattatgtgtccgttttatgttgtcatggcgtttatgatttagtaagcttcttttcaagattgttgtgataaaacttaacaaaactctaagacttgactgtgggagtagctatattttatgtacccgagttaatgttatggttgaaggatctttgatgtgttaaaaaaaaaaagcctccgcggggtgtcccatctttgtgtg

SEQ ID NO: 7174 - DNA, 1608 bp, Glycine max
atataaagaaagatgtggtctcatggattctcctcctctatatcctacttagtcaacagctgaggagcagggcatatccatggcagaaccaccaaagggggatgaggaggacggcggagctgctttcgttctccaatccaaaggtgaatggtggcatgcggggtttcacttaacgaccgcaattgttggacccacgatactaaccctgccatacgcgttcaggggattggggtggggacttggatttatgtgcttgacggtgatggggatcgtcaccttctactcttacttcctcatgtccaaagtgctcgatcactgcgaaaaatccggtcgccggcatattcgtttccgggaactagccgctgacgtcttagggtccggttggatgttctattttgtaatctttattcaaacggcaatcaacactggcgttggcgtaggggcaatcttgcttgcgggggaatgccttcagatcatgtactccaatatctcacctcatggacccctcaaattgtaccactttatagcaatggtgacagtgataatgatagttttatctcagcttccttcttttcattccctgcgacacatcaacttgtgttcactacttttcgccctgggctacaccatcctggtggttggtgcctgtattcatgcaggtacatcagaaaatgcccctccaagggactattccttagaacctaagaagtctgcaagggccttcagtgccttcacttccatgtccatacttgcagcaatatttgggaatggcatattgcccgagatacaagcaactctagcaccccctgccactgggaagatggtaaaaggcctttttatgtgctattccgttatttttgtaacattctactctgctgcagtttctgggtattgggtatttggaaacaaatccaactcaaacattttgaagagtctgctgccagatagtggacctcctttggctccaacttgggttcttggacttgcaatcatctttgttcttcttcaactctttgccattggtctggtttattctcaagttgcttatgagataatggagaagaaatcagctgatgtgaggcaggggatgttttccaaaagaaatctcattcctcgcataattctccgaacaatttacatgatattctgtggggttttggcagccatgctaccattttttggagacattaacggtgtggttggtgctattggtttcatccctctagatttcattttgcctatgcttctatacaacatggaatacaagcctccaaaatcatccttcacttactggatcaacgtctcaattatggtgatattcacgggtgctggaatgatgggtgcattctcttccataaggaaattggttcttgatgccaaccaatttaagttgtttagtagtgatgttgtggattaacctaatgcatacataaatcatcaatgcagatagataaaagcactgttcccagcattggtgatgtactggagttcatggtgggtttgtgtatacgctctagattggtttttcaaaacctgcaaaaaaaatttatgaaaacaagcaggtcttcattgcaaaaagaatagaaaaagctcaaaatgcaattatct

SEQ ID NO: 7175 - DNA, 736 bp, Glycine max
ttttttttagtagtatgctaaataatttcttgattggctaacgcatgcgaaccttttttttgagagagaattcagaaacatttattgatccaaaacaaatgatgaaggtttgatttgagatgaaaacatgaaagaaaagctgctggaattaaagataagactacatgaaaacgagagagagtaccgagagagtgactaggcagagggagttggaggcggaggcgtaacgggagcagaagaagcgtcagcgggaataacgagggtccaatcaggaggaagaggagggagtggatcgtagacggtgggcttgcggtttctatcccatgcctgcgtcttccgaggccgagtcttcatgtgatgcgccgtcgctttcttctgcggcctagacgaacacactatcgtcaatccaccatcgcttctccttccaattcccattgcttgcgacgccgccatcaccactccacacccgaacatgcttgaaaccaacgacatctctttcgctctccccttccggcacgagggagattcaagtgaacaagcaatctgaggaccttcactttggattatatgaagtgtggagcggaaaatggaagggaggccttgaaattgtcagagccctcatcaaacctttaacttaattgcatgcaactcatcataccatatatcgttttcttcatttgccaactttgacaagtggattaattgtttgtggtttaattattattattactttgta

SEQ ID NO: 7176 - DNA, 1019 bp, Glycine max
tcagctacgtaggcccccccccccccccatactttcttcggtgatagaaagcacatagaagagaaagaaagaaaacaaagaggagaaagaaagtagttgaggaagatacaaacaatttttgcagattgttgagaatgcctttcaagaagcctcatcacacctcagacaagaactacataacaggggacgacggaggcaagttcgagatacaacctagaggactcaacattgtgtggggaaatgattctcgatactggaaaattccagaacaaggtcctgcggagctgatccaagtttcatggttggaggtatccggcgtggtaaacttaccaggtgtcaagaaatatagggttgaattcgaagtgagagttaaagacgatgggttcggttggagtggcacggacgtgctagtgatggctaagattgggaaaacgggaaaatatacgtataaggtgacgaaactaaaccctggtgaaaccttgaatattccaaaatcaactgacccacttgagattcaagtgaacaagcaatctgaggaccttcactttggattatatgaagtgtggagcggaaaatggaagggaggccttgaaattgtcagagccctcatcaaacctttaacttaattgcatgcaactcatcataccatatatcgttttcttcatttgccaactttgacaagtggattaattgtttgtggtttaattattattattactttgtatttggcgttgagtactactgtatgatatatagatgataatatgtgtccatgctctgcactagctgagacctggattattccaacttgcaagtgctgtgagaataacagtgtgttctggtcatgcatgcatgctgagagaaacaatgtatgtcggtcttaaaaagttcactgtatttgcataaactatatgtactaaataatggatttacaagtgtgttttttttaaaaaaaaaaaaaaaaaacacggggcgcgtgcccgcgctcggcgttcctgccggtccgtgtacctgcaggc

SEQ ID NO: 7177 - DNA, 2392 bp, Glycine max
tgaagcaaggccttttgttgcgttatttaaggtgctttctaaccccaagtccttcaacttcatagcggacgcgtgcacaggtaagtcacatcacatgagagtgtagttggtcagtttttcacgagacaaagttctcccaaacacttcaacatggcttcttcagctatggaaacctgcaaatcagaggatttgcacatgcaggttgacattgagaagaacgcgaaggacataaggtctcagtgggtgcttaacgctcctgagcccccaagtccatggcgtgtggttgcagattctgtgagcaaaactatctcccactataaacataaactttcctctctcatagatcaaccctgcaccacactcctcctttcagttctgcaggtggtttttccaattcttgcttggggcagaaactacactgctactaagttcaggaaagatcttcttgcaggtctcactattgctagtctttgtattccccagagcattgggtatgccaccttggcacatcttgatcctcaatatggcctttatacaagtgtggtaccaccacttatctatgctgtaatgggaacctcgagggagatagcaattggtccagtggcagtggtttctcttctgttatcctcaatgatggagaaattagtagaccctgctactgatccagtgggttatacaaagctgattttgcttgctactctctttgctggtatctttcagacttccttcggactcctcaggcttgggttccttgtggatttcctatcccatgctgcaatagtaggatttgtagcaggagcagccattgtgattgggcttcaacagttaaagggactcttaggaatcacccattttacgaccaaaaccgacatagtctctgtcatgaaagctgtttgggaagcagttcataatccatggagccctcgaaattttatcctgggatgctcgttcttggtcttcatcctaacgacgagatttttgggtaaaaggaagaagaagctgttctggttggcatcaatctctcctcttgtatccgttgttctgtcaactctaattgtgtttctcacaagagctgataaaaatggagttaaaattgtgaaacatgtcaaaggggggttgaatccaagctccctccatcagttagacttcaataacccctacattggagaagtggccaaaattggactagtggttgctgtcgttgcccttactgagtctattgctgttgggcgatcctttgcatccatcaaaggataccaacttgatggaaacaaggagatgatgtcaataggtttgacaaacatcataggatctttcacctcctgctacgttgcaaccggttcattctcccgtacggctgttaattatgcggctgggtgtgaaactttggtgtcaaacattgtgatggccatcacagtcttgatatcattgcagtttttgacaaagctattgtattatactccaacagctattcttgcttctgtgatcctctctgccctcccaggactcattgacgttagtgaagcttacaaaatttggaaggtggataagatagactttcttgcttgcgctggggcattctttggagtactgtttgcttctgtggagattggtctacttgttgcggtgttaatatcattttcaaagatcattctgatctcaattcgaccagggacagaaactctaggaaaaattcccggaactgatttgttctgcgatgtctatcagtatcctatggcagttaagattcccggggttatgataatacgagtcaagtctgcgttgctttgctttgcaaatgccaatttcgttagagaaaggatcattaaatgggtcactgaggaagaatcagaagatgacaagggaaattcaagaagcaccattcaacttctaattcttgacacctccaatttggtgaacattgacaccgctggaatcactgctctagaggaactgcataaaagtttgtcttcacatggaaaacagttagccattgcgaaccctaggtggcaagtgatacacaagctaaaggtgtccaactttgtcggcaaaatccgaggcagagtctttctgactgttgaagaagctgttggctgcaagagccgctgctaagttggataaccacacctgagtcttatgatgtatctcatgtgggaaaacaaaaaacagtgtctaatatccatttgtctttgtggaaaatcataacactagtgcttgtgaattgttcccttgtatttccactcccaagtacgtacgttatgtacgaaatgggacatcagaataagtcatctcgtaattcatgttagagatgctgtgagtttctcttatgttcatgtatgtgcttaataaaatagcaatttgaagtgacgtgtttgttaataaaaaaaaaaaa

SEQ ID NO: 7178 - DNA, 1316 bp, Glycine max
attgttgaccaacactgattttgatgctaaaccaatggtcatgcttcttggtcaatattcaacaggaaaaactacatttataaaacatttgttaaaatgtgattatccaggagcacacgttggaccagaacctaccactgatagatttgttgttgtcatgtctggacctgatgagagaagtattcctggaaatactattgctgttgatgctgacatgccttttggtggcctgacaacatttggaggttcatttttatcaaagttccaatgctctcagatgccacaccctttgttagatgaagtaacatttgtggacactcctggtgtcctatctggagagaaacaaaggactcaaagaagctatgatttcactggtgttgtatcttggtttgctgcaaaatgtgatctcattcttctcctatttgatcctcataaactagacatcagtgatgagtttaagcgtgtaatcgcatgtctacgtggtaacgatgacaagatacgagtggttttgaacaaggcagaccaagttaatactcaacaacttatgagagtttatggagcattgatgtggtcactgggtaaagttctaaatactcctgaagttacacgtgtatacataggctcatttaatgataagcctatggatgaaggcttcgtcagtccattaggacaggatctctttgagaaggaacagaataatctgcttgctgatttgatggatattcccaagaaggcatgcgatcgtcggatcaatgaatttgtcaaacgtgcaagatctgctaaaattcatgcatatataattagtcaccttaagaaggagatgcctgctataatgggtaaagccaaggctcaacaaagacttcttgataatcttgaggaagaatttgcaaaggtccaaagggagtttcatctaccggccggtgattttcccaacgttgaacacttcagagaagttctaagtggttatagcattgacaaatttgagaaactaaagcccaaaatgattcaagcagtagatgacatgcttgggtatgaaataccagagctattgaagaaattcagaaatccttacgattaaaataaaaaatgttgtcatttttttatgtatgtttcaccaagtttgagatcttaatgtttaagttcattattaatggattgtggatggtttcaaaaaaaaaaaaaaaaaaaaaaaaaaaaaaaaaaaaaaaaaaaaaaaaaaaaaaaaaaaaaaaaaaaaaagaaaaaaaaaaaaaaaaaagatttcctgcaccccggggaatccacaatttctaaaggggccgccaccggggggaagc

SEQ ID NO: 7179 - DNA, 889 bp, Glycine max
ccacgcgtccgttcactttctctcactcagtggctaacaaaacctcattgagagtgtgagtgtgtttttttgtgcgtgcgtcagtgagttagtgtgtgttccttttcaggcacaagccctgccttcacacatctactatttttatatctttatcttcatgttttcttagaaagaaacaatgaaaacgaagcttcttcttcttatgcttctcatgctcctccttattctccacaaacccacttggattcttgcctctgcataccctcttgctccctctcctcaagttccaccattttctccatttcccacttcaatgtctgcttcctctccaggaattgtgatgggggctgaacagcaacacatggattcacacaagaaaatggtaattgctgttgccgttgccagcacttcacttggtgcagtcattttgtgtgtgttgtgcatctggatttactacacaaagtacccttcaaaatccaaagggaaaaacgttcaaagatcagatgctgagaaagggctagcttcatcaccatttttgagtaaattcagctctataaagctggttggtaagaaagggtgtgttccaataattgactataagcaaatagaaaaaaccaccggaaatttcgaggaaattaacatcttgggtgagggaggtttcggatgcgtttacaaggctcatttggatgataatttggatgttgctgttaaaaaattgcactgtgaaaatcaatatgctgagcaagaatttgagaacgaggtggatttgttaagtaaaattcaacacccaaatgtgatttctctgctgggtggttgctctgctggggatacaaggattattgtctatgaattgatgcataatggatcattggaaactcaaatacacgga

SEQ ID NO: 7180 - DNA, 873 bp, Glycine max
taaaaaagctgaaaagcgcgagagaacgaggtctgaaacttatagcactagcaagcataattgttggagctccaaaccagacgggactactctctagctccgtccacgtgccgtcgtacgctctgaaatcttccgtcgtctctggcatctccgctgccagccttctgatctgtcataccaaatggccaacagggttcaaattcctaccaacaattcagcactcattgctatgattgcagatgaggatactgtagttggatttttgttggctggagtgggaaatgttgacatacgtaggaagacaaattacctcattgtggattcaaaaacaaccgtcaaacaaattgaggatgcattcaaagaatttacaacaagggaggatgttgcaattgtgctgattagccaatatgttgcaaatatgataaggtttttggttgatagttataacaagcccgttcctgcaatacttgaaatcccttctaaagatcatccttatgatccggcacatgattcggttctgtcacgagtgaagtatctcttcaataccgaatcagttgcatctgggagacgctgaattcaccttttgcagttgcagctttttgggggtgtttgttgtttttctttgtacaatatggataataatcttttcttgaaattcagagttctatgtagctgtagcttaaataatttgtgctgtctggggataatttaaaattcctgtcacagaacttcaagacgggccaatattttctggtgtcatgtcagattcagatgaaagttcaacttaaaatatgcgttgatataatctctctttgactaatttccaccgtgtgatttaaaaaaaaaaaaaaaaaactcgagactagttctctc

SEQ ID NO: 7181 - DNA, 1057 bp, Glycine max
ggctcgagaaaaagagaagcataaacttttagctatttcacagtgtaatcacttggaaaaatttactatgtggttccttacagatccgaaccaagttggtggcacctggtggagaagctttgggcggtgtaattggtgctttcagatacatgattcgaactgaaggattcttttctctttacaagggtttagtgccatcaattataagtatggcaccttctggggcagttttttatggtgtatatgatatactgaagtcagcttatctgcattcaccagaaggaatgaagagaatccagaatatgcataaacagggtcgggaactgagtgcctttgaccaacttgagttgggaccggtaaggacattgttgaatggggccattgctggtgcttgtgcagaagctgctacatacccatttgaagtggtgagaaggcaacttcaattgcaagtccaggctacaaaattaagttcttttgcaacatttgccaaaatagttgaacagggaggcattccagctctctatgcaggacttattcccagcttattacaggtgcttccttcagcttccataagtttctttgtctatgagttcatgaagattgttctgaaagtggagtaggcaatgaacaaattcccaggtatatactgctaagaagctgcaccatgatttacgggcaagctgctaaaatagttacagaatagtaacattcaattttaattggcaatcatatttgatgtctgcctttgagggtgaaaggataattcaggtctgctatcccgtacaactgatcacagtatcaacagaatttttggattgactctacactcaatatacccaggcttcaagtctgcaaagtgaaaataaatttattttgttactcccagatcttgaatcctattctcattaggtttacacaattttgttagttttttttttccatctggcagtaagtcttgatcattatcatggggcgtacaagcaaagtccaattactttataagttataacctgaaatgtagcttataaattattcttgtgcaaaaaaaaaaaaaaaa

SEQ ID NO: 7182 - DNA, 1722 bp, Glycine max
gtttgcgtgaagcaatggaagggaatttgccacagggaggtataattcaaggtgggacttcttttggtggctttgatttgccgggatcaattcgggttcagcatcaagcacaacatccccattccatgcatcaacatcaaactcatccgcgacaagggtcttctgtacattccgccgttcatgatggttttccacttacaatgggaaccatgcagaactgtgaccaaaccatttcattggctgactttagtaaaggagacagaagtaaaaactcggcgagtgaggaagacgagccgagctataccgaggatggtgttgattgtcaccatgaaacaactagagggaagaaaggatcaccttggcagcgtgtgaagtggactgataagatggtaaagcttctgataacagctgtttcttatataggtgaggatgtaactgctgatggtggtagcagcggaagaagaaagtttgcagtcttacagaagaagggtaagtggaaatctgtttccaaggtcatggctgaaaggggttatcatgtttcacctcagcaatgtgaggataaatttaatgaccttaataaaaggtataaaaagcttaatgatatgctagggaggggcacttcttgtcaggttgttgaaaatcctgtgctgttggatgtaatagattttctttctgagaaagaaaaggacgacgttcggaaaatattgagttcaaaacacttgttctatgaagagatgtgttcttatcataatggcaacaggttgcatttaccccatgatcctgcattgcaacgttcactgcagttagctctccgaaatagagatgatcatgatgatgatatgagaaggtcccatcatgatgaagatgatcaagatgtggaaattgatgatcatgatgactttgaagagaattgtgcttctcatggtgatagtagaggaatatatgggccattaggtggatctatgaagaaattgaaacaatgccaaggccaagaagatgctaatacttttggtaactctttaaattgtcaggactacaacaaaagttcatatccccatggacagatgatcccatctgatgtgaatcaaggtttacctgaaggcatgaaagcagcttggttacagaagcaatgggttgaatctcgcacacttcagttagaagaacaaaagctacaaattcaggtcgagatgctggaactagagaaacagagattcaagtggcagaggtttagtaagaaaaaggatcgggagttggagaagctgagtctagaaaatgaaagaatgaagcttgaaaatgaacggatttctttagaactgaagcgaaaggaaatgggcactggctttaaataggtcagcgctcttgcaagctttgtggcaattgcattacatgcatggtgctccatttttcttgtttttgctgtctttggtaagatgtggtttgtttagttgaaactatgggtttttttattggggaactttgcaaatctaactctcactcctgcttgtattgtttaaatttaagagtagtgcataattattaggctctactgaagttttgttgcctatgttcaaagactgggtagctgaaacaccgttaatctttttattttgtaatattaattttctaatattacatattgtctgtcctttcattttaaaaaaaaaaaaaaaatagggttctggttattttttatttccatctatggttagactattgctgctc

SEQ ID NO: 7183 - DNA, 621 bp, Glycine max
ggctcgagtgactgttgtgatcaatttggtaatatgggacaagcattcaacatgggtgggtacagtgggtcttctgatttgtatgctaggtgggatcatgtatcagcaatcaactagcaagccaaaggctgcaaaacaggtgagtgcacaggaaaatgaggaggaagaacagaaattacttgagatgcaagtcaattctgagaccaacatcaataataatgaagttaataaaccaagggaggaaagctgaaactattttctataggacacttccatatttcctttcaagtgtatgtttttttattgtatcattttttataactgtcaattcacaattcttaacaattctatctccttgaatggcaagctcattggcattctggtatgtagggttttatttaatttagtggctgtaatataaaatctattatttaagtacttgatagataaaatatcattcaatttggttctttaacttttcagcttttaaactgaaccaattttatgtttcgaaaaaaaaaaaaaaaatttctttctcttgatgcttcaaattctgactgtgatggaattgaaatgttgttgtctctccaaaaaaaaaaaaaaaaaaaaaaaaaaaaaaaa

SEQ ID NO: 7184 - DNA, 812 bp, Glycine max
  misc_feature (806)..(806): n is a, c, g, or t
tgcccacgcgtccgcccacgcgtccggggaccgatcaggtcaaagaatgagcttcagaatctgcctcctgttcctcccgtagatgcgattttggaaccacaccatcaaacggtgccagttggaattgttatgtcgactcttggtgctcaagtcatcgtggaaggagtggagaagcatgaccctcttaatgagggttctattctttggttgactgaaagtcaaaaaccattaggtttaattgatgaaatttttggaccagtcaagaatccttattatgttgtgagatacaattctgaaagtgaagtccccacggggatccatgagggaaccttgatctcctttgttccagaatttgctgatcatgtgcttaataacaaggatctttataggaaagggtatgatgcatctggtgcagatgatgaagagttgtctgatgaaatggagttttcagatgatgagaaagaggctgaatacaagagaatgcaaaaacagacaaagagaggcgcaaacgatcaaaatcatggcaagaaaaaaaacaacagaaagaaattttcaccgaaagagcatgcggcacctaccatccatgctgcaccaatgcttcatcatggaaactgtcctcctttttctggcactggacaaggtcttatggggggaactaccccacttccacccttaaacgtagctccaacctttgctacaaatggagtctggacaaacggaacaacatttccacatcagcaacagtctcccatgcttcctaatggatatcccacaaatggcatgccatggtacccacaaaaccctcnaatttc

SEQ ID NO: 7185 - DNA, 1925 bp, Glycine max
  misc_feature (1874)..(1878): n is a, c, g, or t
gtcctagtcaaagtgttgatggtattctgccagtcagtgccaactttgtcagcaagaaccagaaaatgaatctcaggaccataatcatcattgctttatcttcctttgtactcttgctggttttggtgggagcattttcaattattttgaaatggaggaagactgggagaccctcaagtgctgttggccctgcattcacatcatctctaaacaagagatcaggcttggggtctatgttgtcaagtagtattacaagctcgacatcaatttcacttatgtccacaatggctacttcccttctctctgttaaaacattttcactttctgagcttgagaaagcaacagataagtttagttcaaagagagttctaggtgaaggaggatttggacgtgtttatagtgggacattggaagatggggctgaaattgcagttaagatgctaacaagggataatcatcagaatggagaccgtgaatttattgcagaggttgaaatgctaagccgtctgcatcaccgtaacctagtgaaactgattggtatatgcattgaagggcgcaggcgttgcttggtgtatgagcttgttcgcaatggcagtgttgagtcccatctgcatggtgacgacaagataaagggaatgctagattgggaagcaaggatgaagattgccctaggagctgcaagaggactggcctatcttcacgaggattccaatccccgtgttattcaccgtgacttcaaagctagcaatgtgttactagaagatgactttactcccaaagtttctgattttggcttggcaagagaagcaactgaaggaagtaatcatatttcaacgcgggtgatgggaacttttgggtatgttgccccagaatatgcgatgacaggccatttactcgtcaaaagtgatgtttatagttatggtgttgtgctgcttgaacttctcacaggcagaaagccagtggatatgtctcaacctcagggacaggagaatcttgtaacttgggcgcggccaatgttgacgagtagagaaggtgtagaacagctggtggatccatctttggctggaagttacaactttgatgacatggcaaaggttgctgctatcgcttcaatgtgtgttcactcagaggttacacagagaccttttatgggtgaagttgtgcaggctctcaagttaatatacaacgatacagatgagacttgtggagattattgtagtcagaaggattcctctgctcaggaatctgattttagaggtgaccttgccccttctgatagcagttggtggaatgcgggagggctaacccctcgaataacttacgggcaagcttcttccttcatcactatggaatacagttccggtccacttgaagaaatggagaacagacccttttcaacttcaagcttgattggggatgaaatatctttaccgattaggcatgggaatagatcagggcccttaagaacagtccgaaacaagctgtccttatatagatttacaggaagtcggagtgagcatggaggaccttcttccaagcccaattggaacgatggttactgggtttaagaggtttgggcctttttttttagtgtttttgaaatgtacagtttctaaagggatcagaactaatgattgagtgactgatttagcttaggcatctcaaatttctgcagttttcatgttatggttggagagatacaggacgttgacaaattttgaaatattgattcattatacaaggaggaagtgtaacttaaacagtattgtaaatgccttgaattgtatctcgtggcgtcattcccatttccatttccatttctatcagcaaggactagccaaaatgaactttatgacaattactctactgtctannnnnactagcagccgtatttgcaattctagtctaagaaacaggtatagaat

SEQ ID NO: 7186 - DNA, 2598 bp, Glycine max
tcagctacgtaggcccccccccaaccttttcctcccttttggatcatttttattcattcaatttaggtactctattgtaatgagcttttgtttgtgcaacatcattatcctttcctcaatcttgtagctgaggtgacattatatatttagctcagcatcactactggtttctcgaacctaagcagcgaaggagatgtgtggctgattcaattctaaagggaccagaaacaagcacatctgaatttcaattgttaatttaccatgtatacgagccaagccttttcttcagggtcctatgcggatatgttgtctgggaatcctcttttacctcataactacagtgaaactgtagaaggacaaaatgagttgaagttcatcacatccatgagggacacaatgactatgcagcctattgatgggcattccaatgccgccgccacaggtgattcagagtcttttgtgaatgctggagattcccattcccatgttattccaaggacaacacaattgggagttgtggagagtgagcaaaatgtactgaaccaaggcttgtctcttagccttggctcagtgatgccttctattgcatctgtccctacctttccatatcagtatcccggcaccagtttctcttcacttatgactgcttgtatcccaaattcaaaggactcttcatctcataaagatgatgagaccagcctacaaagggaattgagaaatgctgagtgcatggcatctttagcttctagaggatttcacaaaagggaggatttgtataatccacatgcctcaatgtgcattagtgaaggccgaaatgatggattgcaaggtttttccaacaatgtcttgaactcacaatacctcaaggcagcacaggagttgcttgatgaaatagtaaatgtccgaaaggctttgaagcaaactggtttggaaaagcaacagagtttccgtgatattggtttagatggctccaaagattcagatggaaaatctaccagccaatccgtgcagatatcttcaggccccaatggttctgctgcaaactcttcatgtgagctatcacctgcagaacggcagaatttgttggacaagaagacaaagcttttgtcaatgctggatgaggtggataaaagatacagacagtactgccaccaaatgcagattgtggtgtcatcttttgatatggttgctggatgtggagcagctgaaccatacactgcacttgccttgcgcacaatatcgcgccactttcggtgtttgcgcgatgccattagcagccaaattcaagtgactcaaaggaacctcggagaacaagagggaatacctcgtctccgctatgttgatcagcagcttcggcaacaaaaggcccttcagcaacttggtgtaatgagacaagcttggaggcctcagaggggacttcctgaaacctctgtttcagtactccgtgcatggctctttgagcatttccttcatccttatcctaaggattcagagaaaattatgctagcaaggcaaactggcttaacaagaaaccaggtggcaaactggttcattaatgcaagggtgcgtctatggaagccaatggttgaggaaatgtacaaagaagaatttggtgattctgagatgagcagcaatctattatcatcagagaacacactcaaagctccaagagatgatgttcaagcttctgacaataaaagggaagagtcccaggacaacttaataaacgttgatgatagtgttcagcatcatgggttgaagttagatcatgcctcggaattggacagagggatccaaagcagtgatcatggagaaaatgccatggatcctagaattggaaaattgcaaggtgaccaaaggttcaacatgaacaacagcaataacaatagtccttattatggtgatggctgcataatggcttctactcctgccacatatgatttaccagagttaggtaacattgccgtcgatggccacgtgtcgcttgcattggaattgaggaactgtgaaagccaaggatttggtgtgtcaaatgatgacatgcataaacgacataagaaaacattggcttcttccccagagactgatttgctagattaccatttcacagacccaggaaagcaacaaaacaagtttggcaatcctcacctattgcacgagtttgttgtgtgaagaagggttggagaaaattctaaagttttcaagggaactaaggaaatgtgtaccaccaaagtagtagatagatagacaaaagcctatgttgttgttgttaacttggttgctcattcttgttgtccacagatcataaaaagcgatgtaaatcatgaaccgtacaaaaaatatacacgtaggtatgtgtagatatattctcttgtaatatcgtggatggatgattggttgtatcatgtgcaggcaatttttgtaaggacaaggaacttatcttgtgcatcatgatgtataagggaatcttgtcaaaaacgcaaaaggagtactaccatctatctgaaaaaaaaaaaaaaaaaaaaaaaaaaaaaaaaaaaaaaaaaaaaaaaaaaaaaaaaaaaaaaaaaaaaaaaaaaaaaaaaaaaaaaggggggg

SEQ ID NO: 7187 - DNA, 1444 bp, Glycine max
ggtaatttaataggttgcaaaatttgacctttgccttaacgcccaaggatgcacgtcttccttccaccgcctctctttttctttctatgccggtttccgttatcataacataacttgcctcttcccccaagacccaagttttctcttttcctcataaccccctctctccctaccaaatttcaatttcctctttcctcccttaggttatggatccattggggaaacgccctgccgccgaggacgattccctaatttccgattgcgagagcggggtttccgctggagacacgccgccgccgttcgtcgaaaacgccgacctcgtccggaccagattcgttcgtggcctcgtcgcgcactgcttcaaacccgaggttctggcagttcgcagaaacgtgtgttcctccgtcatggccctggcgcgtcaacattcctttcacgtcttcgcgcgtgccgtggccgaattgcgcggcggcaatgccaacgtgaagttcgcctggtacggtgcgtccagtaaggaagagataaatgacatcattcagcacggtttcggtcacgctcacagtaacggcctgcgtctctctccacaagattctccacttgaaagtgtgaagagttccgttgtggacgaagacggtttgaggcacttgttgctgtgccgcgttatcttggggaagacggaggtggttccacgtggctcctaccgatgccgttcgagttctcaagagtttgattctggggtggatgatctttccaatcccaaggagtatgttatttggtgtaaccagatcaacactcatgttttgcccgaatatgttttgagcttcagacttccttcaccattgaaagggattgtgaagattgcggaacctttgaggccttctttcgccgtggatggcattcccagctttgatttcgatgctttcgaagattttgcctccgtccgaggttgcctccattgccaagtttcacagggattatagagaaaagaggatttctcgacatgagctgatacagaaagtgagagtaatagcaggcgacaaattgctactttccgtcatcaaatctttcagagccaagaaaatacctgcaaactttaaagatgacaaggcgaaagaatggcaagcggacagccagcagcttgaacggaatgattgttcatatgggagttctattagctattacaggaagtgaatagaatacttgaagaaacacaatgctcatactaaccaaaacttacattgagggtgcaagtgcaaccactgcttaagaagtagagcgtcatttgagaccttttaaattgtttttagggtgatatactgatataggtgatttgttttgatgttgacggacgatagtgtagcaaaagaaatcactttctctttctggttggttacagttactggttgaaataaatatacttcggttcggacgtttatcatagtta

SEQ ID NO: 7188 - DNA, 1322 bp, Glycine max
accaaaggtgcgtgtagagggaacttaatttgatttggtgcaatgggggatttggagaagaagcaagagagggcaatggaggaagaagtcaaagagaggttggtggagggtgtggcggttttggactttgacatgctttgttccacagtggctttgcgagctgcacatggaaaatggggaaagctgggagctgaagaggaagaagaagaagaagaagaagaaaaggaggagggtggtgagtttggtggtgttctgaggatgtgggagggtgaagttcttgattgtttcgatgatcatcgcatagctattgaatccacgtgttgtccttgctaccgatttgggaaaaacatgaagagagctggttttggttcttgctacattcaggcagcaatttattttcttcttgctgttggtgcctttcttaacttcattgcctttgctgtcacgagacgtcactgttatctgtacctgactgttgccttcgttgtttctgttggagcatatttaggattcttccggacacgtttaagaaagaaattcaacatcatgggtagtgatagttccatggacgattgcgtttaccatttcgcctgtccttgttgtacattatgtcaggagtctagaacgcttgagatgaacaatgttcgagatggaacttggcatggtcggggtgacaaaatatgcattggtggctttagccaaaaaagcaaaggatttttcgagttaaatcctccttctattgtctccgtcaacgatgaaagttcattggaaacaaaaacaaacacaaatgtcagcagtccaccttaattcaaggtagtgaggaagatttgaaacaacacttcatcatcttaaaattcagttaccatgtatcttcgccacacatttcaagttcccattgaatttctttctgagaagaaatgtaatgagcattccttgatgcatttatagaaggttcatactaaggactatgttgttggaagcactaggaaacaaaacaaattgttaacaattaagcacagagaacaacattgttctgttacaaattccctttggggagggagatgttaatatgctcatgtgcataatcttctttcagtttcaactaatagggtagttataattttgccatcccagtaatatagtttgattagttttatgatggtacaagaatgccatcatgttgtgcatctgttcaatagattgagtgttcataatttgaacttattcatgcacttgaagggcccgattcttacagaattttggaacaatatgtttgttgttgggttcaattaagtctaatgtttatagtctccattttttgt

SEQ ID NO: 7189 - DNA, 1334 bp, Glycine max
  misc_feature (1320)..(1320): n is a, c, g, or t
gctcgagtctcaccctagttgtgaagaaaaaatatcaaactcatcaaggtaaacaaagatggctaggtctagtgcttatcctttgttcttgatttcttccattctgtttatttcacacatttatgcctcccaagtagaagccaagcccccagtagtgaagggactatcatattctttctattccaaaacatgccccaagcttgagtccattgtgaggaaacatctcaagaaggtgttcaaggatgacaatggccaagctcctgccttactccgcattttcttccatgattgttttgttcagggatgtgatggatcattgctgctagatgggagtccaagtgaaagagaccaaccagccaacggaggcatcagaactgaggccttgcaaaccattgatgacatcagagctattatccataaggagtgtggaaggatcgtttcttgcgcagatatcactgttttggcagcacgtgattcagttttccttacaggaggtcccgattatgcagtgccactaggaagacgagatggcctgagcttcagcacatcaggaacaagtgatctccccaaacccttcaacaccaccggcgtgacccttgacgctttcgccgccaaaaactttgatgtcaccgacgttgtcgccttatccggcgcacacacctttggtcgtgcccattgcggcacattcttcaacaggctctcccctctcgaccccaacatggacaaaaccctagccaagcaactacaatccacttgccccgacgcaaactccggcaacaccgccaacttggacatcagaaccccgactgtgttcgacaacaaatactaccttgacctaatgaaccgccaaggggtgttcacctctgaccaggacttgctcaatgataagaggactaaggggttggtcaatgcatttgcgttgaaccaaacgttgttctttgagaagtttgtggatgctactataaagttgagtcaattggatgtgctcactggaaatcaaggtgaaattcgtggcaagtgcaatgtggtgaatgctaggaagtctttgttgacgtctgtggtggaagaggtggtgcaattggttgatcagttttgaatggagcaaaagtttgtaagttatgtgtagttcttcttgtgtggtgttgtttaattgctaaggatatgggtgtgttctattttggggattgttgtttcctgtttgacatatgactcatgtaataaggataaagtgttcagtattatgtgcttctattttgtccattttctcttgcttattaaggaaataaatgccctaatcaagaaaaaacaaagaacaacagnaccgtaatgacagc

SEQ ID NO: 7190 - DNA, 1533 bp, Glycine max
gtattagtaactttaaccattgagcactcgacttttgcttttgtttccactatgatatatagcttgtcagctacgtaggccccccccccccttacgtaaattctcgacgaagcaaccctgaccataaccacactctctcaagtcccaagaaagaaccctctcacctagctagctatcaaactaccgattcatagcactcttctcttcctcacttatgcgaaacgcaaacatggttctcgttctccttttccttatggcaatcttctccgccatgaccactccgtcaacctccgcgatcgacaccttcatcttcggcggctgctcccaggccaagttcacgccgggttccgcctacgaaaacaccgtcaactccctcctaacctcgctggtcaactctgcggccttcgccaactacaacaacttcaccgttccagcctcttccgacaccgtctacggcctcttccagtgccgtggcgacctccccaacgaccagtgctcgcgctgcgtctcgcgtgcggtcacccagctcggcaccctctgctttgcctcctgcggcggtgccttgcagctcgacggctgtttcgtcaagtacgacaacaccaccttcattggggttgaggacaagaccttggtcagcaagaaatgtgggccgtccgttgggttgacctccgatgcgctgagccggagagaagctgtgctggcatatttgcagacgtccgatggggtttacaagacattcagaacgagcggttatggggatttccagggtgtggcgcagtgcaccggggatttgagtcccagccagtgccaggattgtctttctgattccatccaacgcttcaaaaccgattgcgggcccactacctgggctgagatttacttggccaagtgctacgcgcgctactcagaagctgggactcgctcgcgtgctaataataatgatgatagcaatcacaatgatgatgagatcgagaagacactcgctattttaattggactcattgcgggggttgctctgatcatcgttttcctttccttcttgtccaaggtctgcgaaaagcacaaaggtggtaaataaagaatataatatgtgcacagtactgggattgaacttttgcctttgctttttctctggtaaattacttgtctttcggtagctcttttgctactcttagtctcatatgtcctttttgtaatcaatcgatcttattcttatcttttaagtttcccgcatagtcccctttatataaagaacaccagcgaaggtatagatagaaatatattatggaaaaaagttgttccatgaaacaagttacacaagggttgcaataaggagaaaagcctcaaagattccactctctaatgaccattcgttttcttgtctagtgtccaccgatgtgtacaaatactgaacactttagtgaaaggtgcagcatgcatgctttgttatagcctttgatggttatgattaattagagtttttactcaaattataaaaaaaaaaataaatcacgatgaagaactttactttcg

SEQ ID NO: 7191 - DNA, 1396 bp, Glycine max
aatgatggaatcacaacatgacatattgtgtctggtattatctctctcttgagagttgagagcatggagattggtcctctcttccccaacttagcgtggtggcagcaagtcaacgcctctacttgctgccaggacgctgttttctacttcctatgcgctgcttatgctcttgtctcttccaccgctttgattcaattggttagaattcaagttagagtacctgagtatggttggactactcagaagatttttcatctcatgaacttcattgtcaacggagtgcgtgcagtggtgtttggattgcacaagctagtttttcttttgcatcctaaggtgttgatttcggtgctattagatcttccaggactactttttttctcaacatatacacttcttgtccttttctgggtagaaatttatcaccaggcaaggggtttaccaactgataagctcaagatagtctatatttcagtaaatgctgccatgtatcttatccaggtttgtatttggatatacctctggatagatgacaacaatgttgtgcagttcattggagagatatttattgcagttgtgtcgtttatggctgcactaggcttcttgatatacggaggaagattatttttcatgctgagacgcttcccaattgaatctaaaggaagaaggaagaaactcaatgaggttggatcggtcacaaccatctgtttcacctgttttctgataagatgcattatgggttttctgtctgcatttgattcagatgcatctcttaatgttttggatcatcctattttggacttgatttattacatgctggttgaggtcctaccttcagctttagtcctctacatcctgcgcaaattgcccccaaagagaatatcagcccaatatcatcccatccgttaactgctgttcatattggatcctaatttattaatttatctgcccattgtttattatttcaatggttcttggttagatggatacttttaagctcatcaggaaaaacagataaagaaaaaggatgcagataaagactcatggcagcagttcttatgtgagtgatactcagcagttgctacctaggaaggaaattttggattcaggttttgtacggtatacatgcaatgacaagcctcaagaacttgagttattctctgcagtttggatgatgtagtgtttcgggcacaagcttgtcaatgacgcatctacttcaacattttattttatacaaagttgagtgtctcttaatcttaaatattctgaatttgtttattagttagaaatacttcaatttgaacaaaatgaacattgtctcttgaattatatgaagggtctcgcttggaatcaaaaaaaaaaaacgtacaccaacaaacccatatcaaacaaataaaaa

SEQ ID NO: 7192 - DNA, 1007 bp, Glycine max
agtaacaacgtaataaccatgtttaaattgaatggcaaatatactttgtaagctctttttttaaaatatccagaaagcatcagattgataattatgtgacgcatcatgtttaagtatcaaacatttcacaccaccacatcatgtgttctagtaagtttgaaccagattcagcacaaagcttatttataagcacaattttgtggctataaccatgcgcttaaaagagactctgaaaatatacattatgcttgccaaatccttaatcattcaagtgtgttcataatcccaattaaacatgtgtaagaagtaagaacggagggaaacacactctggtcactgatgaagataaaaacaaccgattgcaaaggccaaccaaattcagtagcttatcagatagtagaaggggcagagtctttcacaatcgttatagggcaactcgcatttgcggtgacataattagtcacactccccagtaataccctttgtatggcacccaagcctctgctacccatgaccaaagagtcaagcttcaaatccccaacggcttccacaattttctctcttgcatccccccagtatagctttgccaccacattcacctgtttctgcctagaagcggtgtcaagcaagtccaacacctcagcatcagtatccacctcatagtgacgcatcacctccttttcacgaaactccgacaatggaatcagaggtgaaccagtggtggaccagagaagatttcctgattcacttcctccggaaggcttggtgtggacgatgtagagagtgtcaccgttgctgataagattgtcaatagcccatttcagagcgattttgcttcctttggaaaagtccaaggcaaccccaattttcctatcactgttcatcgtttcaccaaatcctgggttctgattgttaggtgagggttcactgttcggaggaacaatccaatttgtgataacgtttccttcttgtcggtcttccgccgccggccctccgctgctactcga

SEQ ID NO: 7193 - DNA, 1213 bp, Glycine max
  misc_feature (1171)..(1176): n is a, c, g, or t
aatccgcttgtaacaaacatcttagtcttcttaatttcctcactcgcaagtcacaccaatggcaaagctattcaatttcctccctctcctcttcctcaacatcttcattcaaacaatttcagcccaagtagcaccagcaccagcgggccccaccaacatcacccaagttcttgagaaagcaggccaattcacaaccttcatcaaacttctcaaggcctcacaaatagctgatagaatcaattcgcagctcaacaactcaaaccaaggcctaaccgtatttgcacccactgataatgcattctcaagcctcaaagcagggacactaaactccataaactcacaagaccaaatgcagttgatacagttccacattctccccactctctacaccatctcacagttccaaaccgcaagcaaccctttgcacacgcaagctgggaacagtgatgatggagagtaccctttaaatgtcaccacctcagggaaccaagtgaatgtaacaactggggtggttgatactacagtgtccaatactatctacagtgataaccagcttgcagtgtatcaggtagataaggtacttcttccaatgaagcttttcggcgcaacggcaccggctgcttcaccggcagaggctccggcaccgaccaagccggagaaaaatgtccgggctggggctgctgattctccttcagggtcgtcggacacgtccgctgatgcttcgagtgcagtgagtttgaaaaggcacacagttgaaggtgttacctttgttgctgcagttgttgtcatgattgtttcttgtttctgaatgtaagtcctaggatggctcatttttcttggtttttttttttatgttattctttcttttttttgctccagcgagtttgggttgattgatgatgatggtggagatctcgtgtgctgttattgctacgaagttaagaaaattttgggttctatataaatgattttttttcttttctttcaaatccataagttagagttggagctatttgtttactattgttgaaaggtatgcttgttctatccctcaatgctcatcatacccttgcaagacaaaatcaagctttgtatgtttaaattagagagtaagtaagatggtgaaattttgcctgaaaaaaaaaaaaaaaatacgacactggctatgggnnnnnnccatttcacagtggtggaaaagttttcagtatatcgt

SEQ ID NO: 7194 - DNA, 844 bp, Glycine max
ggaggggggctgggaccaaaataacttccaaaatgctagtcaaaacctcaattcacttcttcttgacaattcaataagggtcaaggctgaaagaattcctgatgcaagctcccagactaatctcttccctgagcattatgggcaggaggatctaatgagtgcacttctaaaacagcaagaaggcatgggaccatctgagaatgagtttgactttgatggatattctctggacaacattcctgtctagaacaaacccttcccgattgaagttgccagtgtaaatagtttgttacacaagcacatgatcatcctgcagttagctattttggaactgagtcaaaatttggttgatgtcaaatattcagacttctgggagtagtagtgtattgtaatggtttagtctggatgctcaacatgaatcagcttcaaacctcaactgcatatattcacaaagcatgtgcaaattttgactgctatttatagcaaaattgctagcaagcttctaattttagggtgttcttgaaggtgttggcttagggcagaattgcagaagcaaggttttgatacatctgcaaagttgtcctaggagcatttctaacttgaataacaaattatgaaatttttttcttctgttccttttgtaatttatgtcattgaaagcaagtaacgacttccgtaagcatgtaaatattgcatttggtagctttagacatctggtctggtcattcttttatggttgattctgtactttccgatagatatgcgctgttttttatgttccctgtgtcttgcattctttgtacatgaacctgattatgtgatttgtgtgaaactaataaaaaca

SEQ ID NO: 7195 - DNA, 2962 bp, Glycine max
ggctcgagcctgctaccattttgaagtgaagcgagagtttctgaagggtgccttgaaaagattttctcagttctttatttcacctcttgtaaagatggaggcaatggagcgagaagtacttgcagtagattcagaatttaaccaggttttacaaagtgatgcttgccgccttcaacaacttcagtgccatacttcagctcataatcatcctttaaatagattcttttgggggaataaaaagagcttggttgatgcaatggagaagggtattaatttgcgcgagcaaatattgaaattatacaaggattattaccacggtggattgatgaagcttgttattattggtggagagtctctggatgtgcttgagagttgggttgtggaactgtttggcgctatcaagaaaggtcaggcaaacccagtgttcacagtggaaggtcctatctgggaatctggtaaagtttatcggctagaagctgtcaaagatgttcatatccttgatttatcatggacattgccctgtctacaccaagagtatttaaagaagccagaggattatttagctcatctccttgggcatgagggcagaggaagcttgctctcctttctcaagtccagaggatgggctacatctctatctgcaggagttggggaagaaggaatttatcggtcatctatagcttatgtctttgtcatgtccatacacctcacagactctggtatagaaaagatctttgatatcattggctttgtctatcaataccttaagttgttgcgtgaagatactccaccagaatggatatttaaggaacttcaaaatattggaaacatggatttcagatttgcggaagagcagcctccagatgattatgctgctgagcttgcagaaaatttgcacttttatccaccggagcatgtaatttatggtgactacgtgttcaagacatgggatgaacaattgttaaaacaagttcttggtttcttcgttccggaaaacatgagggtagatgttgtttcaaagtcgttccttaagtcagaagatttccaatatgaaccttggtttggttctcgttacgttgaggaagatattgctcaaagtttcagggagttatggagatagcctcccgacttggccccccccccccatcttccttccaagaatgagtttattcctagtgacttttctatacgtgctagtgacacctgtgttgatgattttgcaaattcaacatctcctagatgtataattgatgaagcattaataaaattatggtacaaaccggatagcactttcaaagttcctcgtgccaatacatattttcgaattaccatgaagggtggctatgctgacgtgaagagttgtgtattatccgaattgtttattcatcttcttaaagatgagttgaatgaaatcacatatcaggctagtattgccaagttagaaacttctgtcacttatgttggtgacatgcttgagctgaaggtctatggtttcaatgaaaagcttcctgttttgttatctaaattcttttcagtatctaaatctttcgtgccaactgatgatcggtttaaggtaataaaagaagacatgaagagagctttaaagaacaccaacatgaagcctctaagccattcaacatatttgagattgcaagttttgtgtgagagtttttatgacgctgatgagaagctgcattatctaaatgatttgtttcttgatgatctgaaggcatttatccctgggcttctctcccagatatacatggagggtctttgccatggaaatctgtcaaaagaagaagcaattggcatagcaaaaatatttaagatgaattttccagttaatccactccctattgaattgaggcatgctgagcgtgttatttgcctcccatccagtgccaatttagttagagatgtcaatgtgaagaataagtcggaaaaaaactcggtggttgagctttattttcaaattgagcaagattttggtctggggtcaatcaaattgaaagctttaattgatctttttgatgaaattgtggaggagccatttttcaatcaactgaggacaaaagagcagcttggttatgttgttgaatgcagcccacgagtaacatatcgtatctctgggttttgtttctgcgttcagtcatctgagtaccacccagtttacttgcaaagtagaattgaaaacttcttaaatggcctggaagaattgttggatgggcttgatggtgattcctttgagaattacaaaagtgggttaatggcaaagctgctggagaaagacccttcactcacatatgaaagcaatagattgtggaaccaaattgttgaaaaaaggtacatctttgacttgtcaaagaaagaagcagaagaattgaagaacataagtaagcatgatattgttgaatggtacaagacttacttgaaaccgtcgtctccaaagtgtcggcaactacttattcggctatggggttgcaacacagacttgaaagaagctgaagcactacccaaatctgtgctggccattacagatccagcagcttttaagatgcaatccaagttttatccaagtttttgttaacttcgaagatgtagtttgttcaactgttgaaatgacaactagaaccagagatagtcttcatttctcatttattggttgtagtcttgtcagactgcaggggtaccatccatatacttataatgaaactaaagtttttgaggggaatacagaatttgttatctggagtttttaaggaggggaatacagaatttgttacctggaaccacagattttgttgatgtaaattacatttatttgggaaatattctttttatccacaagttattataggtcattgactgaaagagttatacattggtcctttgtatatttgttcccttgcgctccttggatacgagttgctcctttttagtctatgtttgactctttttttcc

SEQ ID NO: 7196 - DNA, 1732 bp, Glycine max
atcatccccgtattataaacccaggattgtcagctacgtaggcccccccccccccaaaaggaaactctcattcaccttcttctctctccctcactccctctctttcttaatacaccaccttcccaaccctcttccattctccttctccaactccaacccctgcttcccttttttcattttctcactccccatcttctgagagtgatgggtgtttgctaccgctgttcccacacctcccacatcaccgccatcatcatcaccagcttcttccgccacaagccttagaattatactattcccaccctccctctttcttcaacaacaaccgttgacttcactacagtcacgtggtctttctctgaggatccaaccatggcggctggaactgtcttctgcgctgctgctactgctgcttctaatttgacaacaaccacttttcttcacaaccaaacacctccttccacctcctctcagcctcctctcgattctcttttcctctctgcctcttcccctttcctcggttcaagatctatagtgagttttggagatgttcaaggagggaaggggtgcaatgattcattcttccgcccctatgatgagaatggggatgaggacatggacgagtacttccaccagcctgagaagaagcgcaggctctccgtggagcaagtgaagtttcttgagaagagctttgatgaggagaacaagctcgagcccgagaggaagatttggctagccaaggaactcggcttgcagcctaggcaggtggcgatttggtttcagaaccgccgcgcgcgctggaagaccaagcagatggaaaaggactatgattccctgcaggctagttacaatgatctcaaggctaactatgacaaccttctcagggaaaaggataaactcaaagctgaggtggcaaggctcactgagaaggtgcttggaagagagaaaaatgagagtcacttggaacaggctgaaaccaacggattgcaggagccgctgcacaagtctttggttgattcagcttctgagggtgaagggtccaaagtgacctttgaggcttgtaaacaggaggacattagctcagccaagagtgacatatttgattcatcagaaagcccacaatacactgatggagttcactctgcacttctagagactggtgattcttcttatgtgttcgaacctgatcgatctgatgtgtctcaggatgaagaagataacttgagcaagacccttctgcctcattacatttttcccaagcttgaagatgttgattactccgacccacctcatggttcatgtaattttggaattccggaggaagatcaagccatttggtcttggccttactgaattttctctatagcatatagagcatgtctctaccttctactctcaagttcttctgtttaaacttgagatcatgtggtagaaaagggtgagttaataataagccaaagaaaaaatggcactctactggtttgttcccaatggtggtttcttgccagctttttttttttttttttttactttgcaatgtaacttttggttcaaatgtaaataaataatatcttcttgttgaggatgtagctctgaatatcacttcaaggatgaatttacatagcaaattagatgagaaaaatgggaagataaaaaaaggttatgttttcaaaaaaaaaaaaaaaaaaaaaaaaaaaaaaaaaaaaaaaaaaaaaaaaaaaaaaaaaaaatt

SEQ ID NO: 7197 - DNA, 594 bp, Glycine max
ttttttttcagtataaagtctaataagccgtcagataatttcattatggaaaagcaaaattctcaaaaaaagaaagcactcatcttcagtagtcacattctgtgctcacacaaaaccacaagaatatgaaaattgagaaggaagaaaagtgtagagcaaaattttgttgaacttggcatgttgataattggttagtcttcactcgggtgttgaggttgatgaagggtttggttcacttggttgagccccacacgtgcagaaaattgaagaagtgattggttttgcaaggtatgtggggttgtgatcaccagccattatgacaagaacctcaggttctgagtttgtctctaaattgttggccattgcttgtgatttcacgtcttcattaacttcagatgatgactgagaatcacgttttctgtatgagcaaacaaggatcaccaatgccatagatatgatagccagcatcacagctaagcctccaaacaagtaaggaattggagacttccatatattaaccccactggcacgcattggtgatgatggtgatacactgtttattggcctcatttctctctctctctagatggaagt

SEQ ID NO: 7198 - DNA, 1743 bp, Glycine max
cacgcgtccgctcttcctcacctaggaaaaaccgtttccaactctaccattttcccaccaaccctccactctcttcctcaaaacaatcgttaatctcttctacattgtgaagtctgatattctctaagtagacaacacaaacacacctcaatttatagcacccatctttcttttctcccacaaattcagctccattttgttacacgttcaaataataagccaagaagccaccatgatctcttcaatgaagtgcacagcctcatctctcacatgttccgctttctcaaacagaaagattcccattgcaaggccacaacttgtcacgttaccaaccattaacaacgttgaacaaaacacgggtctctctcagttgtgttcacagaaaccgctctacctttcatccactgagaacttggcattggtgaagagaaggagggagactgagtgccaggcctatgaagccgataggtcacggcctctggagattaacattgagctgccgggcgaagaggcggcgcagaggttcaagattgggctgtattttgctacatggtgggctttgaatgtggtgttcaacatttacaacaagaaggttttgaatgcttttccttacccatggctcacctccactttgtcccttgctgctggctccctcatgatgttagtctcctgggccaccagggttgctgaggtcccaaaagttaacttggacttctggaaggccttgtttcctgttgcggtggcacacacaattgggcatgttgctgcaactgtgagcatgtccaaggttgctgtttcattcactcacatcatcaagagtggagagccagctttcagtgttcttgtgtcaaggttcttgctcggagaagcattcccaatgccggtatatctgtcactgctgccaattattggtggttgtgcattagctgcagtgactgagctcaatttcaatatgattggctttatgggggctatgatatcaaatttggcattcgtcttccgcaatatattctcaaagaaagggatgaagggaatgtctgttagtggaatgaactactatgcttgtctttccataatgtcactactaattctcacaccttttgccattgctgttgagggccccaaggtttggattgcaggctggcaaacagctgtgtctcagattggtcccaattttgtatggtgggtagctgcccagagtgtcttctaccacttgtacaatcaagtctcatacatgtctcttgatcagatttctcccttaacattcagcattggaaacacaatgaagaggatttcggtcattgtctcttccatccttatctttcacacgcctgttcagcccatcaatgctcttggtgctgccattgcaattcttggcaccttcctctattcacaggctaaacagtaagttgataattttgaagctgttaagtaacacacgcgaacaatgactcatggctggagctcaaagtgtcactaatgaggactacggcattaattagctagttttgttgtcaataggaatttaagtttatttcttttgggccatagcaggagcatttctaatcacgtttcgatctgtgtaaattagctttagaagaatggaatgcactaagccgtacttgatctttaggatgtaggtatatcaattctcgaaaaaaaaaatcgttgtaaagtcatgtaaatcagtacttattattttattggtttgttacttattattgtgcagactaagggcggccg

SEQ ID NO: 7199 - DNA, 572 bp, Glycine max
acttcccttcggcgccgcctcgttacagacagcgggagcgaaagagcgagcggtgagagaactccgggagagggcggcgagatggtgcagcggctgacataccgaaagcgccacagctacgccacgaagtcgaaccagactcgcgtcgtcaagaccccaggtgggaggcttgtgtaccagtacaccaagaagcgggcgagtgggccaaaatgcccggttaccggcaagaagatccaaggaattccacacctgaggcctactgagtacaagaggtccagattgtcaaggaacaggaggactgtgaaccgtccttatggtggtgttctgtctggtcctgcagtcagggagaggatcatcagggcgtttttggtggaggagcagaagattgtgaagaaggtgctgaagatccagaagaccaaggagaagaccaccaagagctaaacaactgggcgatataggcgtcgcggtgatgttttgtgtttcttcgaatttgttttaagcaatcaagaattttctctcttcggatttgcagaatcctggttctagtatgtgaggtttgatgtgcttctcta

SEQ ID NO: 7200 - DNA, 776 bp, Glycine max
attgtatcccaaacttcagttagacaacaaaagcacttgttcaccaattaagctttcaagagacaaactgctttgaaaaatgggatccaaggttgttgcatccgttgcccttctcctctccatcaacattcttttcatttccatggttagctccagcagccactacgatccacagccccaaccttctcacgtcactgctcttattacacgacctagttgtccggatctgagtatttgcctcaatattttaggcgggtctctaggaaccgtggatgattgttgtgccctcatcggtggtcttggtgacattgaagccattgtgtgcctttgcatccaactcagggccctcggaatattaaaccttaaccgtaatttgcagttaatattaaactcctgtggacgaagctacccgtcaaacgccacttgcccccgaacctaagaacagaatatgtatggcactaattaccatattacttcgtatcatggtgtttgtttgtttgtctgtgtttaaagttaaggatgttatacccttcgtgcctgctacatatatatagtgggcactataatattaccaataaattaacgtccatatataagaataataataaataaataaatatttctatacaaataaaggttacgtaatgttgttgttctcgtggatggggatcttatcttcctcctcgctatctttgtttatcgtatttcagtgaaagttgttcaataaaagtcctttgttcaacaagtgaaaaaaaaaaaaaaaaaaactcgagagt

SEQ ID NO: 7201 - DNA, 1468 bp, Glycine max
  misc_feature (1381)..(1381): n is a, c, g, or t
  misc_feature (1421)..(1422): n is a, c, g, or t
tttttaatatatgattgaggtcaaggcatacattcaaggcatggggcattcaactgttagatacatgatatgggggaatgcaatcaatgtacatactccccatagttaaattcagttaacctaaacaagaaactgttacttctagtttaaactaccaattaatttagaacactacaaaatatttttaaaaagaccaaaataaagtatacatgttgagatatccagtgctccaaaagactgggaaaaggaagaagaccacagttttgcaaattactgccaatcctataaggtaattgttattgtacaaaagggaaaaaaaagttttatcttcatccaattttacctgcatccttttccttcgtcaggtgaattcaccatcatgataatctttagtcagatcactagctaccctcctcaagaaatttgataatgtcaattgaaagacccctccaaattttaacaaatgacaacaaccaattgaggaaaagaagtgaactactgtacggtaccatttcagcctgcaaccttaattgcccccaattcatcaatctttgagctcttatgcttgctctttttgtgtttgtgcacatcattaacatcatcgtctccatcatgcttccgtttcttttcatggtgtttctttgagtgatcagcactggaatcacgatgtccgcttttatctttctttttgtccctgtccttatccttgtccttgtctttgctacggtctttatgacgatgcttgtgcttcttgtgctccctatccttatccttgtccttgtctttgtgctttttatgcttcttctccttgtctttattctcactttttgattttcctgcaatagttggaatccctttctctgcagcaggcaaatcaatgggagctgtttcccgtaattgaaaagcttccttgagaacatctaggtcaaaaggctgtatacgagcatttgtatctctgaaagatgtattctgaataagttgatccaattgcatcccatctccttttcttatttctgtgtctcctacaacattgtgaaggtagtgtgtgtccgcgattgacacagggagaggcctcttgcagaaaaactcatagtggggcagtaatttgaaatgacttataagatccacagcaccagtcaattcccttggtcctcctccaaactttttgccttcagggtccatgagtcaatctttcatgagctgttgaaccattaacaactgcaatttattagatgacacaaggtatctttcatccataaatgtcaaaactcaaaagaggtttcaattgcaagatttcaaaataaatataggctctccatataagggcagagtttttttacagaaaggtaaaaattatattaaagaaaaaataagggaaatncacaagagtggataaggtatccacaaagcatttggggggnnggcctacgtagctgactcgattgggggggggggcctacgtagctga

SEQ ID NO: 7202 - DNA, 3147 bp, Glycine max
tacggctgcgagaagacgacagaaggggaataataataatacttcagaaaactcaactagtcctcattgtcactgcgtcacgaaccctaatcccttttcttcttcttctcttcccttactctcatcctcgattcagtggcagaggtgacggaattcacgtgatttccatgagtggctccgttttccttgaatcgaacaccacgtctgttcacggttcgcggtttccgaaattgagctcgattcctcgtcagtggtgatcgtcagtgcatgcatcctcggattggtaatgtgcgagcttgatccatctatttgcggcgttttgagttaattttgcctgactgggaaatcatggcgcagagtaattgggaagcagataagatgcttgatgtttatatttatgattatttggtgaagaaaaagttgcataacactgctaaagcattcatgacagaagggaaggtttctcctgatccagtagcaattgatgctcctggaggttttctttttgagtggtggtctgttttctgggatattttcattgcgaggacaaatgagaaacattctgagactgctgcagcatatttagaggcacaacagattaaagcgaaagaacaacagcaactgcaaatgcagcagttgcaattaatgcgtcaagctcaaatgcaaaggagggattctaatcatcctccccttggaggtcctgtaaatgctatcactgcagaaggagtgcttgggcaatctactgccagtgctttggccgcaaaaatgtatgaggagcggatgaagcactccaaccccatggatacagagacatcccaaccacttttagatgctagaatggctcttttgaaatcaacaaatcatcctggtcagatggttcaaggaaattcaggaagtgtgacggcagctttgcagcaaatccagactcgaactcagcaaacacctcaggatatcaaacctgaagtcaacatgggtaccatgcagagatccttgcctatggatccttcatcaatttacgggcagggaggaatgcagtcaaagcctggaattgcaaatgcaggattgaatccgggagttggtagtctcacattgaaaggatggcctctaactggcattgatcaaattcgtcctggttttggagcaccagttcagaagcctctccttcagagtgcaaatcagtttcagctctggccgtaggccccccccccccagatccttgcacaggttcgggcacaaggaaatattggcaattcacctgcttatggagatatggatccacaacggttaaggggattagctaggggaagtttgaatgctaaagacggtctatcaattgcaaatgatggatcaataggctctccaattcaatctacttcatctaagatcaacatggcacagatccaacaatccacctcccagcaacaacaggatcctttgcatccacaacaattggtgcagaataaccggaaaaggaaggggcctacatcttcaggaccggccaacagtactggtaccggaaatacacttggcccttctaattctcagccatcaactccatccactcatactcccggtgatggagttgctatggcgggtaacttgcagaatgttgctggtatatccaaaggtttgatcatgtatggtactgatggagtgggcggtcttgcatcttcgacaaatcagctggatgacatggaacattttggagatgttggctccttagaggacaatgtggaatcatttctctcacaggatgatggtgatggaagggacttgtttggcacattgaaacggaacccttctgagcatgctacggatgcttcaaaaggcttttccttcagtgaagttggttctatacgcaaaagcaacagcaaagttgtttgctgtcatttctcttcagatgggaaattattagctagtgctggacatgacaagaaggttgttctgtggaatatggagacattgcaaacagaaagcactccggaggaacacagtcttattattactgatgttcgcttcagaccaaattcaactcagctggcaacatcttcatttgatacaactgtgcggctgtgggatgctgcagatccaaccttccctttacatacatatagtggtcatacttcacatgtggtgtcccttgatttccacccaaagaaaactgagcttttctgttcttgtgacaataacaatgagattcgcttctggagtattagtcaatattcttccacacgtatttttaagggaggatctacacaggtgaggtttcagccaaggcttggtcaccttctggctgcagcaagtggcagtgttgtgtctctctttgatgttgagactgacaggcagatgcacacgttacagggacactctgccgaggtacactgtgtctgttggggttccaatggagattacttagcatctgtgagtcaagaatctgtcaaagtgtggtcacttgcctctggggagtgcattcatgaacttaattctagtggaaacatgtttcattcttgtgtttttcaccctagctactccactcttttggttattggaggatcccagtcattggaactatggaacatggctgagaataaatgtatgacaattccagctcacgagtgtgtgatatctgctctagcacagtcaccacttacaggaatggttgcttcggccagtcatgacaaatctgtaaagatttggaaatagaattgattttgtggttcaaacaaccgtatcatatatgctacctgttacattgtcaggtataacaacaggtaaagcaggattgaagaaagtacaaagatgatgtgagaagaatctcccacgagtgatgtatccaccatcctctccctatttctccttcgtcatctactatgataaggggcttagttcattttctttgttcctgttagtttgactaatccttttgtttatttttctactaaaaaatttaaattattgcttggttgtttgccagatgttgtgcaaatgagggttgtcattgttattattagccccttttcttttaatatccaaaatgtatgttgtacaagttttcattgtcttttttactaattaacagatgacaccaattaattagtaatgaatatataaattgatgatttttaactggttggagaagtcctagag

SEQ ID NO: 7203 - DNA, 1776 bp, Glycine max
tccagatttcctgacatcagaaaaacaaatggaaattctgtaattgaattagctagtacacccacaaagataagtggggtacattatgttcagggggtagttatattccatgatgtgtttgacaatgagtatgatgttggcggttctcaaatcagaatagaaggtgtatatatatggccttttagacagcttcgaatggtagccaaccgggctcgtgggggagagttgaatcagaatgaagattatattttatctaatccatatcatctgcttggagttttctcatctcaggtactgcaagattcttcgcgagataagatgtggagaagaaagcattctctgattcatgacatggagaaacattgtaatattgaaattgctgctcagatttcacacttgccatcacaaaataacgaaggtgaacatgatcattttcatctagaagggttaatggagagtccctcagctgatgatgatggggactgcttctcaccattactgttaaatgcaacgtctgtcaaaattgaggtctactataacaaagcagtgaactataccttgatggtcacttttgtctctttcttgcaagtccttctattaattcgtcaaatggagcatagcagcactcaatctggcgctgctaaggtttcaatattaatgattggccagcaagcaataatggatgcctatctttgccttttacatctgactgcaggaatactagttgaatccttgtttaatgcttttgcaacagctgcatttttcaagtttgtagttttctcaatatttgagatgagatacctccttgctatctggaaggcaaataggcctttgagtaatggggaaggttgggaaacaatgaggcgagaactttcagttttatacagtcgtttctatgggatcttgttgggaggcattctactcatgtacgagttccattattatttgagacctattcttcttcttatgtactctttttggatacctcagataatcaccaatgttattcgcgattcacgcaaaccattgcatcctcattatatcttagggataactgttactcggcttgcaatcccattatatatttttggttgcccaaacaacttcatgcgcataaagccagacaagagttggtgtgtgtgtttggctgtatttattggacttcaagctgcaattctcctacttcagcactatcttggttcacgttggttcattcctcgtgagattctccccgagaaatacagctattataggagggccgatcaggatacacgacatgctactgactgtgttatttgcatgacagccattgatctgtccccgcgatctaatgattgcatggtgacaccttgtgatcatttcttccactctggctgtttgcaaagatggatggatataaagatggagtgcccaacttgccggcgcccgctaccccccgcttaaagatctttcttctctgtttatgtcaataggatcagctgaccctgctcaacttcatagttttagtatatgcttaaatgaccaaattttacattgtttttgcttttaattttacaagagaagtgaaattacacgggctttggtggtcaaccttttcttctcatgtgaggactgaatgtttcttctgctcatacaaattttgtaatttgattttgccaccttaccccgtatgctgagggtatatttttgtacataagttggaagggcaatcaacattaaattgtacttttttctcaatacaaaatttatttttattcttcaaaaaaaaaaaaaaaa

SEQ ID NO: 7204 - DNA, 2292 bp, Glycine max
tcccgcctcgacccacgcccctggtggcagactttgctggtgaagcgaattttgtttcctagtcgttggcctttcactgtctctctctccttctcctcttatctgaatcatcctctctctgtgagtgaggtgactcgttgttgtttgtgacccggcgattcgttcctttgactccattcgaagcaaccctttgtctttcttaagcagtttcctgtgatgggctttggatttttcttttggattccctgtgatcacctgggaactgggttgttcaaattgaattttttgtgaggtatgctgtgtttggggtttgacatggttgaggttgactctgaaagattgaaacttgagagtagaggagtggggatttggctgagaattgcatgtgggtggttggtgtttatgctgtttttcagtcctgtggcaggtttgagacccttgagggacagaactaattcatggggtgatgagtgggtttttacaagaaaagacgaaagtgacttaggtccattttcacaatggaacataagtggaacttacagagggaattggaagtttttagatactacaaatggttctaccggatttccagacatcagaaaaataaatggaaattctgtaattgaattagttagtatgcccacaaagataactggtgtacattatgtgcagggggtagtcatattccatgatgtatttgacaatgaatacaatgttggtggagctcaaatcagagtagaaggtgtatatatatggccttataggcagcttcgaatggtagccaacagtggaaaagaggtggggttaaatcaggatggagattatattttatccaatccatatcatctgcttggagttttctcatcacaagtattccaagagtcttcacaacataagatgtggagaagaaagcattctccattacatggcatggagaaacattgcaatgtagaaatcgctgcacatgtttcacgcctgtcatcatcaaaacatgaaggggagcacgattctttccagctagaagggttaatggagagtccgtccgtggatgacgatggggactgcttctcgcctttacagttaaacgcaacatccatcaacattgaagtctactataataaagcattgaactataccttgatggttacttttatctcatttttgcaagttcttcccctcgcgccccccctcgcgcccggcaacacccaatctggggctgctaaggtttcaatattaatgattggtcagcaagccatagtagatgcttatctttgccttacacatttgactgcaggaatactagttgaatccctgttcaatgcttttgcaactgctgcatttttcaagtttgtggttttctcaatatttgagatgagatatctccttgccatctggaaggcaagtaggcctttgagcaatggtgaaggttgggagacaatgagacgtgaattgtcagttttatacagccgtttctatgggatcctattgggaggcatactgctcatgtatgaattccacaatcatttgagacctattcttcttcttgtatactcattttggatacctcaaataatcaccaatgttattcgtgactcgcgcaagcctttgcatcctcattatatcttaggcataactgttactcggctagcaatcccattatatatttttggttgtcctaacaacttcttgcacatagaaccagatcagagctggtgtgtttgtttggctatatttgttggacttcaagctgcaattctcttgcttcagcactattttgggtccttgtggttcattcctcgtcagtttctacctgagaaatactgctattatcggaggtttgctcaagatacaaatcatgccacagactgcgttatatgcatgacagccattgatctttctccgcgatctaatgattgcatggtgaccccttgtgatcattttttccactctggctgtttgcaaagatggatggatataaagatggagtgccctacttgccggggccctcttccacctgcataaagagatttctagtgttcatatcaagagaatcaactcacactgcccaacaacataattttggttgggatagaatccatattccgtataattgcaccttcagtacaatactgaaatacgatacttctcacaattgtatcatgcagcattgttataattttagactctttttttcctctcctttttatttcactggttatgtatcaatatcaagttgtacattagaaattcaatatgatgatcttttgacatccaaaaaaaaaaaaaaaaaaa

SEQ ID NO: 7205 - DNA, 1106 bp, Glycine max
ggtttcgtaaacgagaaggcagaagcacattgaaaactgagcagttgaaatgtgcgttgcaattttgttgttaaatgaaatttcaaacgaaaaaaaaggaagaggcgagtccgctaggccgtgtccgaaaagtgggccatgtcggacaccgcgtctctgtcgtgtccacgtcagaaatgcctccgacacactgaggtggcagtactactgtgcggctgtcggatgctgcagatccaaccttccctttacatacatatagtggtcatacttcacatgtggtgtcccttgatttccacccaaagaaaactgagcttttctgttcttgtgacaataacaatgagattcgcttctggagtattagtcaatattcttccacacgtatttttaagggaggatctacacaggtgaggtttcagccaaggcttggtcaccttctggctgcagcaagtggcagtgttgtgtctctctttgatgttgagactgacaggcagatacacacattacagggacattctgcagaggtacgctgtgtctgttgggatacaaatggagattacttggcatctgtgagtcaagaatctgtcaaagtgtggtcacttgcctctggggaatgcattcatgaacttacttccagtggaaacatgttccattcttgtgtttttcacccaagctactccactctcttggttatcggaggataccagtcattggaattatggaacatggctgagaataaatgtatgacagtgtcagcagctcacgagtgtgtgatatctgctctagcacattcacccgtgacaaggatggttgcttctgccagtcatgacaaatctgtaaagatctggaaataaaattgattattttatgatttaaacaaacatataagatgtgctacatgttatattttcaaggtataacaacataaaaaaacaaggttgaatggatgggtcaagagacgtatctccaccctctcctaatcttcttatttatctatttgctaccctctcctaatcttcttatttatctatttactacggagaaatttaaatcgatacttggttgctagtcatatattgtgcaattgagagtttgttattgttgttgtt

SEQ ID NO: 7206 - DNA, 1155 bp, Glycine max
tcgagtcagctacgtaggcccccccccccccagagaatcaaaactacgtagttcttcacactcatcatcatcattgcaccacaccctaattggtacctctgcagtatcatcatcatcttcttcagctccaatgatacccccatcatcactttctcttgatcatgcatggaacaatggtagtagcattagtactactgttaatgcaactagggttagtgatcttgagtccccaacatctaccttgtctgagaataatgcaccaccaattaatattactagtgttattgagtttgtgggttcttcagagagagggacggtgaaggaagagggagagcaagagtggaacaaattaggttatcatgaaagcttcacccatttgggagaatacaaagatggcaaggagaattcaatgcctttcacgtctagtctgcatgagttgacaatgaccatggcaaccacgtggggttctagcactagtggtgcacatgcacatgcacatgttgctgaggagggttgtttcaccaatcttttgctgaatgctaactccggtgcccggagtttgtcgccacaggacggtggagagtctaataattgtcacgataatgctcgtaacagtggcagtggtagtagcaatgctgacttatatgaagaaaacaagaattattggaacaacattcttaatttgatgaattattcttccccttcggattcacccatgttttgattaaattgctttggaattggaaggtaaataaatcctttcacgtttgaatttgatcaaacatgtattgtcatgttaaattcttgtaccagccctctgttagatgctataaatatgtggggcttgtttaaaatttacatagagagaaataaatacaaaatttcaacgttacttacgaagaagaccggagggagggtcaattcttgtgttggaacttggaagtgtgtgaattgcggcatctctccatcaaacaaaatcaaaggccattgattttcttcagaatgttgccataagaagagagcatagtcacgggaaaatgttgattccgattagtatgtttttatttttgtcaatgctttcacatagaaaattaagtgtgtgtcgcttcgagcatcaatcaaatgttcatattaaaattttttggatttgacttg

SEQ ID NO: 7207 - DNA, 1045 bp, Glycine max
cccacgcgtccgcccacgcgtccgtcggctgcgagaagacgacagagggggagcatctagctagttaattcacaaacttgagttggattttggtgatcttgtgaattgatctgcgatgtcggacgaggtagttctgttggatacatgggctagcatgtatggtatgagggctaggattgcattggctgaaaagggtgttaggtatgaatacaaggaagagaatctcatgaacaggagtcctttgcttttgcagatgaacccaattcacaagaagattcctgttttgatccataatggcaaacccatttgtgaatctgcaataatagtgcagtacattgatgaggtctggaatgacaagtctccactcatgccctccgatccttacaagagatctcaagccagattctgggtggactacattgacaaaaagatttatgatacttggaagaaaatgtggctttctaaaggagaagagcatgaagaagggaagaaggagttgatctctatctttaagcaattagaagagacactaactgacaaacccttttatggggatgacacgtttggctttgttgatctttgtttgatcactttctctagttggttttatacttatgagacatatgggaacttcaaaatggaagaagagtgtcctaaactcatggcttgggtcaagagatgcatggagagagagactgtgtccaatactcttcctgatgctaagaaggtgtatggtcttattgtggaactgcagaagacacttgaatcgaaatagaagatttcaataaatcaacccattaaataatattttcatgttaaatatgttgttgtaaggtcttgtgtacttttcctctatggttgtgtgggttgggtcagtcatttatgtggtttactagacactaatacatcttctctattgaagattaaggtatctaattatttttcccattactatatattgaatattatcgtctttgacattgaaaagaaagaaaacgtagaaaaagcaaagacttgtactattcattaaaaacggaattctctc

SEQ ID NO: 7208 - DNA, 510 bp, Glycine max
acctttctcttctttccgccctacttgcgcctgcgcagccgcctccgtcgttgtagcagaagcagcgatcccccgtcgccaacacccgaagaaagcatggatacccaggtcaagctcgcagtcgtggtgaaggtgatgggccgcaccggctccaggggtcaggtgacccaggtcagggtgaagttcctggatgaccagaaccgtctcatcatgaggaacgtcaagggccctgttcgtgagggcgacatcctcaccctgctcgagtccgagcgggaggccaggaggctgcgctgagcggctgcttttcctgtcttcggaagtaaactctactgcatttgaatcaacttcttgaacgctggctttgtcttttgcctaggctatggaaatgtaagcagtacttaataggttgcagttttcttctgttgcctgaattaaagtgcacttgatgttgtgagacttgatcatccttgcgcacctctgggttatttgaattgattggatgaatgatat

SEQ ID NO: 7209 - DNA, 1248 bp, Glycine max
atattctaacaaaccctttctcacccttttaggccacaataattacattcattcttatggctcgggccgctgcggctcgaatttttattttactcattcacataattgtttttctaatgaagcaaccttaatattttgccttggtctagtttattggttgtgttgtctccgaggattgaaatccaatccgtgcctcctttttatctgataacacaaaaatggcaaatgctttgagagttggtagtgttatctcactctgctcccttcggaacacgagaccccatcttccccttctctccaacgccacgcgcttccgttccaagttcccatttttcaccctctcatcgtcgccaaatccatctgggtatccaccatttcgcacactctcttcttcttctgcttccacagatgaggcagtgaccaccgaagccatcactagcaataatgcaagtggtgaagctgagaacagtattaaggatgcggcggggttgcttgacatgagggttgggtgcattctgagagcatggaaacatgatgaagctgattctctctatgtggaagaggttgatattggtgaacctgaacccagaatcatatgcagtggccttgtcaaatacatccctctagaacaccttcagggcaaaaaggttattgtcctttccaacctgaagccaagaaatatgcgtggtgtcaagtcctgcggaatgctgatggctgcttctgatgcaaaacatgaaaatgttgaacttttgttccctcccgaggaagcaattcctggtgaaagaatctggtttggaacggaagatgaaaaggataatcaacctgatgctgccactccgaatcagctacaaaagaaaaagatatgggaattggtgcagccgcatctcaagacagatgcttcttgtattgcaatgctaggggagcatgtcatgcgttcatctgtaggttcagtagcttgccagtcattgcagaatgcaaatatctcctgatcagcactgtcaatttgttaccctactcagccattcaggcactgcctatctgtatgcaattattctgcttcataatggaatttttggttgataaattggcgtttgttttgtatgtactttgattttttaatgttttagtttacattttatcactttcacttggacataatgatttcagctgagtataaacctcatcactgcataagtaaatgatttttcttcatggcaaaaaaaaaaaaaaaaaaaaaaaaaaaaaaaa

SEQ ID NO: 7210 - DNA, 855 bp, Glycine max
ccaattggattgagggtccacacgtatattctccggcgtgagcgcgtcaagtgggaagagataaggaaggcattgataatcatagctatggcaacggcgagtgcaagttgtgcggtatcatttagaaacagcttcggtgtgagtaaaccctcggatcttgggttcttgagctctcgtctgaacggcctcagaatctgcttccccaaattgccacccacacccctcactgcttctcccttccccacacccctccctatcgttgccaagagagtgtgtcccttcactggaaagaaatcaaacagggccaacaaagtatcattttcaaaccacaagacaaagaaactgcagtttgtgaaccttcagtacaagagaatttggtgggaagcagggaagcgctacgtaaagcttcgtttgtcaactaaggcattgaagacgatagagaagaatggacttgatgcagttgcaaagaaggctggaattgatctcaggaagaaataagcctatctaataattattgtaatttgtatcagagtggaagaatacattcatgttccttggtgttaattgtagaattttcttttgcgtatattattttcaaaagcaagttgtgttgatgtttgtagagaaacaaaatatggcaaggtcatgagcttactaggccatgagtctcgctaatggaaatctcttttgacaaaaacaaaaaaaaaaaaaaaaaaaaaaaagccatggatatcataggatccttagtagcttcgtcaacttgaattatcctacaaaattggtattatgatgtattttgaattgtagtcaccacagccacaatagctgttgccaaaaaaaaaaaaaaattaaaaa

SEQ ID NO: 7211 - DNA, 470 bp, Glycine max
cctccgatccaagggtttcctcgcgccgccgccgcagccgcctccgtctccgccgccacgatgccgtcgcacaagaccttccggatcaagcagaagctggccaagaagcagcgccagaaccgccccatcccctactggatccgcatgaggaccgacaacaccatcaggtacaacgccaagcgcaggcactggcgccgcaccaagctcggattctaagccggggatgacgatgatgacgcccgttgccgccgacgggagaagggtctagggtacctagggtttatggcgtctcgttgtttttgcaagctagcatgtgactccgggatgcctgttttaagattaagatttcgcttgtgttgagagatattattatttactgcttgtagcctacctgggataccatcatattttgctgattatggaacagcttttatcctgcttaagctctgtattttgcccgagttgaaatg

SEQ ID NO: 7212 - DNA, 458 bp, Glycine max
ctccgatccaagggtttcctcgcgccgccgccgccgccgccttcctccccgccgccacgatgccgtcgcacaagaccttcccggatcaagcagaagctggccaagaagcagcgccagaaccgccccatcccctactggatccgcatgaggaccgacaacaccatcaggtacaacgccaagcgcaggcactggcgccgcaccaagctcggattctaagccggggatgacggcgatgacacccgttgccgccgacgggagaagggtctagggtacctagggtttatgacgtctcgttgtttttgcatgctagcatgtgactccgggatgcctgttttaagatttcgcttgtgttgaaagatattattattattactgcttgtagcctacctgggataccatcatattttgctgattatggaactacttttatcctgcttaaaaaaaaaaaaaaacccgag

SEQ ID NO: 7213 - DNA, 1497 bp, Glycine max
tcgagtcagctacgtagtgcccccccccccccccccccgggaggagatatttatattgggtgctagtgagtgatggcgaggagggtgtgaattctaaaaggaaagaacagctgagctggtcagaaaatcaatggcatcatccttgggttttgagttcctgacgaagaagccttacagtcctccatcctgggcatcccatctccaccctttaccttcccacttcttctctcttgcccatcttcccactccaattcacagatggaaccttcccaatctgcccaccaataccgagctgtggatcaagcgagacgacctttccggaatgcagctgagtggtaacaaagtgaggaaattggagttcctgatggccgatgccattgcgcaaggcgccgactctatcatcacaatcggaggcattcagagcaaccactgtcgcgccaccgccgttgccgccaagtatttaaaccttgactgttttctcatcctccgcacttctgacctcctcgtcgatcaagatccaggacttactggcaatcttctcgtcgaacgtatggttggagctcacgttcacctcatctccaaacaagaatatgccaaaattggcagcgtgacactcaccaatgtcctaaaagaaaaattgatcaaggaagggaggaggccatatgttatacccgttggcggatcaaactctttgggaacatggggttatatagaagcagtacgggaaattgagcagcagattcagaaggggacaggcaatgtcaagtttgatgatattgttgttgcttgtggcagtggtggcacaattgctggtctgtcactaggatcgtcattgagtgcattgaaagcaagggtacatgcattctctgtttgtgatgacccagattacttccacaactttgctcaaggcttgcttgatggactcaaggctggcgttagctcaagagatattgtccacattcaaaacgccaagggtcttggctatgcaatgaatacatcggaggagcttaattttgtaaaagaagttgctgccactactggtgttgttcttgacccagtatacagtggtaaggctgcttatgcaatgctgaaagatatgtctgaaaatccaaagaagtgggaaaggagaaagatcctcttcatacatacgggtggcctcctaggattgtatgacaaggtcgatcagttggcttcttttgttgggaattggcaacgaatggatgtcaatgaatctgttcctaggcaggatggtattggaaagatgttctagagaaggaaaatgaaaaaacctgacgttgccagcatctatattttgtactatcttgctctaaataaattttatacttatatttaatagccatatgctcacactgaatcctgcctgaagttaccataagatagtaaagttccaaaaacttaagtgacaaataaatcaagttttatttatttttaaaaaaaaaaaaaaaattcgcgtggcatgccattaatttgtcggtt

SEQ ID NO: 7214 - DNA, 1995 bp, Glycine max
cggacgcgtgggcaacacctctattcacggcccagacaccaccacccaacccggttcatgttagcataggaggttgagtagttcttcatcatagtcttaaacattaaaccttagcaaaactcaacaatgctagacatcaaaggctacctcgtactcttcttcctatggttcatatcaaccattctgatacgttccatcttcaagaaaccacagcgtctaagactcccaccgggtcctccaatttcaatacccttgctgggacacgcgccatatctccgttcactgctccaccaagcattgtacaagctatcactgcgctatggacccttgatccacgtcatgatcggttcgaagcacgtggtggtggcgtcgtcggcggagacggccaagcagatcctcaaaacctcggaggaggcattctgcaaccgtcccttaatgatagcgagcgagagcctaacctacggcgcggcggactacttcttcatcccctacggcacatactggcggttcctgaagaagctctgcatgacggagcttctgagcgggaagaccctggagcatttcgtgagaatccgcgagagcgaggtggaggcgttcctcaagagaatgatggagatttcaggcaatggaaattacgaggtggtgatgaggaaggagctcataacgcacacgaataacatcatcacgaggatgataatggggaagaagagtaatgcggaaaacgatgaggtggccaggttgaggaaggtggtgagggaggtcggggagttgcttggggcgtttaacttgggggatgttattgggttcatgaggcctttggatctgcaagggtttgggaagaagaacatggaaactcaccacaaggtggatgcgatgatggagaaggtgttgagggagcatgaggaggctagggctaaggaagatgctgactctgataggaagaaggatctttttgatattttgttgaacctcattgaagctgatggtgctgacaataagctcactagagagagtgccaaagcctttgctctggacatgttcatcgccggcacaaacggccccgcaagcgtcctagagtggtcactggcggagctggtgagaaacccccacgttttcaagaaggcaagagaagagattgagtcagtggtaggcaaagaaaggctggtcaaagaatcagacattcccaacctaccatacctacaagcagtgctgaaggaaaccctaaggctgcacccgccaaccccaatattcgcaagagaagccatgcgaacatgccaggttgaaggctacgacattccggaaaattccactattttgatcagcacatgggccattggtagggatccaaattactgggatgacgcactcgagtacaagccggagaggttcttgttctccgacgacccgggcaagagcaagattgacgtgagggggcagtactatcagctcctgccctttgggagcgggagaagaagctgccccggagcctcgctagcgttgcttgtcatgcaagcaacgctagcgagtttgatccagtgcttcgactggatcgttaatgatggtaaaaaccatcatgttgacatgtctgaggaagggagggtgactgtgtttttggccaagccactcaagtgcaagcctgttccgcgtttcactccgttcgctgcctgaagactgtgaatggaatggtttctctagttgtgtgtgctttacctactctatatttttaccttatttttgcttactttgtggcactagtatttgttttgggaagtagcgttgcttctgtaaacttggtggcaggggtatattatttatggaaataagtggtggcttggtagttattcccgtccatttctctaatgctgcctaataatttaaaggagttaatcaggccaatgaatacagaatgctgcctactatttctttttgttttttattacatcacttatcacttttttctttaaaaaaaaaaaaaaaaaacgagactagttctct

SEQ ID NO: 7215 - DNA, 526 bp, Glycine max
gaaccctagcctccggatccatccatccgcccctcgctgccgctgcgtctcgtctccaccaccccacttgcccccggactcaggaggatcgtcggagatgtcggacaccgatgagcaccacttcgagtccaaggccgactccggcgcctccaagacctacccgcagcaggccggcgccatccgcaagggtggacacatcgtcatcaaggcccgtccctgcaaggttgttgaggtctccacctccaagactgggaagcatggtcacgcaaagtgtcactttgttgccattgacatctttaatggaaagaagcttgaggatatcgttccttcatcccacaactgtgacgtcccccatgttgaccgccaagattatcagctgattgacataactgatgatggatatgtcagccttctaactgagagtggcaacacgaaggatgacctgaagcttcccactgatgatgttctgcttggccagatcaagactggatttgctgatggcaaggacctgatcctgtctgtgatg

SEQ ID NO: 7216 - DNA, 560 bp, Glycine max
  misc_feature (509)..(509): n is a, c, g, or t
  misc_feature (525)..(525): n is a, c, g, or t
aggtttctctccccgccgtcgccttcctccctcgccctcgcctccccgccgccaccccaccaaagcagagagctcccggcttctcccccctacgaggttaggcaaggatggtgagggttagcgtcctgaacgatgctctcaagagcatgtacaacgctgagaagcgtggcaagaggcaggtcatgatcaggccctcctcaaaggtgatcatcaagttcctcatcgtcatgcagaagcacggttacattggtgagtttgagtatgttgatgaccacagatctggcaagattgttgtggagttgaacggcagactgaacaagtgtggagtcatcagcccccgctttgatgttggtgtcaaggagatcgagggatggaccgccaggctgcttccatctcgtcagtttggctacatcgtcctgacaacctctgctggcatcatggatcacgaggaagccaggaggaagaacgttggtggcaaagtgctaggctttttctactgagcggaaatnttgtgaaagttgtatntcagaccggtgtgataggatgttatctcaggacat

SEQ ID NO: 7217 - DNA, 507 bp, Glycine max
cccccttgcgccgtcgccttcctgcttgccgctctcgctccgcagacgccgccgccgccgccgccgccacggccagagctcgactcgctccctagaggtaaggatggtgagagtcagtgtgctgaacgatgctctcaagagcatgtacaacgctgagaagcgtgggaagaggcaggtcatgatcaggccttcttccaaggtcattatcaagttccttatcgtcatgcagaagcacggatacattggcgagtttgagtatgttgatgatcacaggtctggcaagatcgtggttgaattgaatggcaggctgaacaagtgtggtgtcatcagtcctcgctttgatgttggtgtcaaggagattgagggatggactgcaaggctccttccttctcgtcagtttggttacatcgtgctgacaacctctgctgggatcatggaccatgaggaggcaaggcgtaagaatgttggtggcaaagtgctaggctttttctactgaaaatggaaaat

SEQ ID NO: 7218 - DNA, 1198 bp, Glycine max
gagacctctctgttttttgttcaaaagcatataagagatggggttagaagggaaggaaacgccgtcgtttatgagggattttctcgataagtgtggtggctgcgccgttattgacggtggttttgccactgaacttgaaaggcatggggcggacctcaatgacgaactctggagtgccaaatgccttattagctccccacatcttgtccgaagggttcacctagattacctcgatgcaggagcaaacataatattaacagcatcttatcaggccactattcaaggttttgaggccaaagggttctctagagaagaaggtgaaactatgcttagaagaagtgtggagattgcacgtgaggcacgagaaatttattatgataggtgcaccaaagattcttctgactttatgagagatgaaagatataggaaacgtcccattttaattgcagcttctgtgggaagctatggagcgtatttggctgatggctctgaatatgttggggactatggtgatgcagttactgtccagacactgaaagattttcacagggaaagagtaaagattcttgttgaggctggtgctgacttaatagcctttgaaacaattccaaataagctggaggcacaggcttatgctgaacttctcgaggaagaaggcatagaaactcctgcgtggttttcttttagttgtaaggatgaaagcaatgtggttagtggtgactctatctttgaatgcgcttcaatagctgattcatgcagacaagttgttgcggttggagttaattgtactgctcctagatttattcatggattgatttcatttatcaagaaggcaacaagtaaaccagtacttgtatatcccaacagtggggagacttatatcgctgagagcaaccaatgggtgaaatcaagtggggcagcagagcatgattttgtctcctacataggcaagtggcgtgatgctggggcttccctttttggtggctgctgcaggactactcctaatactataagaggcatagcagaggcaacatatgggaaacttaaagacaaatgtatataactgttgaagtgtgtttttatctgtaatggaagaaactataataatctgaatgaaatggctaactttttgccggaggagcaagtgatctatcatttctaataaaaatcaaaaaaaaaaatactcgcgcgtgcactt

SEQ ID NO: 7219 - DNA, 1381 bp, Glycine max
  misc_feature (1374)..(1374): n is a, c, g, or t
attcggctcgacccaccgcagaggcgccggtcgcagccaacgccggcctcgtcttcttcaacggaaaactcctcgccatgtcggaggatgatttcccctacgaactccgaatcaccgcctccggcgacctcgaaacaattggccgctacagctttcacggccagctcaattcctccatgatcgcgcatccgaaggtcgatcctgtctccggagagctttttaccctaagctacgacgtcacgagcaagatcctcaaatacttccatttctcgcccgaggacgagaggaagtcgccggacatagaaattccccttgacgcgccgacgatgacgcacgacttcgcgatcacggagaatttcgtggtgatcccggaccagcaggtggtgttcaagctcggcgaaatgatcaaaggaggatcgccggtgatctacgacggcgagaagaaatcgcggttcggaatactgccaaagtacgcttccgacgcgtcgagcatcgtgtgggtggactcgccagacacgttcttcttccacttctggaacgcgtgggaggaacgcgacaaagacgaagtggtggtaataggttcgtgcatgacaccaccagattcaatattcaatgacagagaagagagactgaagagcgttttaacagaagtaaggctgaacatgagaagcgggaaggcgaggaggagggtgctggtggaggaaatgaacctggaggcagggatggtgaacaggaaaaggttggggagaaaaacacggttcgcatatttgtgcatagcggaaccgtggccgaaggtgtcgggggtggcgaaggtggacctggagagtggggaagtgaagaggcacgagtacggagagagaaggttcggtggagagccattcttcttgccaacacgtggagggaatgggaatgaggatgaagggtacgtgatggcttttgtgcatgacgagatgacgtggcagtccgagttgcagattctgaatgcacttgatttgaagttggaggccactgtcatgctgccttcaagagtgccctatggcttccatggcacgtttgtggaggctcattgaagtccacctggactattttatttggtcgcttaaacggtaaaacacatttcagacaacaaacattttgttgccttttctacccttctcaataataaatatttatctatgctttcgcgaatcagcttgtagtttgtggatgaagctcagctgctttctgtttcttgcttcctttcttttgttttaaaaaagaattcgctttctgtttggcttttggttcttcaattttcaatcttgccttcctgactctcttgcccaaaaaaaaaaaaaaaaaaaaaaaaaaacagcggccgctctagaggatccnagcttcg

SEQ ID NO: 7220 - DNA, 1247 bp, Glycine max
acgcaaagcccaacgagcgcatacacacacatacaccaaacaaacaccacaccccgacgcagttcctccgctgtcggcgacggaggctgcaacactctcaactacactacacgacgccggtttgcattttccaaaccagtcaagctatactattactatagtttcatttcatggagacgcaatcgcatgaagatttacagcaaccgccgccggttacttcaaatgaagctcacagtgatgatgcgtccgaccacagagacgctgagcaaaagcaagatattttgagtactgaagaagttgtgcagattctacaagttgttgcatctacggggaggttctggcatgactgggataagttgaagagtatgctatcgtttcagctaaagcaggtactgtcagagtatcctgaggcaaaaatgacaagtgagcagcagtatgcatcattgggtgaatcctacattgagttggtcaacaaattggatgaagcactcacttgtttcattgaaggccctccattcacgttgcaaaggctttgtgagatcctattggatgcaaaaggcatttatccaaatctttcaaagcttgctttagctcttgaaaagaacttgttagttacttctacattgacaatctgcactgatccatacccacaagctacagaaaaagagccagatgaccaagagaaggcaagtgaaaagcagcagcagcagcaacaatctgatagtgcacaaaatggcattgagcctttggtgtctgacaatgacgaagtaatgcccgaggctgatgtaggtgatgacatgaccattgacatggaagcttttgaaggcgttaaatcatcagaaataaattccgagcctaatgctaataatgcataagcttcatggttgctgtgcatctttaattgcataaactctgatgagctcaaagactaggatgttttcacttgtggagctccaaatgctatgaggacggcgtggaccttggtcattgcagagtgctttattccctggtttggtaatcattggagctagacattcttagcatttaaaaacagaacagtgtttctaattgtatctcttggatgcaatgcttgtattggtagcatgaagttgagtatctcgctgtagatctgcttttaatttgtgctctaaattcactaacgtgttcatgaactttggcatccttgactatggtagtagctaccttgcacaaaaaaaaaaaaaaaaccgcttatcgataccgtcgac

SEQ ID NO: 7221 - DNA, 1208 bp, Glycine max
  misc_feature (1205)..(1208): n is a, c, g, or t
tcgagtcagctacggtaggcccccccccgacacacacaccacatcacgaggcagttcctccgctttgggcgacggaggctgcaacagtctcattctcaactacactacacgacgccgctttactttttccaaacctgtcaagctgtactattactatagtttcatttcatggagacggaatcacatgaagatttacagcacccgtcggtttcttcgaatgacacgcacagtgatgatgcgtcgaaccacagagacgctgagcaaaagcaagatgtttcgagggaagaagttgtgcagattctacaagttattgcatctacggggaggttctggcatgactgggataagttgaagagtatgctatcatttcagctgaagcaggtactgtcagaatatcctgaggcaagaatgacaagtgagcagcagtacgcgtcatttggtgaatcctacattgagttggtcaacaaattggatgaagaactcacttgtttcattgaaggccccccatttacgttgcaaaggctttgtgagatcctattggatgcaaaaggcctttatccaaatctttcaaagcttgctttagctcttgaaaagaacttgttagttacatctacattgacaatctgcactgatccatacccacaagctacagccaaagagctagatgaccaagagaagccaagtgaaaagcagcagcaacagcaacaatccgatagtgcagaaaatggcgttgagcttctggtgtctgacaaagacgaagtaatgaccgaggctgatgtaggtgatgatatgaccattggcatggaagcttttgaaggcgttaaatcatcagaaacaaattccgagctgaatgctaatagtgcataagctttatcgttactgtgcattgttgaatgcataaactctgatgagctcaatgacttggatgttttcactaggtgagctccaaatgctatgtggacaacgtggaccttggtcattgcagagtgctttattccgtggtttggtaatcattggagctggacatttaaaaaaagaacagtgtttctatattgtatatcttggatggaatgcttgtattgatagcatgaagttgagtatctcgctgtagatctgcttttaatttgtgctttaaattcactagcgtgttcaggaacttatattggttggtttttggcaatgaagtgtatcataatctactggtnnnn

SEQ ID NO: 7222 - DNA, 955 bp, Glycine max
aaaaaagaaaatgattcccaacgccaaaggcagaatattcgttcgggaaattagggttagggttgcagcgtcctccatcagcacccgtatataaatacccttttcccccccacttcttcgaccgtaatccttacgctctctcactcacaaacgcacactgaattcaaaaacatcgaaagagagaggcatggccgagcaaaccttcatcatgatcaagccagatggcgttcaaagaggccttattggcgagattattagcagatttgagaggaagggtttttacttgaaagggttgaaactcgttactgtggaccgtccttttgctgagaagcactatgctgatttgtctgcaaagcctttctttagtggtttggtggattacattgtctctggccctgttgttgccatgatctgggagggtaagaatgttgttacaactggccgaaagattatcggagccacaaacccagctcaatctgagcctggaactattcgtggtgactttgctattgacattggaaggaatgttatccatggaagtgattcagttgagagtgctaacaaggaaattgcattgtggttccctgagggccctgctaactggcaaagctcccagcactcttggatctatgagtaatacaaatgcctcaagttgatcttgaaattggccttaggttgatccagattatctacatgttttctgtttttgtccattgttggacttttgctaagagtttggtaccgtggtttgcatgtagagtctatttatgtcatttctgttgaaacatgctcacagtttgataaattaaatcccaaactagttttgcttttaccttgttgattgttaatgtttttgcatatgagccattgatgaggatgcaggtgcagttacattatagtcttccattgtcatctcaacttcccagttatcataaataaattggcacttgtttta

SEQ ID NO: 7223 - DNA, 867 bp, Glycine max
agcgtggtcgcccccgcgggccgcgggaaccgtattccttacgctctctcactcacaaacacacactgaactaaaaaacatcaaaagagacatggctgagcaaaccttcatcatgatcaagcctgatggcgtccaaagaggccttattggcgagatcattagcagatttgagaagaaaggtttctacttgaaaggtttgaaacttgttactgtggaccgtccttttgctgagaagcactatgctgatttgtctgccaagcctttctttagtggtttggtggattacattatctctggccctgttgttgccatgatctgggagggcaagaatgttgttacaactggccgaaagattatcggagccacaaacccagctcaatctgagcctggaactatccgtggtgactttgccattgacattggaaggaatgttatccatggaagtgatgcagttgaaagtgctaacaaggaaattgcattgtggttccctgagggccctgctaactggcaaagctcccaacactcttggatctatgagtaaatcatatgcctcaagttgatcttgaaattgccttaggttgatccagattatctacatgttttctgtttctgtccgttgttggacttttttgtttaagagtttggtaccttggcttgcatttcaggctctatttatgtcacagtttgataaattaaatcccagaccagttttgcttttaccttgttgattgttaatgttttttcctatgagccatttttgaggatgcagatgcaattacattataatattccatcctcatctctatagataaattgtcaattattgatacatatttgcttctaaaaaaaaaaaaaaaaaaaaaaaaa

SEQ ID NO: 7224 - DNA, 2115 bp, Glycine max
tacggctgcgagaagacgacagaaggggacacattgtgagtatcaacaagaatactcataatataggtagcatatagagctatagttatattgatattgctatttgttaagctcttatttcctcggccatggctaataatgaacgtgatctcttctcggcggagattgtgaatcgtggaattgaaccgtcgggacccaacgctggctcgttgacattctctgtgagggtgaggaggcgcttaccggattttctgcaatcggtgaaccttaagtacgtgaaattgggttaccattatctcataaaccatggcatatacttgttcaccatacccgttcttctcgtggtgtttagtgctgaggttgggagcctcagcaaagaggacctatggaagaagctttgggaagacgcgcgttacgaccttgctacggttcttgcttcctttggggtcttcgttttcaccttgtccgtctacttcatgtcgaggccacgtcccatttacctcattgattttgcatgttataaacccgatgacgaactcaaggtgtcaagggagcagttaatggaggtggcaaggaaatcaggcaagttcgacgaagcaagtctagagttccagaagaggatgctaatgtcctccggaatcggcgatgaaacctatataccgaaggccgtcatcgcctccaccgagaacaccgcaacgatgaaagagggtcgggccgaggcctccatggtaatgttcggagccctcgacgagctcttcgagaaaacccgcgtccgaccaaaggacgtgggtgtcctagtagtaaactgcagcatcttcaaccctacaccatcgctctcagcaatgatcataaaccactacaagatgagagggaacattctgagctacaacctcggaggaatgggttgcagcgccgggatcattggtgtggacctggccaaggacattcttcaggcgaacccaaataactacgcggtggtggtgagcacggagatggtggggtacaactggtaccaggggaaggataggtctatgcttatcccgaatagcttcttccgcatggggtgttccgcggttctgctttccaaccgtcgaagggactatagccgcgcaaagtaccgccttgaacacattgttcgcacgcataagggtgccgatgaccgcagcttcaggtgtgtgtaccaagaggaagatgagcaaaaactaaagggactaaagatcagcaaagacttaattgaaattggtggtgatgctctaaaaaccaacatcaccacactaggacccttggtgctacccttttctgagcagcttctcttctttagcacccttgtgtggaggcacttatttggcagcaaaaatgatgggaattcaccctcaatgaagaagccatacattcctgactacaaactggcttttgagcacttttgtgttcatgctgcaagcaagaccattcttgatgagcttcaaaggaacttagaactgagtgacaagaacatcgaagcatctaggatgacactgcaccgctttggcaacacctctagcagcagcatttggtatgagttggcttacatggaagcaaaagagagtgtgagaagaggagaccgcgtttggcaactcgcatttggctcaggcttcaagtgcaacagcgtggtttggcgcgccatgcgccgagttaccaagccttctaggaacccttggcttgattgcatcaacagatatcctgcacctctcaacaactgaagcaaaattctaaggcactagtattatgaatctatcagtgaggtcatgtgaaagctatggttaggatcaataagggtagttctaagttggtctttaaaatgttacagctgctttctgtttctttctcattttattattcctggcttgaaattctatacttttaattcctcattaggcatatggttgcctccttgtttaatttctctgtctcttcataggatgattgatatcaaagttgatggatggctattacctatagtcaatgctacactacatgtctcatattttatttagtttagttgctctgcctcaactgcttaggtgggcttatattatactatgaactatgaattatagatgaaccaacttgctagct

SEQ ID NO: 7225 - DNA, 922 bp, Glycine max
  misc_feature (14)..(14): n is a, c, g, or t
  misc_feature (30)..(30): n is a, c, g, or t
tcgagtcagctacntaggcccctccccccntaataaatatctgctacacaaacaggtgtgtttaccaagaggaagatgagcaaaaactcaagggactaaagatcagcaaagacttgattgagattggtggtgatgctctaaaaaccaacatcaccacactaggacccttggtgctacccttttctgagcagcttctcttctttgccacccttgtgtggaggcacttatttggcagcaaaaatggtgggaattcaccctcaatgaagaagccttacattcctgactacaaactagcttttgagcacttttgtgtgcatgctgcaagcaagaccattcttgatgagcttcaaaggaacttggaactgagtgacaagaacatcgaagcgtctagaatgacgctgcatcgctttggcaacacctctagcagcagcatttggtatgagttggcttacatggaagcaaaagagagtgttagaagaggagaccgtgtttggcaactcgcatttggctctggcttcaagtgcaacagtgtggtttggcgcgccatgcgccgagtcaccaagccttctaggaacccttggcttgattgcatcaacagatatcctgcacctctcaacaactgaagcagaatttgacggcactagtgttatgaatcttattatcagtgagggtatggttaggatcaataagggtagtactaatttggtcttcaaaaatgttacatctgttttctgtttctttctcatttaattattcctggcttgaaattctatacttttaattcctcattaggcatatggatgcctccttgtttaatttctctgtttcttcataggatgattgatatcaaagttcatggatggctattacctatagtcaatgctacttgtctcatgttttattcaaaaaaaaaaaaaaaaaa

SEQ ID NO: 7226 - DNA, 1262 bp, Glycine max
tctacggctgcgagaagacgaccgcagggggagtatcaacaagaatactcataataatatagtggctagcatagagctagtaataatattaatattgttaagctagctctaagccatggctaatgaacgtgatctgttctcggcggagattgtgaaccgtggaattgaatcgtcaggaccaaacgctgggtcgttgacgttttcggtgagggtgagaaggcgcttaccggattttcttcaatcggtgaaccttaagtacgtgaaattgggttaccattatctgataaaccatggcatatacttgttcaccataccggttcttctcgtggtgtttagtgctgaggttggaagcctcagcaaagaggacctatggaagaagctttgggaagacgcgcgttacgaccttgctacggttcttgcttcctttggggtcttcgttttcaccttgtctgtctacttcatgtcgaggccacgtcccatttacctcattgattttgcatgttataaacccgatgatgaactcaaggtgtcaagggagcagttgatggaggtagcaagaaaatcaggcaagttcgacgaagcgagtctggagttccagaagaggatgctgatgtcctccggaatcggcgacgagacctacatcccgaaggccgtcgtggcctccacggagaacacggcgacaatgaaagaggggcgcggcgaggcctccatggtgatgttcggagccctggacgagctgttcgagaaaagccgcgtccgaccaaaggacgtgggcgtcctagtagtgaactgcagcatcttcaacccgacaccatcactctcagcgatgatcataaaccactacaagatgagagggaacattctgagctacaacctcggcggaatggggtgcagcgcggggatcattggtgtggacttggccaaggatattctccaggcgaaccctaataactacgcggtggtggtgagcacggagatggtggggtacaactggtaccaggggaaggacaggtctatgcttatcccgaatagcttcttccgcatggggtgttctgctgttctgctttccaaccgtcgaagggactatagccgcgcaaagtaccgtcttgaacacattggtcgcacgcataagggtgccgatgaccgcagcttcaggtgtgtttaccaagaggaagatgagcaaaaactcaagggactaaagatcagcaaagacttgattgagattggtggtgatgctctaaaaaccaacatcaccacactag

SEQ ID NO: 7227 - DNA, 2735 bp, Glycine max
aacagcctctctctctctctctctctcccaccttatattgccttgccacatttctgacttctgagtcttttgtgggaattgagttcattcaaatgattcctctgtcccataactcagtctctgttcacctgggtggagtaccctgtgaccctcttcacccaattgcgttcgatcccactctgaacaagccttgttcttccacctctctgttttggaactgcaagaggagaaggaagaggaaaaactccattatcatggcctctaatctcaggaccaacaatttcctgcgccatgtggaatcaatgaagcttcttccatcaggtgctggccacatttcgcacctgaacgctgtgatacttggtgaatctctcgccactgaagaggatgatttcgttcttccaagtgaggactttgctggccaagccaatgttcagtccccagaacagtatcccgccctcgcgtccggatcgattgaggaccctgctggattctggtctgagattgcctcagagttctattggaaacagagatggggtgacaaagtgtgtgatgaaaattttgatgtaaggaaagggaatataaagattgagtggttcaagggtggcatcaccaacatctgttataattgcttggatagaaatgttgaagctggacttggtgacaaggtcgccgtttactgggaaggcaatgagcctggtttggatggtactttgacatacactcagcttctccagcaagtttgccagcttgcaaactaccttaaagatattggtgtgaagaagggagatgccgtaattatttatttgcccatgcttatggagcttcccatcgcaatgcttgcttgcgcccggattggtgctgttcattcggttgtatttgctggtttttctgcagaagctctttcccagagaatcattgattgtaaaccaaaagttgttattacttgcaatgctgttaaaaggggccctaagcctatctatctaaaagatattgttgatgctgcaatcaatgattcagcccaaaatggggtctctatagataaatgcctagtttatgaaaacccattggcaatgaagagggtagataccaaatggaaggaagggcgtgatatatggtggcaggatgtcattcctcaatatccaactacttgtccgttggagtgggttgatgcagaggatccactttttctactctatacaagtgggagcacaggaaaacctaagggtgtcctccatacaactggtggttacatggtgtacactgcaacaacattcaagtatgcatttgactacaagccgcatgacatctactggtgtactgctgattgtggttggattactgggcacagctatgtcacttatggacccatgctcaatggtgcatctgtcatcgtgtatgaaggggctcctaattatcctgatgctgggagatgttgggacattgttgacaaatataaggtgacaatattctacactgctccgacattggtgcggtctctcatgcgtgatggtgatgcgtttgttactcgctactcaaggaaatctttacgagtcctaggaagtgtaggtgagcccataaatccaagtgcatggaggtggttttacaatgtagttggagattcaaggtgccctatctctgacacttggtggcaaacagaaacaggtggcttcatgataactccactaccaggtgcttggccccagaaacctggttctgcaactttccctttctttggagttcagcctgtcatactggatgagaaaggtgttgaaatagaaggggagtgcaatggatatttgtgtgtgaagaaatcatggcctggggcattcagaactctgtatggtgatcatgaaagatatgaaacaacatatttcaagccattttccggatactatttcagtggtgatggttgcagcagggataaagatggataccattggctcactggaagagttgatgatgttatcaatgttagtgggcatcgaattggcacggcagaagtggaatcagctttagtttcacatccgcaatgtgcagaggctgctgtggttggtgtggagcatgaggtcaaaggacagggcatctatgcatttgttacagttgtggatggtgttccttacagtgaagaactgcggaaggaccttgtactcatagttcgaaagcagataggagcctttgcagcacctgataaaattcattgggcacctggccttccaaaaacaaggagtggaaagataatgcgaagaattctgagaaaaattgcgtctcggcagctggatgaacttggagatacaagtacccttgcagatccaaatgtggtcaatcaacttatagaacttgcagattcttgaagccccaaactttgtattattataggtatgagaaatgctagtaacacactccagtgtacttttttttaacgcactcttcattattagttaaagtttattggaaattacaataatttatggacatcactacttatttaatgatccttattcgtgattttgtagtttctaataaattttaaactttagtagagtgaattagaaagaatatattagagaaagtgttgttagtattccttgtaaaggtataatagccaatgagaagtgaggacaaattttgccttgtgtatctgtatttttatgggaatcttagtgcatgtgataaataataaataaatcatccatatctcttattataaaaaaaaaaaaaaagaaaaccaaaaaaga

SEQ ID NO: 7228 - DNA, 1344 bp, Glycine max
tcagctacgtaggccccccccctctccttccacaaatggagaattccccatctcatccttcttctcttcaatgtcctccttcaaccctttctcccctccaccacccaccccttacctcaccaacctcggcttcggctactccatcgccatcgccctcggcgtcctcttcctcctctccaccctcatcctctcctcctacctctgctgccgcaccctccgccaccgcaacaacaaccgccacaccccccgtaacaacacctccgatggcatcgtcctcccgcgcgtgatcttcgtcgccgaggacgacgacgatgacgccacccgccagaacgacgccgtcaccggcctcgaccaggccgtaataaactcctaccccaagtttccttacgttaaggaaggtgattacgacagcacctgctcgatctgtctgtgcgagtacaaggattcggagatgctgaggatgatgccagagtgtcgacactactttcacttgtgttgtctcgacccgtggctcaagcttaacgggtcatgccccgtttgccggaactctcccatgccaacgccgctgtcgacgccgctgcaggaggtcgtgccgctctcacagtacgccgatgccagggcgaggaggtgaattcgaattttcttctccggtgtggctcgggttgctgggttcagtgggaaaagcataaaggacaaaacttagatcagttatttacatgtttttgcatgctgttattatcccatcaaaattggagttttacctttaatagttactggttagttttactcagattatccaagtaaaacttcagtttttgacgagagaacagcggtaaaaacacttgaataattgtatttaagttctttgtaagtgtaaatcttctcccgtgatggttgatgatggggagtttctgttttttgattatgtggttgtatggtgtcagcaagcgtgttgctggttactgaattattattggtaatgcactgaaagtctgaaactatgcagaatgtcacttttaggggaaattgtccgcgacttcgttttgttagtaccatgatttgacattggatataatggatagtagtactattatttttatttttgttctagttttgttggtttgacccactgtggagtctcttggtgagacttgagagcattagactctgttgtttttcgggggatttttttatattttatttttaactttctctaagaaattggttgtggtacctttttgtttcccgtttttcaattcatggacccattgggttgtcgtcattagtagacagcttgcatttggtgctcaaaaaaaaaaaaaaaaaaaaaaaaaaaaaaaaaaa

SEQ ID NO: 7229 - DNA, 1819 bp, Glycine max
  misc_feature (1810)..(1813): n is a, c, g, or t
gtggtattcagcccgggaatccaatttaggggaccgtcactcgtcacgcactgaactgcaaagaaatttccgtagaaatttccgtgaagaaagagtaaatacctaaagtagtaaacgttcacaattacatgaataatcaattgatcgattccccttgatcgctctgttttactgtccgtttcaaatccgacagcagcccagcccggcccggcccaatcatgactcccaaactccaaaccgcggcctccgtggtggccaccgcgatgctcctccgttccctcgcccgcgactacgtcccggcggagctccaccactacctccgctgcaaactgtcgaaactcctctcctcattctcctccgaactgactctggtcatcgatgagtttcacgggctgacgccaaatcccctcttcagcgccgcgcagctctacctcaaaccccacgccgcccccgatacaaaacgcttccgcgccaccctgcccccgaaatcgcgccacgtttccctcctcgtggagcgcaacggagaaaccacggacaccttcaactccgtccagttccggtggaaactggtctccgaacgcgtccccgcgaggttcatccatcaggactccttccactccttttcgaaatccgaggttcggttcttcgagctgagattccacaagaagcatagggacatggtcctctcggagtacctcccgcgcgtgatggaggaagccgaggtggcgcgtgagcggaggaagacgctgaagctcttcacgccggcggacatgaggatggtgggaaggagagggtgcgagatgtggcagggcgtgaatctggaccatcccgccaagttcgagacgctggcgatggatttggagatgaaggagatgataataaaggatttggatacgtttcttgagaggaagtttttgtataagaatgttggaaaggcttggaagagaggatacttgctatctggtcctccaggcactgggaaatcgagcttgatcgctgccatggccaattatctgaattttgatgtctatgacttggaacttactgatgttaggagaaacactgacctcaggaagctgttgattggcaccgggaatcgctctattcttgttgttgaggatattgattgttcccttacattgcaggataggcttgcaaaacccaaatcatcgcaaccagttgctatcacaccatggcctttccacccacatgacaatccaaaaccccaggtgacgttatcggggttcctgaatttcatagatgggttgtggtctagttgtggggatgagaggatcatagtgttcacgaccaatcacaagaacaaattggaccctgctctgttgcgccctggccgtatggatgtgcatatcgacatgacttactgcaccccatgtgggttcaaaatgctggcttttaattaccttgggatcacagagcacccactttttgttgaagttgagacattgctgaagacgaccaatgtgactcctgcggaggtgggggagcagtttttgaagaatgaagacccggaaattgcattagaaagcttgatggagctccttatagagaagggacgaaaccatgaaaagaacaaagcagctctcaccattgaatgctttgagtccgcagagagttttgaaaatgaaggatgattacgaaacccaaaacttgtataaaaaaacagaatgaaaaaggattaaaagcaataactatatgagtgtgaccatgaacacagtattctaaggattgaatcttctgtctgaaatctctctgtgtgcgcctatccctaattttcaaccatatgaatcgnnnnatattt

SEQ ID NO: 7230 - DNA, 2398 bp, Glycine max
tcagctacgtaggcccccccccccccgaagttgtttaataaataataatctctctctggatttgtccttttcttcttttgagcgagaatggcgaaagagcttcttctgcaacttcgcctgctgcttcttcttcccgaacaacggtgtcgttttgcatctcctctgccaatactcaacttctcattctccgctttgtgactcctctcccttctacattctcgatccctcggatccgtgttcaacttcaactcgcttctcgcaaccaccgactcactcaactcaggggcgggaattctcttactaaattgatgacatggagcagtatgaaatacttgagcaaattggaaaaggtgcttttggttcagcgcttctagtgagacataagcatgaaaagaaaaaatatgtgttgaagaagattcgccttgctcgtcaaactgagcgctctcgtagatctgcacacctggagatggagcttatctctaaattaagaaacccattcattgtggagtacaaagattcatgggtagaaaagggttgttatgtctgcatcattataggttattgtgagggaggagatatggcggaagctataaagaaagctaatggtgtcctgtttcctgaggagaaactttgtaagtggctcgttcaacttcttatggctcttgactacttgcacatgaaccacattcttcaccgtgatgtcaagtgttcaaatatcttcctaacaaaagatcatgacatacgcctcggtgattttggacttgccaaaatgttgacttcggatgatcttgcttcctctgttgtgggaactcctagctacatgtgccctgagctccttgctgatataccttatggttctaaatcagatatttggtccttgggatgttgtatgtatgaaatgacagcgcataagcctgcattcaaagcatttgatatacaggcattgattaacaagattaataagtccatagtggctccactgccaacaaaatattctagttcgtttcgaggtcttgttaaaagtatgctgcggaaaaatccagagctgaggcccagagcttcagagctgcttgggcacccacatcttcaaccttatgttcttaaggtccatctcaaaattaacagccccagacgaagcacattgccagttcactggccagaatccaactacatgaagaaaactagatttttggtgccagaagatgatcctgtttccatctatagggataagcgacattctttcaccaatgatcggactctaaatcctagtgtatctggagctgatcaagattctgtatgttctactctggagatagattgtactcctgaccatttgaatcaaaggttagcagaactacgtattggagatagccatcaagtgaagtcaatccagaagcctgttgtttccagaacttctagcattgttaagactccaaaattcgcttcctcaaaggtctcagccaccaacaagaaatcaatgaaatcctcaaagaattgtaagacgcttcctctttcacaaaataccacaaaatctgctaatactaatcgcagagcatcattcccactgccaacaaggggtggtaatcggcagcctccttgcaggtccgtcagtttgcttagtcacgtgtcttcaccagatatctcagtcaattctccacggattgataagatggctgaattcccattaacttcatatgaagattctttgttccctatcaataaaacatcatcctctgcacgaggttcctcaggcttcccatctcatagcaaccattcaactgtgatagacaaatgcacggtagaggtatatggtagagcctctaacaagcctggtagtatggatgcgtggcagggaatcaagcagagcgtgttaaaggagattgatgaggataaaagtggttcctcagatcaaaatgcaactgcaggtgcttcaagccacacctcttctgacttgcgccgtcgacaatttgacccgtcatcattccaacaaagagctgaagctttagaaggcttgcttgaatttagtgcaagattgctacagcaggcaaggtatgatgaacttggggttctgttgaaaccatttgggcctggaaaggtttcccctagggaaactgctatttggttgagtaagagcttcaaagagaacactttcaacccagaagaatccatgtaaactgctattatgtttaccgtagtcatttttagagttcagtgttttttctcacacgagagaaattagcaagctgatttttttagcttatcaaattttttcatttacccttttctgtttcacatcacttaataatgataactcaaattttcaaactaaaaaaaaaaaaaaaaaatagacattttcatgatcctaagggggggggggggggggggggggggggggggg

SEQ ID NO: 7231 - DNA, 510 bp, Glycine max
aaacacctgccctactcgcgaaaaccctaccgccgccgctctccattctccaaggtcccaaggctccagatctccctccttcgcagctgcctcggtggcctttggagcgcacgagatggcggaagaagccccgacaccagttgttgccccagtagaggcacctaccccggttcttggtgagccgatggacttgatgactgctctacagcttgtcatgaagaagtcaagtgctcatgatggccttgtgaaggggctccgtgaggctgccaagtccattgagaagcatgctgctcagctttgtgtgctggctgaggattgtgaccagcctgattacgtgaagctcgttaaggcactatgcgctgagcacaatgttcacctggttactgtgccaagtgctaaaactcttggagagtgggcagggctttgcaagattgactctgagggcaaggcaaggaaggttgtgggctgctcttgcgttgttgtcaaggactatggtgaagattccgaggg

SEQ ID NO: 7232 - DNA, 687 bp, Glycine max
tcagctacgtaggcccagaatttttttcccaaggctgaaaaactctgaccgagtccgagaggcatcatggcgacactggattccgacgtgaccgtgtttccggccggcgaagcctccagcagcgccggtccttcttcgtccaccaagaagccgaagcgtttcgagatcaagaagtggaatgcggtttccctctgggcttgggatattgtcgtggataattgcgctatttgtcggaaccatatcatggatctctgtattgagtgccaggccaaccaggctagcgccactagcgaggaatgcactgtagcttggggagtttgtaaccatgcttttcacttccattgcataagccgatggctcaagacccgtcaagtatgtcctctagataatagcgagtgggaatttcagaaatacggtcactagaactttgatgcggctgagctacttccaacttggacatttggattgtagcatttctatcaaatttatagctctacattactgctgataaaaaaaaaaatagctctacattacttgttgtcttttgcttgcctattggaattttattcagaagagtcgcttctaaatgctttcgatccaacatcattatttctaactgtggcaaatacggtggtgttaattcactcaatgacaaaagatttatggaataaaaaaaaaaaaaaaaaa

SEQ ID NO: 7233 - DNA, 1696 bp, Glycine max
ttacggctgcgagaagacgacagaagggggctcctcctcctccttcttcttctgccttacatcacatacttcactctcttgtttttccctttcctctcctcaaaatttcttctgattcatttaatctttactcatcaatggctctgagactgaaccctatccccacccaaaccttctccctcccccaaatggccagtctcagatctcccaggttccgcatggcctccaccctccgctccggttccaaagaggttgaaaatattaagaagccattcactcctcccagagaagtgcatgttcaagtaacccactctatgcctcctcagaagattgagattttcaaatctttggaggattgggctgagcagaacatcttgactcatcttaaacctgttgaaaaatgttggcaaccacaagattttttaccggatccttcctctgatggatttgaagagcaagtgaaggaactgagagagagggcaaaggagcttccagatgattactttgttgttctggtcggagacatgatcacagaggaagccctgcctacttaccaaacaatgttaaatactttggatggagttcgtgatgaaacaggtgccagccttacttcctgggcaatttggacaagggcatggactgctgaagaaaacagacacggtgatcttcttaacaaatatctttacttgagtggtcgagttgacatgaaacaaattgaaaagacaattcagtaccttattgggtctggaatggatcctcgaaccgagaacagcccctaccttggtttcatttacacttcatttcaagagagggcaaccttcatatcccacggaaacacagccaggcttgctaaggagcacggcgatataaagttggcccagatctgcggcatgattgcctcagatgagaaacgccatgagactgcatacacgaagatagtggaaaagctatttgaggtcgatcctgacggtacagttatggcgtttgccgacatgatgaggaagaagattgccatgccagcacacctcatgtatgacggccgtgatgacaacctgtttgatagctactcttcggtcgcgcagcgcattggggtctacaccgccaaggactatgctgacatacttgagtttctggtggggaggtggaaggtggagcagctaactggactttcaggcgagggaagaaaggctcaagaatacatttgcgggctgccgccaagaatcagaaggttggaggagagagctcaagcaagagtcaaggagtcgtcaacacttaaattcagttggattcatgacagggaagtactactctaaatgcaccaagggaggagcatggtgaaatcttccggcaataccgttctgagaaatgttgaatagttgaaaattcagtttgtcatttttatcttttatttttcctccttttttggtctttgttatatgtcactgtaaggtgaagcagttgttcttgcatggttcgcaagttaagcagttaggggcagctgtagtattagaaatggtattttttttttttggtttcgcttttctctgtggtagtgatgtctgtcgaagtataagtaaacgtttttttttctctggcaattttgatgataaagaaaatttagttcttctgtggttggttccaaagcggccgcgaattcctgaaatatatgctttactaggtaattttgttgtgtatc

SEQ ID NO: 7234 - DNA, 1060 bp, Glycine max
ccggccgaattcggtcacccagcgttctacggctgcgagaagacgacagaaggggcggctaacagagaaaactttcaatttctggttttctgaatttcggatggttgactctaattttaggagctggaaaaggtactaaatctaaagttggacgaaatgtggatccaaggattcagtttttggatcaaaggtttctctttgctggccttaatatctgtaatttccgctctggaacccgaactgggatcgacccgcgtcgtctttcagacaaagtatggagatattgaatttggtttctatccaactgttgcacctaaaactgtggaccacatttataagcttgtgcgacttggaggctataacactaaccatttctttcgggtggataagggattcgtggcccaagtagcagatgttacaaatggaagatcagctccaatgaacgaggaacaaagaagggaagctgtaaagactgttgttggtgaatttactgaagtcaaacatgttcggggtattctttccatgggaagatatgatgatccagacagtgcttcatcttcattttcaatactacttggagatgcccctcatcttgatggcaagtatgcaatatttggaaaagttactaaaggtgatgaaacgttgacaaagctcgagcaactacctacccgcaaagagggtatatttgtaatgccgatggaacgcatcactatcctgtcgtcatattactatgatacagagacagaaaattgcgaggaagacagatcaattttgaagcgcagactagccgcctcagctattgaagttgaaagacagaggatgaaatgcttcccctgataaaagcaaatttgatattaatttggaatgaacattacactgttgcattctcattttatataatgaacaagcagtgtatacagatattgcttttgtcatgtatgagaaattgttctaaatatgcacaaacatgaatttaaagagcttgtttgcaaatttcccgatatctgtttttgatttctatggatagaaaaaaaaggagcttatttgtatatttgcccgg

SEQ ID NO: 7235 - DNA, 536 bp, Glycine max
cccaccaagccgccgccgcaaccctagagcctcgcctccctcctctcctctcccgggcgcctccaccccccgcctagcggcgcgaagcgaccatgacgttcaagcggaggaacggcgggcgcaacaagcatggccgcggccacgtcaagtacatccgctgctccaactgcgccaagtgctgccccaaggacaaggctatcaagcgtttcttggtgaggaacatcgtggagcaggctgctgtgagagatgtgcaggaggcttgtgtccatgatggatatgtccttcccaagctgtacgccaaggtgcaccactgtgtttcttgtgccatccatgctcacattgtccgtgtccgctcccgtgagaacaggaggaaccgtgagcccccgcagcgtttcaggcgcagggacgacggcccgaggcctggacagggtggcccgccccgtgctggtggccctggtggcccgcctgctggcgctggtgggtggtgctcctgccggcgctggtgctgtccctggagctcctgctccccgtgtgcg

SEQ ID NO: 7236 - DNA, 2323 bp, Glycine max
tcagctacgtaggccccccccccatttttgtctcgtgtgtgaaaaacaacatgtcttatgctgatgcgtcgggtttgcttgcctctggtgctagtggttttgttactagtttggcgaattttggtttgtttggcgatgagttcttgcacaaactatttggcactgtgtatgcaagtgatgatggtgggaggatgagtgagaataaactgaatgtagataatggttttcagagtgagacagaggttgtggctgggtttgttaagctggaggatagggaaaaactattaattgaaacagagagattggtgttgaatgaagctattgaagttatcaagagggctgcacctctgatggaggaggtttcacttcttaatgatgcggtttctcaaattgatgagccattcttactggttatagtgggggaattcaactctggtaaatctactgtgattaatgcgcttcttggagaaagatatctcaaagagggagttgttccaacaactaatgagatcacattttttacgatatactgacttagatattgaacaacaacggtgtgaaaggcatccagatggccaatatatttgctacattcctgctccaattcttaaggagatgaccattgttgatacacctggaactaatgtgattcttcagaggcagcagcgtcttacagaggaatttgtaccccgtgcagatttacttctttttgtcatttctgctgatcgccctttaactggaagtgagattgcttttcttcgttattctcagcagtggaaaaagaaagcggtctttgtcttgaataaagctgacatatatcagaataatcatgagcttgaggaagcaatgtccttcattaaggacaatatacagagattgctgaatactgaagatgtcatgttatatcctgtatctgctcggtctgctcttgaagcaaaacttatggctaccaccaatgttgggaggctaaatgaagaattatcaacctctgattctcattatggtgccatcagtttctttgaacttgaaaacttcttgtatagctttctagatgggtcaacaatcccaggaatggacagaatgaggctcaaacttgaaacacctgttgcaattgcagatagactaatttctgcatgtgaaactcttgtgacacaagactaccgatatgccaagcaggatttggctgcagtggaagacattgttaataatgtaaatgattttgctttgaatatggtaactgagagcctttcttggaggagaccaactctgtctttgattgaaactacgaaatcacgtgttgtagagcttgttgaagctaatctgcaattgtcaaattttgatattattgcttcatatgccttcaaaggagaaaaaaatgcactgcctactacctcaaggattcagaatgacataattggtcctgctgtctctgccgtccagaaaatacttgaagaatacgaaaattggttatattccaaatatacccaacaagggagactatacaaggaatcctttgaaaaacgatggccttccttgagccatgaaagtagtcaaataaattttgggaccgaccagttgctaaagaaagtggatcaagctggcagccaggtgattgacaatttcagcagcattgcagtttctaagtcatttgagcaagaagtacgggaaatgattttagggacttttggtcaactaggtgtggctggtttatctgcttcgctactgacatctgtgctgcaaaccaccttggaagatcttcttgctcttggcatttgttctgctggcgggtatctagctatatcaacttttccagctcgtaggcagaaggtgatagataaggtgaaaagaaaagcagataccttggcatatgaacttgaagaggccatgaagaaggatttgactgaagccatagaaaatttggatacctttgtgaaagtccttagcaaaccttaccaagatgaagcgcagaatagacttaacaggctagtagagattcaagaagaattgtcaaatgttgagaaaaaacttagaacgctacaaattgacattcaaaatcttaacgtgtcatgactttggactatccaattacgttattgaaacaaaggaaatccgtcctttctacgagaaaacaggaccaatcaataaccaatgatatatcgagcgagatggcctgcgggcgcgacgttattccctcaattgaggcgttatttagcctggcgcttgaccgagcgttgtcacgcgagtgaactggaaaactttgctgttgcgatctaatgcagcttacgacacgacgcgccggttgccctccgtgcggacatattaa

SEQ ID NO: 7237 - DNA, 512 bp, Glycine max
ccctaccagccgtatacccacaccacaccgcttccgcacttcctcccggcgcctcgctttccatttcacaaccgcggatcccctccgagtactgtagacatggccggaaggggcaaggcgatcggctcgggcgccgccaagaaggccatctccaggagctccaaggccgggctccagttccccgtcggcaggatcgcgcggttcctcaaggccggcaagtacgccgagagggtcggcgccggcgcccccgtctacctcgccgccgtgctggagtatctcgccgctgaggttctggagttggccgggaacgcggcgagggacaacaagaagacccgcatcgtgccgcgccacatccagctcgccgtccgcaacgacgaggagctctcccgcctgctcggcatggtcacaatcgccagcggcggtgtcatgcccaacatccacaaccttctgctcccaagaaggccggaggcagcaaggccgtggctgctgacgacgatagctagatgacgact

SEQ ID NO: 7238 - DNA, 856 bp, Glycine max
gagtttacgtcgcatgcgccgacgtaagctcggaaaaccacatcacgggtaaaagtgttgtcccaaagaaagagcatctttctcctttctttcatcaccgttggaagagactgagatgggttcaaaaaccaagacttttacctttgaggaggtggctaagcacaatcacaggaaggattgctggattatagtcaaagggaaggtgtatgatgtcaccccatttttggatgatcatccaggaggtgatgaagttttagtgactgcaacagagaaggatgccaccactgattttgaagatattgggcacagtgattcagcaacagagatgatggaaaaatactttgttggtgaggttgacaccaacactcttccagcacaagttaccagcagcagcagtgtacgcccaccaacacaagcacctgtctataacaatcaatcttctggatttgttgtgaagatcttgcagtacatagtgccattgctgatattggcctttgcatttggcctgcagtactatggcaaaaaaagcaagtcagaaaattgaacttgagttgtgaccattgttttagtacttctattattcataagtctctaacaacagtgtcctagtggcaatagactggtgccattgttgtttcttttctttttggggcatcatttaaaagcacttcactatctcaaatatcacgcggggattaattttgtatttttcatgtgttgtggcctcttgctcaagttatgctagttgttcatttaaacccaatctagtatctcgtgaataatattttgaaatagattctattaaacctagtaactggagcacattatatgctattatctggtgtgttccttggtt

SEQ ID NO: 7239 - DNA, 2081 bp, Glycine max
  misc_feature (1989)..(2014): n is a, c, g, or t
  misc_feature (2023)..(2028): n is a, c, g, or t
  misc_feature (2035)..(2060): n is a, c, g, or t
ttacgcttccggtacgatactgtcatagagctaaaaagcaaaatatatgaattttttttttctccttttctggagaatatatattcggccacccggccccccgcctcagaatcagataagtgttggtttgtttttttgttgagaagagagaatggctgtggcgtcgtcatcatcccttatcacgttgaaggtgaaaccttgcattttcgggtctcctcggagatccgcggtggttcggaattgtgcgaagtcaacggcggggacaatatcgacgagttggagcctggacagctggagggcgaagaaggcgcttcagcttccggagtacccagatgcgaatgaattggacctagtcctccaaaccctctcttcttttcccccaatcgtcttcgccggcgaggcgaggaatctggaggagaagctcgctcaggctgccatggggaacgcttttctccttcagggcggtgattgcgccgagagcttcaaggaattcactgccaacaacatccgtgacaccttccgtgtcatccttcaaatgggtgtggtcctcatgttcggtggccaaatgcccgttatcaaggtggggagaatggcaggtcaatttgcaaagccgagatccgattcatttgaggagaagaatggagtgacgctcccgagttacaggggtgataatgtgaatggcgatgcatttgacgcggcatctagaatccccgatccacagaggatgataagagcctactgccaatctgtgtctactctgaaccttttgcgggcatttgccacgggaggttatgctgccatgcaaagggttaatcaatggaatcttgatttcatggagcatagtgaacagggagacaggtaccgtgaattagcccatagagtggatgaggctcttggcttcatgaatgttgctgggctcacagccgaccatcccatcatgagtacaacagacttttggacctcccatgagtgtttgcttctcccttatgagcaagcacttactagggaggattctactactgggcttcattatgattgctcagctcacatgctatgggttggggaacgtacccgccaacttgatggtgctcatgttgaattcttgagaggagttgctaatccacttggcatcaaggtgagtgataagatggttcccgatgaacttgttaagctgatagatattctgaaccctaaaaacaagcctggaagaattacagtcattgttagaatgggagctgagaatatgcgagtgaagcttccacatcttatcagggcagttcgcagagcaggtcaaattgtcacttgggttagtgaccccatgcatgggaacaccattaaagctccatctggacttaaaacccgctcttttgatgcaataagggctgagctgagggcattctttgatgtgcatgatcaagaaggaagctacccaggaggggttcatttagagatgacagggcagaacgtgacagaatgtgttggaggctcaaggactattacttatgatgacttgagctcacgctaccacacacattgtgatccaaggcttaatgcttctcaatctctcgagcttgcatttaatattgcggacaggttgcgcaagagaaggctcaattcaactcgatcacttggaatttagacaagagggggtctgtcttcctttgtacctggatcacaatactggtcaaacatgtgttgagttttcttgagcacagtgaacaaatactctactgggagccactctaccgagtttcataagaacttaaaatagtcggcacaattaatagttgtgctgtatgagtgttacaagacagttcaaaacactgcaggtgtatgtacttgcaagtttgcacttttaagtttggagatagtacgtgtgtagtatttatgctcgactcgagtaaatgagtaataaataaagtttcaaggtacaacttacatcataaaaaaaccgagtgaaatttattatatacgagatggttttacgtnnnnnnnnnnnnnnnnnnnnnnnnnnatgatgtgnnnnnngattggnnnnnnnnnnnnnnnnnnnnnnnnnntcccaataataactttaaaag

SEQ ID NO: 7240 - DNA, 980 bp, Glycine max
gtacggctgcgagaagacgacagaaggggattcacacaaacggaacaagatagatatatagaagagccttccatatatagcctcccaaaaaaatgaagagtactacctctttggctctctttctactttgtgccctaacttcatcatatcagccttcagccaccgctgatattgtattcgacaccgaaggcaatcctattcgaaacggcggcacatactatgtgttgccagttataagaggaaagggcggcggaatagaatttgccaaaaccgaaacagaaacatgccctctcactgttgtgcaatctccctttgaggtctcaaagggtctaccactgataatttcatccccatttaaaatccttgacatcaccgaaggacttattttgagcctcagtttcacttatgtacccccctgtgcctcaactccttctcggtggaccgttattctcaagggtctgccagaagaactccatgtcaaactcactggctacaaaaacacaatagatggttggtttaggattcaaagagcttcctctgaatccaactactataagttggtgttttgtacatctaatgatgatagttcgtgtggggatattgtggctcccatcgatcgtgaaggaaacaggcctttgattgtgactcatgatcagaatcatccattgttggttcagtttcagaaagttgaagcttatgaatcatcaactgcatgagttggccttgaaaaatcatgcacgtgctttccggaattattccgatactttggttacttgtaagaccgaataaataatgctttggttgtaataaattattattattattatcattattattccaacgctaaataaattaaataaggatatataatgctttatttttatgcaagtagttagtgcgcctttaatttcgaattacctgttacatcaaatgtgtatatgtaatgcatattctactcgcacgatttctgtgattgtcaa

SEQ ID NO: 7241 - DNA, 1955 bp, Glycine max
gataaaagtaaggtcaagaataaatatttacacaaactatcaaataataatgtatgtggtgtttagttgactggtaagtaagggaaggtagaaattgaggagattgaattgcaatagcaatgagtgtgtcttcaaattcgaaggaatcgatggaattatgcatatttgatttgcggagaggccaacacgaaggccaagagctcgataagattctcttcttcttccccgccggtttgcccttttcaaagcaactctccgtcattggcctcagcgaaggactcatcactttcactagaatcttctcgccagaggctgcctgcgacgtcatcgaagcagaaagacattctcatgttttctacgaggccgaacccgatatctggatagtcatggttgccgacaaaagcaatgattcagaacctatatggagagttgatgcattaagaaaagttctcaaggaaattcactcactttttgtcatgtttcatggatctattagagcaatgctggagaaagaacccggcggaggactaacaagacggcatttgtatacctttatcatggattatctgagggattttcttgcggggaaaaagctccttttaccttcattccgtgattgcttaaaggaacgtggaactgttcagatgctgacaataggtcgcgaggctgcaattgaggttcagtcccttgtcagggtgcttgaatcttcttctggaaacactccctgctactctttggttttatttcaagacctgctagtgtccacaactctatctcctgatgacaccttaaatttattcacatatgctgtgctaaggttgactccccatgctctatcttctggaacaagttcctggtcctacttactgaaaggaagttctgcatccaatgttgccactgagtctaacatggcccatccaagctctttgtctgaaagtttttatggctcatctgatatgtcctctggtgaagataaccactatcatgttgtgaggcccctacagagtgacaaatggtctaaaggaaaagatggttatcttgtcactgatttatggggtgcagaagttggtacgtgggtgtttgcctctccaacagtttggcttcaacatacaggagagaaaatgtatctttgtgtttatcagcatagaagccttactttgatgcttctgattcctgtatcatccattcctaacggggagcaaggtgtgtcggcagtgaggcagcaagttgttgaaaatgcatcacttaaaatattgaaagttgaagagaaactatcgaaaggatggggtggagataatgcttatcacgttagtgggtaccgctacttacttgtagatggtgatagaaatgtatccagggcttctccagcaacaaaagttacaactttaacaaaggagtccttacttgctatgaataagcttaggcaagaggtggagttagagaagagtagagcaaaactggatagccgtaattgtgaaaaagacttagaggtgtgcattagagcaaaaaataatgcatgggttatttctcgagtcacaagagggaaggagctttacatggttctagagaaagctaatgaaacccttctatatgcttcagatgctgttgagaagtttagcgacaggtattgcaatggaacattttctctggactaaagaaaaccaagcatgtgcgaccgaggaatagcacgttaggtcttctaactgtttacccagtaaagtcgggaagttttccactgttgatttttctcaccgggaaattcaagaatggaagaaagaatgctactctgtgtatatctctctgtatattaagtgtaatttgtttatacttgttaaagggtgctttatcaaatcttgtcaccggtaactttctttttaatccgaaattgggtcagttccgagagaaattgttttccaaaaagttctcatttatttcacaatagactttgaattcct

SEQ ID NO: 7242 - DNA, 1003 bp, Glycine max
aaagctttcgtcgatgccgcggtcgtaagctcggaattcggctcgaggagttctcagtgttagttgatcgtgccactggtggagccagcatcaaagatggtgaggtggaattgatgcttcacaggcgtattctccatgatgatagtcgaggagttggggaaccacttgatgaacaagtttgcgtgaacaataataatacttgcgaaggactaacagtcagaggaaattattatatcagcatccacaagcttggagttggttcacgctggcgtcgtacaactggtcaggaaatttattctccattcttagtggcttttacacatgagatctcggaaaactggaagtcctctcatttgacgaaaggaactatcatggatccaaattacagcttgcctcccaatattgctctgataactcttgaggagttggatggtggaattgtgcttctccgtttggcacatctatacgagccaagtgaagatgctgagtattcaactcttaccaaagttgaactaaagaagttgtttgccatgaaaacgataaaggagttgaaggaggtaagtttgtcatctaaccaagagaagtcagaaatgaagaggatgacatggaaggttgaaggggacaaaggacaagaacctctggcaattaggggtggccctgtcagctatcacaatttggttgttgagcttggccccatggaaatacgaactttccttttgaaattttaaaatagctcaaataatcattgatgattttatttgaaggaataaacatgtttgatcacatgacttttacccttgtaaaaattggtagagggagaccaagaacgattttgaaggaaaacatgaaaagaaatgagtaaagatcctatccaatgactagaaataatatatttaagactttggttcttaaccaaatctaacgacatcaggtaacagtgtaaccgactccatctaagattgttgttgttatattgtcagataaacatgtttgatgtttccaa

SEQ ID NO: 7243 - DNA, 841 bp, Glycine max
tgccccgattacacaactttttagggttctgtaataattcccctacctctttctgcttgttcctagcagctttttttccccttgtcttagaaaccatagtacatagatggcgaccgaccaaatgaagcccattgccacccttcttttggggctcaacttctgcatgtatgtcatagtgttaggcattggtggatgggccatgaacagagccatagatcatggctttgttataggtccaggatttgatcttcctgctcatttttcacccatatactttcctatgggaaatgctgccactggattctttgtgacatttgctttgattgctggagttgctggtgttggatcaatcatttcaggagtcaatcatgtccgttcatggacttcagagagcttgccatctgcggcttcagttgcttccattgcgtgggctcttactgttcttgccatgggctttgcctgcaaagagattcagcttaccggcagaaatgctcgcctgaaaacaatggaagcttttatgattatcctttcagctacacagcttttctacatagctgctattcatggtgctgctgcatataggagatgaaattgatggttgagagatgtgatgctgtgattgtcctaatttttttttctcgtcttttcttacctatgatttattctttttttttttttggtccaatatagtcttcccatttacaaacaggtgtgatttattacatggttggatttgtattgattaagaataagttgtatacaaaaatattaacaataatatcttctgaagcatcttttacagtaacatttaattacaatcaaaaaaaaaaaaaaaaaaaaa

SEQ ID NO: 7244 - DNA, 1914 bp, Glycine max
  misc_feature (1910)..(1910): n is a, c, g, or t
gaaagtgtgagcgggcaggtccaaactccaggcagcctcgaacgcctcccccctcgatctatcaccctcagagtcgaaccagacacacttccacgtcaccaccaccgtggaaggtggcgcgtgaggctgtttccggcgacctataccggcggcgctgagtggtgatcaaggaaatgggtcagaggctaagctgcgtgcaacagcagcacgaggagcatggtgtgctcttcccagcacttgcaagtggagaattggaggttgttgaggccatggtggaggaagaccccactgtgttggaacacaccactggctgtgaccgcctttctcctctgcatgtagctgctgccaatggtcggatcgaggttctttccatgttgttggataggtctttcaatgttgacgtattgaatcgccataaacagaccccgttgatgttggctgtgatgcatggaaagactggttgtgttgagaagcttattcatgccggagcaagtatattgatgtttgattctatacgtcggagaacttgcttgcactatgccgcttattatggaaatatagactgccttaaggtcattctttctgctgctcattccacacctgttgcagattcttggggatttgcaagatttgtcaacataagagatggaaacggtgccacccctctgcatcttgcagctcgccatagatggccggaatgtcttcatgcccttctagacaatggtgctcttgtttgtgcttcaactggtggatatggttaccctggaagcacgccacttcatatggctgcccgtggtggttctttggactgtgtccggatgttgcttgcttggggagcagatagacttcaattagattcttctgggaaaataccattctcagttgccctgaagcacaagcataaggcatgtgctgccctgctggatccctcgtctgcagcaccgcttgtttggccatccccattaaagttcatcagcgagctcaatcaagaagcaaaggccttactggaaaaggccttgcaagaagctaacagagagagggagaagaccatactaaaggagactgacatgcctccatccccactgaattctgagagtgaagatgataacattgcctctgaggctagcgatatggagttatgttgcatatgctttgaccaagcatgcacaattgaggtaagaccctgtggccatcaaatgtgtgctcattgcaccctagcgctatgctgtcacaaaaagcttgatcctgctactaccggcctttctggaccagtttgtccattttgccgtggatccattcttcaattactggttgctaagattaacaaaatcagtgatacagaagtggaatctagccctatgaagccaaggagatcacggaaatcaaatttcagtgaagggagcagcagcttcaagagcttgtcggccatgggctcatttggaaggattgccggccgcaattcagggaaaattacagatgaaaagcaatgataaagtggtggtgattattttgattccaagccggcaggaaattatataaatggtggttttaatttctgtttgataactgcctatattggtatcttatttgtattcattttctcacaattgtccaaagatcactacggtcatgagagacagctgcttgtagtcggtttgagttttttacttctgtaatctgattctcagttggaattggagaatcagaacagttatgtattcccccccaaatatcaaacatagtatccatgagttaaaggtagttttcttcactgctttaactttggtaaacatatatggattcacacacacaggtattcgttcttaaccaaaaaaaaaaaaaaaaaaaaaaaagaaaaaaaagaaagaaaaaaaaaatagaaatagcaaaaaaaaaaaagtaaatgattntggg

SEQ ID NO: 7245 - DNA, 2884 bp, Glycine max
  misc_feature (2055)..(2059): n is a, c, g, or t
  misc_feature (2084)..(2088): n is a, c, g, or t
ccacgcgtccgccgcggcgcaccgtttttgcgtttcagaaactggagaaaaccctagaaagcaaaccctctctcgcaccgccatctgcctccataacgataacactgtgcttgctacagtcatggcggacgtcatggtaatgaaggagatcgaggacacggcgctgcgtctcggcgtcgatctctccactctcgatctcgacgccattcgcctccctcccggcgaagattgcggcatcgtcagtgatgacgaggtggtttaccaggaggagaatctcgagtttgagtctggatttggtaacatcattgtcgtggataacctccccgtggttccgagggagaagttcgagaagcttgaaggagtggttcgaaaaatttatagtcaaattggtgttatcaaggaggatggcctctggatgccggttgatcctgaaaccgagaaaaccctaggttactgcttcattgagtacaatacccctcaggaagctgagcttgctaaagagaagactcatgggtacaaattggaccgggcacacatatttgccgtgagcatgtttgatgactttgacagattcatgaaggtgcctaatgagtgggctcctcctgaaactaagccatatgctccaggggaaaatcttcaacactggctcactgatgcaaaggccagggaccagtttgtgattcgtgctggttcggatactgaggttttgtggaacgatgccaggcatttaaagcctgatcctgtttataagcgtgcattttggacagagagttttgtgcaatggtctcctttggggacatacttggccactgttcacagacagggggcagcagtctggggaggtgctgcaagctttaatagacttatgcgttatgcgcatcctcaggtaaaacttattgatttttcgcctggtgagaagtatttggtaacatatagcagtcatgaaccaagcaatccccgagatgccaatagagttgtgataaatttatttgatgtgaggactggtaaagtgatgagggacttcaaagggagtgctgatgattttgcagtcggaggtgctgggggtgtcactggagtttcatggcctgttttcaaatggagtggtggaagagatgatcaatactgtgcaaggatggggaaaaatatactctccgtttatgaggcagagaccttttctttcgttggcaagaaatctttgaaggttgaaaatataccgcgcgtccgctggtctccaactgatccaattattgctctttttgttcctgagatgggaggcggtaaccagcctgccagggttagtctgattcaaatccccagcaaagtggaactcaggcagaaaaaccttttcagtgtcagtgactgcaagatgtactggcaaagcaatggagactaccttgctgttaatgtagagaggtacacgaaaacaaaaaaaagcacatacacaggctttgagcttttccgtataaaggaacgggatataccaattgaagttttggagcttgagaataagaatgataagatcattgcatttgcttgggagccaaagggccacaggtttgcagttattcatggtgataaccctaagcctgatgttagcatttattccatgcgtactggtcagaacagccgagtttcaaaactcattactctgaagggcaagcaagcaaatgctctgttttggtcacctgccggtcgctacattgtactggctgggttgaaaggcttcaatggacagttggaattttacaacgttgatgaacttgaaaccatggctactgctgaacattttatggcaacagatattgaatgggatccaactggaagatatgttgcaactgcggtgacttcagttcatgaaatggagaatggtttcaatatatggtctttcaatggcaagcatctatatcggattctgaaggatcacttctttcagttcttatggagaccatttgctctccatgctttcttggctcccgattatacatgtattaccatggcacaatgaatgatgtgtatgttcatatggtgataggtttggacattgtaatgctccannnnngaatctatactttggtagcataaannnnncttatagcagaattttactaatcattgaaatcgttactgtagtccttattggtaatctgcatgtttggcactgaatgcctttattgtgtaataaatcctgtgcaatatatggtctttcaatggcaagcatctatatcggattctgcacgagcatttctttcagttcttatggagaccaaggccaccatctttcttgactcccgagaaagaggaagagattgccaagaacttgaagaagtacagtaagaaatacgaggcagaagatcaagatgtttcgttgctgctgagtgaacaagagcgggagaagcgcaggatgttgaaagaagagtgggacaagtgggttaacgaatggaagcggatccacgaggaagagagtttacagaggcaaaagctcagggatggagaggctagcgatgaagaggaggaatacgaggcaaaggacatcgaggtggaggaagtgatcgatcttacagaagaggtccttcaccttgagtatggtcaagagtgagttttataggtggacttggattcgaacattttattcactttttgaggtttagttgggcagcttatttcatctttgtaaaacccaattttgtagtctttcattaatttttttttttatgtggaaggaattccttttactcacaaatttaacgtgaaagacatttttgctgccttctttgggcgaaagtgttcactcatattcctcgcttccttggcactaactatgcatgaagaaatgttgagttagattatatgtgggtttgtgcataaaggttttgatgtgattgta

SEQ ID NO: 7246 - DNA, 633 bp, Glycine max
  misc_feature (19)..(19): n is a, c, g, or t
ttgtttcaatacttcctantccttttcaatttatttaattattgaatggtttcagttcaaattatttaattaattcctttcacccattttttcttaattctttttcaaaataatttcttgatatttttttctcgagccgctcgtttttcatgtgtgattcgaactcgagtggtaatggagacgattttacaagcaacgtgaaaaggctcataattgatttggtcaccatttgaaggaagagaatgtgaaagagtgaggtcagagttgccagtagacgaagacaatcgtcatcagttgcagctgcaaaggaatgaggtaattgcattgacgaaccttctcaatcgactctcggaatccttcaaattcgtccacgaagtgggacctacagttgaaagaatcatggaaggaggacatttttctgctcatacaagaactgattagctcatggaaaaaaatttggtcctatgtatctaaaacttaggtaacatgctctcttctgagtatttgtcatatttctcgtttgttgtaccaaactgagtattacatgtttgcaatttgcaagctataaataagaaccaagttttaccaattaaaaaaaaaaaaaaatattaattaaaaaaaaaaaaaaaaaac

SEQ ID NO: 7247 - DNA, 892 bp, Glycine max
  misc_feature (3)..(3): n is a, c, g, or t
  misc_feature (27)..(30): n is a, c, g, or t
  misc_feature (50)..(52): n is a, c, g, or t
  misc_feature (54)..(55): n is a, c, g, or t
  misc_feature (74)..(74): n is a, c, g, or t
  misc_feature (77)..(77): n is a, c, g, or t
ggncgctacattgtactggctgggtgnnnnggcttcaatggacagttggnnntnncaacggcggggagcgtggnacncatggctactgctgaacattttatggcaacagatattgaatgggatccaactggaagatatgttgcaactgcggtgacttcagttcatgaaatggagaatggtttcaatatatggtctttcaatggcaagcatctatatcggattctgaaggatcacttctttcagttcttatggagaccaaggccaccatctttcttgactccggagaaagaggaagagattgcaaagaacttgaagaaatacagcaagaaatacgaggcagaagatcaagatgtttccttgctgctgagtgaacaggagcgtgagaagcgcaggatgttgaaggaagagtgggacaagtgggttaatgaatggaagcagatccacgaagaagagagtttacagaggcaaaagctcagggatggagaggctagcgatgaagaggaggaatacgaggcaaaggacatcgaggtggaggaagtgatcgatgtaacaaaagaggtccttcaccttgagtatggtcaagagtgagttttttagctgggaggacttggattcgaacattttattcacttgtcgaggtatagttgttgggcagcttacttcgatttcatctttgtaaaacccaattttgtaatctttcattagttttgtttttttcttattgtcaaatttaacgtgaaagacatttttgctgcctccttgggcgggaagtgttcactcatattcctcgcttccttcgcactaacaacatgcctgaagaaatgtggagttagattattattattattattatatgtgggtttgtgcataaaggttttgatgtgattgtaaa

SEQ ID NO: 7248 - DNA, 1972 bp, Glycine max
ggctcgagaaaaaaaatcacagaattttcgcagtccaagaggacacgcatcccaaaccgttttgatttggaacgtgtcacgctctaaatttgcatggcatattgtctttaactgagtcaatttcgcttaataaaacctctcttcactcctctgctttaccaacccaaccccctgttcctgtgtgtgtgagtgaccgagtgagtttgtttttctcagctgatatatatggcgcttgatcgctccattataagcaaaacgacgtggtacagcgtcgtattatggatgatggtggtgctggtgagagtgcacggtgcagccgcgaggccgaaccggaaggagtgggactcagtcataaagttaccgactgaaccggtggatgctgactcggatgaagtgggaacacgatgggcggttctcgtggctggttcaaacggctacggaaactacaggcatcaagcagatgtgtgccatgcgtaccagttgctgataaaaggtggactaaaagaagagaacatagtggtgtttatgtacgatgacatagctaccaacgagttgaatcctagacatggagtcatcatcaaccaccctgagggagaagatctgtatgctggtgttcctaaggattacaccggtgataatgtgacgacggagaacctctttgctgttattcttggagacaagagtaaattgaagggaggaagtggcaaagtgatcaacagcaaacccgaggacagaatatttatatactactctgatcatggaggtcctggaatacttgggatgccaaacatgccatacctttatgccatggattttattgatgtcttgaagaagaaacatgcatctggaagttacaaggagatggttatatacgtggaagcttgtgaaagtgggagcgtgtttgagggtataatgcctaaggatctgaatatttatgtcacaactgcatcaaatgcacaagagaatagttggggaacttattgtcctggaatggatccttctccacctccagagtacatcacttgcctaggggatttgtacagcgttgcttggatggaagatagtgaggctcacaatctaaaaagggaatccgtgaaacaacaatacaaatcggtaaagcaacggacttcaaatttcaacaactatgcgatgggttctcatgtgatgcaatatggtgataccaacatcacagctgaaaagctttatttataccaaggttttgatcctgccactgtgaacttccctccacaaaacggcaggctagaaactaaaatggaagttgttaaccaaagagatgcagaacttttgttcatgtggcaaatgtatcagagatcaaaccatcagtcagaaaataagacagacatcctcaaacaaattgcggagacagtgaagcataggaaacacatagatggtagcgtggaattgattggagttttactgtatggaccaggaaaaggttcttctgttctacaatccgtgagggctcctggttcgtcccttgttgatgactggacatgcctaaaatcaatggttcgggtgtttgaaactcactgtgggacactgactcagtatggcatgaaacacatgcgagcattcgccaacatttgcaacagtggcgtttctgaggcctccatggaagaggcttgtttggcagcctgtgaaggctacaatgctgggctattgcatccatcaaacagaggctacagtgcttgattttgggttttgtacacaaaagctttaaagcccggttgatgatgtaatatttctctattgcattctgcctactggtttctgctgcttgtgtcaaattttctctaaactagagtagcccaatagcatacgtgttatgtgcattggtcatgtatacaagtgtaatactaaaaccttctacataatataagattagttagtttacttgtctctattttcttaaactccgctccttcaaatcaagaagattttgttagttttt

SEQ ID NO: 7249 - DNA, 979 bp, Glycine max
gttgtgctccttcagctgaacacctaatcgaggaatttttacggcactgagtgaggtggttcactgtctctgcctctttctcttctttgttcctagaaacaaaccatcatcttcttagatctataccaacgtcgaaggaaataatctcttgccaaaagcaaaaccctaaacacttcctccgagtatttaccagaaccatagtttttaaaagctgagagcgtcaaaggcacagctgtcgcgtgggaagatcccaatgtgtgctagaaattaaaaagatcattgacaccattgccgaagaaggggtctgtgacctcactcgcgtccctcttcccagtagaggaggtgcagaaggtggccaagcgcattgaagacaccattgccgacaagcagagcgaaattaaccgcgtacgaggttttgtcgtcgacaaaacagcctcatcaacctcgtccacaagctccttgaacagctctcctacgacatcatggttccgtttgggaaagcaacattcttcccaggtcgtttgattcacaccaatgagttcctggttcttttgggagaaggatattatgctgagagaacttcgaagcaaaccgttgagattttacagcgaagagggaagtccttggattcgcgggttgattctcttgaggccaatatcaaggaccctgaagcagaggcttcatttctcaatgccacggcttcatttttggttgctaggttcttttgggagaagggtattatgttgaatttttaatgctgaaatgctgaatttgttctatgttaattcttccattaaaaatattgggaattttgattttttatctcaaacgtgtagagagactggagagcctgtgaccgtcaatttttatgtgtacaatggaagcaatttttcatgttaattctgcagttcaattcaacttcaaaaaaaaaaaaaaaaaagcttatcgataccgtcgacctcgagggggggcccggtac

SEQ ID NO: 7250 - DNA, 1445 bp, Glycine max
tacggctgcgagaagacgacagaaggggggtcttgggtgggacaacaaagcgcaaagaaaaacgcggtttttgttcctcctgctctctctgactctgtctcggtgcagcaaaaaccttccttcttcatcaattccacgaactcaaacaacaaataattcattctttcaaatttcaattctaacatagaaataagaataaaaatgggttgtttcgccagcaaaaacgctgacaccaaggccagtagggctgcgcgttggcgatccacgggcattgttgctttgcgcgattccaaattaaagacgtttccggatgaaattcttgagttagacacatctgttcgcactcttgacttgacgcataatcggatagttgacattccggtggaaatcagcaaattaattaatgtacagcgcctgatattagcggagaacctcattgagagactgccagtgaatttggggaaactccaatctctgaaactgatgaacctggatggaaatcgaattacttccttgcctgatgaattgggccagttagtaaggctggaacgcatatccatctcagggaatttgttaacatccttgccagcaaccattggaagtttgagaaatctggtgcttttaaatgtgtcaaataacaagttacagtctcttccagaatctgttgggagttgcttctctttggaagaattacaagctaatgataatcttattgaagatcttccctcttctgtgtgcaatctctctcacttgaagtcactttgcttggataacaataatgtgaagcagatacccctgaatttattgaaagactgcaaagctcttcagaacatatcactgcatgctaatcctatatcaatggatcaatttcagctgatggaggggtttcaagagtttgaagcaaggaggaaaaagaagtttgacaaacaaattgattcaaatgtgatgatcggttccaaaggtcttgatgagggtgttgatctatgaggtggtcttaggcttgttgatggggttctttcagttgtacatttggatgagcttctggatgtagcgtggaatactgggtgttttgtccatgccttttatttcacaaatgaaataagtgtatggagatccttttgtcacgttgtatattattcttatttttattttttgttaccctatccagatttgcctataaatgtgctggcttgtagatgcaggcaatatccagcactagactaaatttcagaatatggtatttggggccattttgttgataatgaaatatgtatctcagcagctgtaaattacgaactttaaatatgatttgaaaggcagtgcattctatcccattaattatgtcaagtgaaaacgcgtgtcgagtgcgctcaatcttttgtattgctttgtgtcgttctcctactctggtaccttgtttgcctgaaaattatgctggcttcaac

SEQ ID NO: 7251 - DNA, 2147 bp, Glycine max
aattcggctcgaggcagtttccaaagaacccaactcaacttcaaaaccccataataatctctctttgacattcataaaaaacacacaccatggactcttgttcatcaccgccaaacaacaactccctcgctttctctctttccaatcactttcccaacccttcctcctctcccctctcccttttccactccttcacctatccatctctctctctcacaggaagccacacggcggatgcacctcctgagcccatcgccggcggaggagcgaccaacctctccatattcaccggcgcccccaagttcgaggactttctgggcggttcctccgcaacagccaccgccaccacgtgtgcaccgccacagcttccgcagttctccaccgacaacaacaaccacctgtacgattcggagctgaagacaacaatagccgcgtgcttccctcgcgcctttgccgccgaaccaaccaccgaacctcagaaaccctctccaaagaaaaccgtcgacaccttcggccaacgcacctccatctaccgcggcgtcacccgacatagatggacgggaagatacgaagctcatctatgggacaatagttgtagaagagaaggccaaagcaggaaaggaagacaagtttacctgggtggttatgacaaggaagataaggcagccagggcttacgatctcgcagctctcaagtactggggtccaactaccaccaccaactttcccatttccaactatgagaaggaactggaggagatgaagaacatgaccaggcaagagtttgttgcttctctacgaaggaagagcagtggtttctctaggggggcctctatatacagaggagtgacgagacaccaccagcatggccgatggcaggcgagaataggcagagttgccggaaacaaagacctctaccttggaactttcagcacccaagaagaagctgctgaggcctatgacattgctgctatcaaattcaggggattaaatgcagtcacaaactttgacatgagtcgctacgatgtaaagagcattgcaaatagcactcttccaattggaggtttatctggcaagaacaagaactccacagattctgcatctgagagcaagagccacgaggcaagccgatccgacgaacgagatccatcagcggcttcatccgtgacctttgcatcacagcaacagccttcgagctccaccttaagctttgccatacccattaagcaagacccttcagattactggtccatcctggggtaccataattctccccttgacaacactggcatcaggaacactactagtgttactgcaacttcttttccatcctccaacaatggcactactagtagtttgacacccttccacatggaattctcaaatgcccccacaagtaccggcagtgataacgatgccgcgtttttcagtggaggaggcatctttgttcagcaacaaagtggtcatggtaatggtcatggaagtggaagcagtggttcctcctcttcttctttaagctgttcaatcccattcgccacgcccatcttttctctaaatagcaatactagttatgagaacagtgctggttatggaaactggattggacctaccctgcacacattccaatcccatgcaaaaccaagtctctttcaaacgccaatatttggaatggaatgagctcatgcacgaggtgggatgagaatctgtgcatataatgatgaaaggggaagggcaatagtggtgatggtgttttagcatgcaaaagaagcaaggacgaactagtacctttagctgatgcagtatttgaatgagttggactgacagtcataatttcatgagaagcgtagctatacctagcagcagctgacactgtactaactcaaagttcctttgttatgttttggatgaattttcttttttttctttttcgccccctttttagctttttgtccctgttaatatactgacatcatttcaaatgagtataatgggaagaaaaaagaaaatccttttgtaatcccctttcatctcatttttgttagtattaaaaacttgctatatctatgcgaaaggcattcaaagcctattatatatattgctgtacctttggtaaaaaaaaaaaaaaaaaaaaaaaaaaaaaaaaaaaag

SEQ ID NO: 7252 - DNA, 773 bp, Glycine max
cccacgcgtccggttggtggtgttgttgaagattctgaccgtgctttcttttgtttctttgcgtggcttttgtacctggggaatgattactgactcgtggggatcttttgctcattatgcggtttcagtttacctgggtggttatgacaaggaggataaggcagccagggcttacgatctcgcagctctcaagtactggggtccaactaccaccaccaactttcccatttccaactatgagaaggaactggaggagatgaagaacatgaccaggcaagagtttgttgcttctctacgaaggaagagcagtggtttctctaggggggcctctatatacagaggagtgacgagacaccaccagcatggccgatggcaggcgagaataggcagagttgccggaaacaaagacctctaccttggaactttcagcacccaagaagaagctgctgaggcctatgacattgctgctatcaaattcaggggattaaatgcagtcacaaactttgacatgagtcgctacgatgtaaagagcattgcaaatagcactcttccaattggaggtttatctggcaagaacaagaactccacagattctgcatctgagagcaagagccatgagccaagccaatccgatggagatccatcatcggcttcatcggtgacctttgcatcacagcaacaaccttcaagctccaacttaagctttgccatacccattaagcaagacccttcagattactggtccatcttggggtaccataatactccccttg

SEQ ID NO: 7253 - DNA, 2019 bp, Glycine max
tcagctacgtaggccccccccccaaaaagacattccagtctattattagctagttcactcactgacactgcacacttcatttctgaaaaaataataattattcctcttttggtgccttctattccatggcgagtctgcttcgcaacgctaacatttccctcatcaaacgttctctcttccactctgaccttctaacgcgcttttgctttaaaccaggagtattgggcacgtctcaagttttgagcctttcaactcgtaaaaggaggtctaaatcagatggaagtgactcaggtgaagagaacttgtctaagaaagatttggcattacaacaagctattgatcagatcacctctgcatatggaaagggatctatcatgtggcttggtcgttccgtggcaccaaaaaatgtacctgtggtgtctactggttcttttgctctggatatagcacttggggttggaggtcttccaaaggggcgtgttgtggaaatatttggtccagaggcttctgggaaaacaactcttgctttgcatgtgattgcagaagcacaaaagcaaggaggctactgtgcctttgttgatgctgaacatgcacttgataagacacttgcagagtcaattggcgtagatactaagaacttgcttctctcacaaccggattgtggcgaacaagcacttagccttgttgataccttaatccggagtggttcagttgatgcaattgttgttgatagtgtagctgctcttgttcctaaaggcgagcttgatggtgagatgggtgatgctcacatggcaatgcaggctaggttgatgagccaggctcttcggaaattgtgccactccttgtcactttcacagtgtatattgatttttataaaccaggtgaggtcaaagatatctacttttgggggatatggtgggcccactgaagttacttgtggtggtaatgcactgaagttttatgcttctgtgcgtctaaatatcaaaagaattgggtttgtcaagaagggtgaagagactttaggaagtcaggttcttgtcaaggttgtgaagaacaagcatgcccctccatttaaaactgcacagtttgagattgagtttggcaagggtataagtagagaagcagagatcatagagttgagcgtaaaatacaaaatcataaagaagagtggttcgttttttgaatataatggcaggaatttccatggcaaggatgctctaaagagattcctggctgagagcgatggagtacaagaattagcaacaaagctcagggagaagattcttgatgctgagccagaactggagccagaggagcaggagatgattggagatgttatggaactaatggaagaaatggtatcgcttgattccaccgatgaagctgccgctcctgctcctgcccctgttgctgcggaagcataaatttgcaaataacctcaaaatatggggtgcttctaatctccctgcttcaaaaaatgtaccctactcaaagggccctcacagatgaaggtgtctcgaaaaggtaaaagcacggatgcctcatgcttcctagttttgaacacttttcctccttgcaagcacaaggcacattgcctttgtaaattgaaatttttggtcattttatgcgagccacgagtcacatggggcgtccaagttttgtgactgggaggaaaagactatctaatgataggaatcaagggccctagaaggatattaagcttcactttatataatggtctgtgtgtatatgtattccttgctgtaagattttgcatgcatttacccttccagctggtcaaaattattagatgaagatctcagatcatcttgtatcattaaattagacttatgctgtgtttggatacaagtcaactgatctgaaattcacgtcaaattacaaaatgatgcagaagctaatactagctacttattgtttttgccttttttggcccgaatctgctgctgtagaatgagaaatcaatcacgtttaaaacaaaagaaaaaaaaaaaaaaaaaa

SEQ ID NO: 7254 - DNA, 2258 bp, Glycine max
cacgcgtccggccgtccgcgttcccgattcaccccacccgtccccaaaacccattcacttttccacaagccttagttcttctcatttattctctttttcaaaatactttcactctctctaaccttccagttctcactaaacctcgtgaagctcgtgatggacaccaagataggttcactagacgcgcccaagcccaacagcaacgacgtcgtatcatgcaacctcaccagcagcgccgccatccagccctgcttgccggcgacggtgatcaacggcgccggctgtagtgactccaccttgggcggccacctggcccgccggctggtggaaatcggcgtcaccgacgtgttctccgttcccggggacttcaacctgacgctgctggaccacctcatcgcggagccggcgctgcacctggtcgggtgctgcaacgagctcaacgccgggtacgccgccgacggctacgcgcgcgccaggggagtcggcgcgtgcgtggtgacgttcaccgtcggcggcctcagcgtgctcaacgccatcgccggagcgtacagcgagaacttgccgctaatttgcatcgtcggtgggcccaactccaacgactacggcaccagtcggatcctccatcacaccatcgggttacccgatttcagccaggagctaaggtgctttcagaccattacttgcttccaggctgtggtgaataacttggaagatgctcatgagttgattgatacagcaatctcaactgcgctgaaagaaagcaaacctgtgtatataagcattagctgtaacttgcctgggattcctcaccccactttcagtcgtgaccctgttcgtttttcattgtctccaagattgagtaataagatggggttggaggccgcagtggaggcagcggcggaattccttaacaaggcagtgaaaccagtgctggtgggtggtcctaaactgagggtggcaacagcatctgatgcctttgtcgaactggctgatgcgtgtggttatgcgcttgctgtgatgccgtcggctaaagggcaggttccagagcaccatccccattttatcggaacttattggggtgctgtgagcactgccttctgtgctgagattgtggagtctgcggatgcatacttgtttgctggtcccatttttaatgactacagctctgtggggtattcgctccttctcaagaaggagaaggcgatcattgtgcagcctgatcgggttgtgatcgcgaatggacctgcttttgggtgtgtgctgatgaaggatttcctcaaggcactcgcaaagcgcctcaagcacaacaatactgcatatgaaaattaccacaggatatttgtccctgatgggcatcctttgaaggctgcacccagagagcctttgagggttaatgttctgttccaacatatacaaaatatgctgtctggtgaaactgctgtaattgctgagacaggggactcctggtttaattgccaaaagctgaaattgccaaaggcatgtgggtatgagttccaaatgcaatatggttcaattggatggtctgttggtgctactctgggttatgctcaagccgttcctgagaagcgagtgattgcctgcattggtgatggaagttttcaggtgactgcccaagatgtatcgacaatgttacggtgcgggcaaaaaaccatcatctttctgatcaacaatggtggatacaccatcgaggttgaaattcatgatgggccgtacaatgtgattaagaactggaattacactgggttgattgatgcaatccacaatggtgaagggaaatgctggactgccaaggtgttctgtgaagaggagctagttgaagcaattgccacagccacaggacccaagaaagactccttatgcttcattgaggtgattgttcataaggatgacaccagtaaagaattgcttgaatggggctcaagggtttctgctgccaatagccgtcctcccaatcctcagtaatcttcagaatttatcctatgactaaattgctgcagttgccctttagctctatgaaagtgagaatcatttgagatgatgcccttgtagggaatttacctttgttaatggcttgaaacatttatgctaaactgactccccacttgtttgtgtaaattctttcacttttgttcacctttgtttatcacctttgttcatttcgattattcttaagtaaagcatcgttctttttatccaaaactgtttgctacattttgttaaacaggaaccgatttcat

SEQ ID NO: 7255 - DNA, 2365 bp, Glycine max
agttaaaaagttacttaacttccctattagctatataaataagaaaacaaaccaataggaaagctaaagagtgttaagactaaacaagaatagtttctgcattacatgcatcaagtagtagtgtttatgtaataccagtagttttctcatctagaagcttgttgggcattatgtactacttgaactaattaatcatgaaatgaaaaacctgattgaagcttggtgggcattatgtactacttgaactgcaatgatatttggaactactttaattaatctccaaaaaagataaatagtagaatattgcaatgttttcacttattcagctctgtccctaagcatcagctttgctactcaaaagtcatgaaacaaagaaatgtcatcaaagtatgaaacttcaattacgaagctaacatatagcattcttgttgctatatgcatactcctaggttctgcctcaaaatgaagtggatttcaaaacttcaaacaacaatgataaagtaaattgcattcttttcagtgttaaattagctcacaagcttagctctaccttgagctgcttagattccaatttaaacagttaaatcaaaacttatcaaagtgtagagtaaataagaaatacaaaagacttcatggggtctcactttcaaacagacaacgatgggggggggcctacgtagctgactcgaggctttaatttaaagcaaatagcaactagcattactgcgtccccgtcaactggaggcgtcccttgaaacattgtaaccaagatttattgatttatggaactatgactgacataaagcattctattaattaatgtcatcacccgcttgaaccagatgccacatgggatgagctaggaatgcaagcatttatccacataatgacacatggtttaatttccaagcaagtattaggcacattttcttgaaagcagcactcacctgaaatattcaacacctaccttagcagcaagcaattgggagattatccacttgcctctaaaaaaacattcacatgattaaattaatccctggtttcaattcaaaacccaccagctagaaacaaaaaggagcgcggaagaggtattgctcaaagtgagtgaacaacctacctctttgcttccagtttaagaaaccagccaactgaaataattaaaccctcagcccacaattcatagtacataaaacgttcaatgtccaagctctcagtatggacgagaacgatttccataatgatcacgcctatcaggcccagaaccaccacctccatctctataattgtctctgcgtctatctccaccatagccacccctattgcccccttggttatatgcaggtggagctcttggtgcagatttttctgccattgcaacactgattttgtaacccctcaaatcataattattgtaaaaaccgccagcagaatgtgctgcagaagggtcttcataagcaaggcaagcatcacccttattgtttccattatcatcagtgtaaatctttatgttccaaggccactgatctttatagcccctcttctgctttattcttccaacttgtccaatgcctccaaaaagttccctcaattcttcaatagtcacatctggtggtaggtttgagatgtagattctagagttgtcacatgtatcatcacaattctcatcacactgtctcactgcagcagggggctcagcagaagatccaccaaatccacctcgattaccagcaccataagtgctgtcatatccagtaggaggcccggatctaccgccactccgtccatcccattgattatctcccccataaccacccacgctacccccatatgatggaggataggaattaggtccaccagtataacttgcaggtggaggaactgcttctgttccataacttgcattcccaccactataagaactgtaagtggatgggtagtttccaccaacaccaccgtaagattgggcagtaggagcaggaacttgaccataaccaccatcttctctcccctgactacctcctatatgaaccacctctaccttcactattaccaccccttccactattatattcattgcctctccctccatcataactaccagatctaccccctccgctgctatagtcatgacctcttcctcctcgattgttaccatagcctccacctcctctattataaccaccgccactgccactgccaccacgatcattagaactattgggattaggacttggagcaccgcatttgttgcattcaacccttttcgcaaagtgcagattcccacaactttggttaggacaacgccagcctccacctctgcctccaccgcgaccgccgaagcgaacaccgcctcgaccaccacgat

SEQ ID NO: 7256 - DNA, 2120 bp, Glycine max
  misc_feature (16)..(16): n is a, c, g, or t
  misc_feature (479)..(479): n is a, c, g, or t
gctggagctcgagccnaatccgcgcgtccgcacagacacacgtcaaaatatccaatcatttcacatggaaagtgccactcaagtcggtgcggcggctcagcccagctcagcttcagcgtcggtgattccctccgccttcgacggcaccctgggccgtcaccttgctcgccgcctcgccgagaccggtgtcagggacgtcttctccgttcccggcgacttcaacttgacgctcctcgaccacctcatcgccgagccgagtctcaacctcgtcggctgctgcaacgagctcaacgccggctacgccgccgacggctacgcgcgcgccaagggcgtcggcgcctgcgtggtcaccttcaccgtcggcggactcagcgtcctcaacgccatcgccggtccgttccccgggtcgtcccccgcgtccggcatcgtcggaggacccaattccaacgactacggcaccaaccggatcctccaccacnaccatcggttttacccgatttcacccaagagcttcggtgctttcaggccatcacgtgttttcaggcagtggtgaataacttggacgatgcgcatgaacttattgacactgcaatttctactgctttgaaggaaagcaagcctgtttatatcagcataagttgtaaccttcctggaattcctcatccaacttttgctagagaccccgtgccattctttcttgcacctaaggtaagcaatcaagaaggattagaagcagcagtggaagcaacggctgctttactgaacaacgctgtgaagccagtgattgtgggtgggccaaaactaagggtagcaaaggcacaaaaggcctttctggagtttgcagaagcaagtggatatccaatagcagttatgccgtccgggaagggactagtaccagagcatcatccacatttcattgggacatactggggtgctgtcagctctagcttttgtggggaaattgtggagtctgctgatgcatatgtttttgttggccccatcttcaatgactatagctccgttggatactcgttgttgataaagaaggagaaagccataatagtgcagcctaatcgggtaaccattggcaatggtccttccttgggctgggttttcatggctgatttcttaactgcattggctaaaaaagtgaagaccaacaccgcagctgtggagaattaccggcgtatctatgtcccaccaggcattcctctgaggcgagagaaggatgaaccacttagagttaatgttctattcaagcacattcaagaactgctaagcggagatactgctgtaatagctgaaactggagactcatggttcaactgtcagaagctccatctgcctgagaattgcgggtatgaattccagatgcagtatggatccattggttggtcagtaggtgctactcttggatatgcacaggctgcaacagacaagcgtgtaattgcttgcattggtgatggcagttttcaggtaacagcacaggatatttcaacaatgattcgctgtggacaaaagaccatcatctttctcatcaataatggaggttatacaattgaagttgagattcatgatggtccatacaatgtgataaagaattgggactacactcgctttgtggacgctatccataatgggcaaggcaaatgctggactgccaaggtacgtacagaggatgatctgactgaagcaattgcaaaagctactggaccacagaaagattcactatgttttatagaagtttttgtacacaaggatgacaccagcaaagaattgctggaatggggatctcgtgttgctgctgctaacagtcgtcctcctaatcctcaatagaaaatcatttcctaattattggcctgttttgtgtattttgttgaatagagttccactactggatatttacaagagaaaaacgacaaaaatgaaaaataagttgaaataaatgtttgcttttccagatttgtatctggtctcgtgttgctgacttgttgacttgttgtaatcatgaactattattgctttgtaataatgtcttgtataatggaattgttaatgaatcaaagaggatatagccattgtatgtaaaaaaaaaaaaaaaaaacacgattgatattgag

SEQ ID NO: 7257 - DNA, 1021 bp, Glycine max
ctaagttgcctgtttttggatcccgcaaacaaatagcacatggttttggaaacccctacataaacccctccctgtcccgccatcccccggctcccccccacgcgcccgcacacgtcaaaatatccaatcatttcacatggaaagtgccactcaagtcggtgcggcggctcagcccagctcagcttcagcgtcggtgattccctccgccttcgacggcaccctgggccgtcaccttgctcgccgcctcgccgagaccggtgtcagggacgtcttctccgttcccggcgacttcaacttgacgctcctcgaccacctcatcgccgagccgagtctcaacctcgtcggctgctgcaacgagctcaacgccggctacgccgccgacggctacgcgcgcgccaagggcgtcggcgcctgcgtggtcaccttcaccgtcggcggactcagcgtcctcaacgccatcgccggagcttacagcgagaatttgccagtgatttgcatcgtcggaggacccaattccaacgactacggcaccaaccggatcctccaccacaccatcggtttacccgatttcacccaagagcttcggtgctttcaggccatcacgtgttttcaggcagtggtgaataacttggacgatgcgcatgaacttattgacactgcaatttctactgctttgaaggaaagcaagcctgtttatatcagcataagttgtaaccttcctggaattcctcatccaacttttgctagagaccccgtgccattctttcttgcacctaaggtaagcaatcaagaaggattagaagcagcagtggaagcaacggctgctttactgaacaacgctgtgaagccagtgattgggggtgggcccaaactaagggtggcaaaggcacaaaaggcctttctggagtttgcagaagccaagtgatatccaatatcagttattgcgttcgggaaagggctactaccagagcatcattcacattttattgggacatactggggggctgtcagccctaccttt

SEQ ID NO: 7258 - DNA, 1305 bp, Glycine max
ctccggctcgaggtcgaataattagtagcactaacgtgagcgattttgtctaagagtcatagaagaagcgcagttaacgaaggtataagactgcagagagactgagagagaaagagatctggaagaagaaatgagtgaagcgcagaagcacgtttgggaaggggcaattcctctccagattcacctccacgaatccgaagtcaccactctccctcctcctccacccgctctcgtgttggcacctcggctaggttatttgcctttgctgatttcgctattgaagcctcagttcagcagcacgcttccacctggagtcgacaccatttggtttgagtacaaaggcctccctctcaagtggtatatacctactggagttctttttgatcttttgtgcgtggagccagagaggccgtggaatttaacggtacacttcagaggatatccaagtaatatattacttccctgtgaaggtgaagacagtgtaaagtggagctttattaactcactgaaagaggctgcatatgtaataaatgggaatagcaaaaatgtgatgaacatgtctcaaactgatcaggtaatttggaaacttatcgacgggtggcatcgaagcttaagcttggaacttttgaagatgaatatatggaaaatgttagttcagtcttgattaaatctccacaaagtccaggggatactgatgttacgggacaagtgaagactggtatgattcctgttcgtttatatctgtggactgtcaatgaggagtttgatgattttgaagatgctccacaaattgataattgggacaaagtctcatatatcaatcgacctgttgagatttataaggaagatggtaaatactttagcttaaatgatgcagttaaaagaatattgcccgagttttttccggaaaattcctttgtaactgaaggagatgcaaacatcaaccaaattgaagagggagaaagttcatctgatccagggtcatcttgcaacacacttgagattgctgaaatcaaatttgtacgcgttcaaggaatagaaccaattttagacatacctttttcttgggtggttagcaacttgatgaatcccgaatattttcttcatatgtgtgtttgcttaaaagtttcaaagtccaatgctgtgcaatagggataattttagttatgttggacattttactggaaaaatcagaaggtgcaattcttttgtacatatatgtacataacggtttcatatcatatattcatttcatgattcgattgctaaaaaaaaaaaaaaaaaaatgttgacagatgattattt

SEQ ID NO: 7259 - DNA, 1439 bp, Glycine max
ctttgctctcagtgccttagaacacaatccatgtaaccaccactagcaccataccacactgccaaaatcaacaaaccaaaaaggtaaactttttgcaacaaccatggttgcaatggcagcagcaacagcatccacccagttgattttctcaaagccttgttccccttcacgtctatgccccttccaactatgtgtctttgacactaaacaagtgctatcaagtggcaggagaaggcatgtggggggttctggagttaggtgcatggctgtgggggaagcagcaaccactgggacaaagaagagaagtggatatgagcttcaaacactcactagctggttgctgaagcaggagcaagctggggtgattgatgcagaactcactattgtgctgtctagcatttccatggcatgcaaacagattgcttctttggtgcaaagagctaacatttccaacctcactggggttcaaggtgctgtcaatgttcaaggggaagaccagaaaaagcttgatgttgtttcaaatgaggttttctcaaactgcttgaggtcaagtgggaggacagggataatagcatcagaggaggaagatgtgccagtggcagtagaagagagttattctggaaactacattgtggtgtttgacccacttgatgggtcatccaatattgatgctgcagtgtcaactgggtccatttttgggatatacagccccaatgatgagtgtcttgctgacattgatgatgaccccacccttgacacaacagaacaaagatgtattgtgaacgtgtgccaacccggaagcaaccttcttgcagctggttactgcatgtattctagctcaataatctttgttctcacccttggaaatggagtgtttgtgtttacattggacccgatgtatggcgaattcgttttgactcaggaaaacctccaaatacctagagcaggcaaaatttatgctttcaatgaagggaattatcagttgtgggatgagaagcttaagaaatatattgatgatctcaaggacccaggtccaagcggcaagccttattctgcaaggtacattggtagcttggtaggagatttccacaggacactgctatatggtggcatttacgggtaccccagggacaagaaaagcaagaatgggaaactaaggctcctgtatgaatgtgctcctatgagcttcattgtagaacaagctggtggaaaagggtacagatggccttcaaagaatactccggcttcaagggacagagattcatcaacgtgtgccactgtacattggggaagaggtagagaaggtggaaaagtacttggcttaaacgataagctaatgcaagaggtttacttgtgtatgaaaactatgcccaatcaaaacttccaaagcaatacaatcaggttttaaggaaaaaaaaaaccatggtacccggatcctc

SEQ ID NO: 7260 - DNA, 3049 bp, Glycine max
  misc_feature (2008)..(2013): n is a, c, g, or t
aaatctttttgctcttagtgccttagtacacaatccatgtaaccaccactagtgctaaaatcatcaaccaaaaaggtaaacttctgcaacaaccatggttgcaatggcagcagcaacagcatcctcccagttgattttctcaaagcctcgttcaccctcgcgtctctgccccttccaactatgtgtctttgacaccaaacaagtgctgtcaagttcaagtggcaggagaaggcatgtggggggttctggagttaggtgcatggcggtgggagaagctgcaaccactgagactaagaagagaagtggatatgagcttcaaacactcactaactggttgctgaagcaggagcaagctggggtgattgatgcagaactcactattgtgctgtctagcatttccatggcgtgcaaacagattgcttctttggtgcaaagagccaacatttccaacctcactggggttcaaggagctgtcaatgttcagggggaagaccagaaaaagcttgatgttgtttcaaatgaggttttctcaaactgcttgaggtcaagtgggaggacagggataatagcatcagaggaggaagatgtgccagtggcagtagaagagagttattctggaaactacattgtggtgtttgacccacttgatgggtcatccaatattgatgctgcagtgtcaactgggtccatttttgggatatacagccccaatgatgagtgtcttgctgacattggtgatgaccccacacttgacacaacagaacaaagatgtgttgtgaacgtgtgccaacccggaagcaaccttcttgcagctggttactgcatgtattctagctcaataatctttgttctcacccttggaaatggagtgtttgtgtttacattggacccgatgtatggcgaattcgttttgactcaggaaaacctccaaatacctagagcaggcaaaatttatgctttcaatgaagggaattatcagttgtgggatgacaagcttaagaaatatattgatgatctcaaggacccaggtcctagcggcaagccttattctgcaaggtacattggtagcttggtaggagacttccacaggacactgctatatggtggcatttacgggtaccccagggacaagaaaagcaagaatgggaaactaaggctcctgtatgaatgtgctcctatgagcttcattgtagaacaagctggtggaaaagggtcagatggccatcaaagaatactcgacattcaaccaacagagattcatcaacgtgtgccactgtacattgggagcgttgaagaggtagagaaggtggaaaagtacttggcttaaacgataagctaatgcaagaggtttacttgtgtatgaaaactatgcccaatcaaaacttccaaagcaatacaatcaggttttaaggaagaattctttttatacccccctccccctccgtccttttgtgcaaagaaaaaagtgatgccaacaatcttcatatcagtttgaacaagaattttgtataactttgaacatgtttcaaattggatataattttgttcattctggcaatatttctgccaagagaagcaatcatgtcagtaaatttcaaacccttctttctcactgataccaaatcatgtgaaatggttctagatgttaactaaatgactgttactacctattactttcgatgagaacttctggaggacttaagtatttaacgcaatcaaactctgggaaattttttactgtaagacatttgacatgaatttagatttgagcttatcagatattaccagatgaaacttgaaatttatgcaccgatgtattagcactacaactaaattaaagcaagtgctgactgattagggtcgaagagacaatatttaaactaatcaggaccaatgactaaatatatcatttaccaattggtatcttgttttcccgcaaactgttaacaaatacaaaacttggatgttttaaagtaaaataatcaccatatccatttaagattcttgnnnnnntttaaatcccagcatgtctagtctttcccttgcctcttccattgaaagtttaactgtcaccacatagatccagaaattgcttaaatgacttagacttcattacaaggctgttaaccatgactgccatcaaaatgtaacccaactaagatgaatccttataataaaccaaaacaagggaggaagctatctacaatcattttttaagcttgaccaaataggcgaagcttgtaaggtataaatgaatagcaggttatcattctaaatttagtgcaacagcagagagcaattctttggaacaatagatataaacatctgcagtgagctcgcgttaataagtcaggctgagtcattcttcaaattgtcatttatgtacaattttccggatccacaaactgctggcggtttttctcagggcttataacagttatgctctttgtgacaaatttcatcgcagtcatacattcagggcctagtactttcatatctttctcacatataacttctgccacagttgataattcaggtgtagcatgatcaccattgcattcatgagacgagcctgaagcattgtccattgaaggacttgatgttggatggcaagaaaaatctatgccttcacaagaaaagtctagatcatttaacatttctgtgaaggagaagtccatccctaaggcatcaaagttaggaaaatcaatgtcaaatatgtccaattccttttcagactcagatgtagaaatctcattgggcaatggattgtccaaactcccaggcacatcggcagcatcaaagttcaacctgctcctaacatgatccctcttccgtcccgtcgctgaatttgtcttgacaggagaaatacaatgactcatctctatgtaagccatctgttttgcagggctgaccataactctcttggtggaaattacagtgcaatgactgggtgtaactgcacggttgcaagttgcaactgaagaaacctcagcaggggatatatgtgtatcactgtgagaagattttgttctaggaggtgtctttggaa

SEQ ID NO: 7261 - DNA, 1038 bp, Glycine max
cttccgttggctttgtcacagtccactgtgcccccaagaaagttccttaacctcaaaccccttatggcaagttgctaacttctcttacttttatctttgaagccaccctcttctaacttctccatttcacaaggaagaagatcagagaacatttagaacaaaaaagagagtttgagaaatggggaggggtaagattgagatcaagaggatagagaactcaagcaacaggcaagttacatactcaaagagaaagaatgggatcctaaagaaggccaaggaaatcactgttctatgtgatgctcaagtttcgcttatcatctttgctgcatctggaaagatgcatgactacatcagcccttctaccacgttgattgacatattggagaggtaccacaagacctcagggaagaggctttgggacgccaagcatgagaacctaaacggcgaaattgagagactcaagaaagagaatgacagcatgcaaattgagctcaggcacttgaagggtgatgatatcaactctcttaactacaaggagctgatggccttagaggatgccttagaaactggtctagtcagtgtccgcgagaaacagatggatgtatacaggatgctcaggagaaacgacaagatcttggaggaggagaacagggaacttaattttctctggcaacaacgtttggcagaggaaggtgcgagagaagtggacaatgggtttgatcaaagcgtaagagattacaattcccatatgccatttgcctttcgtgtgcagcctatgcagccaaatcttcaagaaaggatctaatatataactcttgaattcaaaaacttcatcttggtgctgtcaaaatcgtatgtgtcacaactcttttaagtatatgttggtatctggttgtaagtaataaactaagcaactgacctttggctttaattgtgaagttacaacatcttgtgtctccaaccttattgggtaatcatatgacatcttagtgtgtttgtctgagtataatgcttgcgcttacacattttattatttga

SEQ ID NO: 7262 - DNA, 1242 bp, Glycine max
acccctcctgcaccccggcactcggtgctagcttagctcaaacctcacctcaataatctttcgtgctagctagcttaatcatattccaattccaacagaaccaaattctgctagctagctagtacgtcaaaggaaataaaataatatggcattcagcgggacccaacagaaatgcaaggcttgcgacaaaactgttcacttggtcgaaggtttatctgtcgatggggctgcttatcacaagaattgcttcagatgcagccattgcaatggccttcttgcgataagcaactactcatccaccgaaggggttttgtactgcaaggtgcactttgagcagcttttcaaggaaactggcgcctaccccaagaaatcccagtcgtctggaaagcctccactcgagctgaatagagcaccaagcaaactttctgccttcttctctgggactcaagagaaatgttcaaaatgcaagaaaaccgtatatccattggaaaagttgaccgtggaaggcgagttttaccataaatcatgttttaggtgtgcacatggaggatgtttcctgaccccttcaacctatgctgctcttgatggatatctttactgcaagcctcacttctctcaattgttcaaggagaagggtagctacagttatctgtccaagcaaacttcattgaagaaaagtgaaatgcaacaagaacaagaggctgtggagaaaacaacaacaacaacaacaaccgatgatgatcgctcagagccagagccagagacgacgacaacaacaacaacaatggaagctgaacaagctgatgatgatcactctgagcaagaacactagattgattgatggaacattaattttgcaaggggaggcttcacttgtgtctttgagtaaaattgatctttctggctacaaatagaacaaccccatttgggacattttgaagttcctgattcattgggttgtgtggctttgtgtcatttgggaagattcccgcaaaagggctattacagtattatgtgttccataatttgcaaacagtcagtgtagacagttaaccgttaagcctttctgttctttggggcatgtacatgactttctcaagccaaagtgcatgcatgcatgctacaatcatttcagatgtatttcattctttgtattcagaaacagatatcagagtagaaaaagaagattttattgtctgaatagattaaaaaaaaaaaaaaaaaaaaaaaaaaaaaaacaag

SEQ ID NO: 7263 - DNA, 786 bp, Glycine max
aatgaaaaatctctttttttgttttagagagaagatgactattctctcagccatattttgctgcttcaagtcaaaggaagaaaagagctctatggtggaagcaggttctttatctcggaaacccaaaggagatcctcagcgatcttcagctcctattgttgtttcttatttcccagttaactctcatccttctcgcttgtagtttatgaaacaccgacacggacacctgtaatgtccaaaatatagaacgtagtacaggtgtcgtgtcggtgtcgaacactgatactgacgtgtgtcggacaccggatcctgcttcatagcttctagccaatcaaatgcttcaattgaaacatgtgtcacaagttatggtatggagtaagttaaacagtacctccatttttttctgataaaaagatcgcactggaattccaacttatgttcttaacttcttgtgtatattatgaaatcccttatgatcagtaaaccgatctcagtggttttttttatttaaagagtacctcccttaagagagagtaccttattaggtttaaatttaattatgatcttatgcatactatcaaaatctctttatcttagttttttttttttaagagtaactccattaagagagataattgttactcatgcgtacattgacacaggctctatatgtattcttcctatcgatccctttgaaaatttgttttctgggaaccgtgtgtcacgtgtttgtattgtatatcctactagatttgttgaagatagattttcagccaaaaaaaaaaa

SEQ ID NO: 7264 - DNA, 1100 bp, Glycine max
aaccaaagggtcatcatcatcatcattaaacatgggtggcagtgttagcaagagtaggaggatgagttctgagaaatatgtgatgaatttgaaggagaaagtgaggctcttgcaagaggagataaaggagatgatgtatgagagggagaaggagacaaggagatatgagagggacataatggtgttcactttcaaggaggcagattcgaagcaagaggggaagaggctgagagaggaagtgaagcaattgaggagtttggtggaagagaaagatgagaagataagagagattgaggttggaatgatggagaagaacagtgagaaagagtgggaattgatgggaactaagctcttggttgagcagatgaaggaggagagagcaaggagagatgaagctgtggagaagtggaagcaactttatcttgcaattaagactgagctagatgaactcattcaaagaacatatgatggggatggtctgtattggaaagcagaggaaaatggcatccaaatggaaaatctgaagaaggagttgcaagaaaaggaagaaaccatcaaggccttaaaaactcaattgctttcaatggagaaagaaaagtacaaaaaggagagggagtttgacttgttaaggcaaagcctgaggatcatgaatggcaagaagaattcaattcaaacgaaagagaagctcttgaaaagcaaattgggaaaatgaaatgcacaaaaactagttttcatatccaaaattgaacaatgtggttgaatatgtattattgtatactgggatggtttgtatctttcaacagcacatattttccttttactttttccccctcctttttcttcagaaaaaataagcaagccaatacttccagaggaaaaaaaaaactcttcttgaaccttgaaaaaaaaaaaacagaacatggaggaagattagcaatttttccttgtggactagcttagttattgagtatgccaggtcaggtctaaggactggtgaaggaaattaagatagaaaaaaattgttttacttttgctttcattatttagattcaaacaaagttcgtttctaaaagaagtttctgttccactgaaaaaaaaaa

SEQ ID NO: 7265 - DNA, 1702 bp, Glycine max
tcgagtcagctacgtaggcccccccccgacatactagttcagcagcaactccactcaattgtatgcattgatccatggctagatacattaatattgtacttttgggaatagtgttggtagtggtgagattgaaaggtgcagaggcacagcgggcgttctttgtgtttggggattctcttgtggataatgggaacaacaactttttggcaactacagctcgagcagatgctcctccttatggcattgattacccaaccggaagacccactggccggttctctaatggctacaacattcctgacttcattagtcaatcacttggggccgaatccacattgccttatttagatcccgagctcgacggggaaagattgcttgttggtgccaactttgcttctgctggtattggaattctcaatgacactggaatccaatttgtaaacataatcagaatatacagacagttggagtactgggaagaataccaacaaagggtgagtggtctcataggacctgagcagactgagcgcttaataaatggagcattggtcctcatcactcttggaggcaacgactttgtcaataactattacttggtcccttactctgcaagatcacgccaatacaatttaccagattacgtcaagtatattatctctgagtacaagaaagttctaaggaggctatacgaaattggagcacgtagggtgctggtgacgggaactggtccattgggttgtgttccagcggaattggcccagcgaagcaccaacggtgactgctcagctgagctgcagcgagccgcagccttgttcaaccctcaacttgttcagattatccaacaactcaacagcgaaattggttccaatgtcttcgttggagtcaacacgcaacagatgcacatcgacttcatcagtaatcctcaacgatatggatttgttacatcaaaagtagcatgttgcggtcaaggaccctacaatggtcttggactgtgcactccggcatccaacttgtgccctaaccgtgatatttatgccttttgggatccttttcatccatcagaaagggctaataggttaatcgttcaacagattttgtcaggcacctcagagtatatgtatccaatgaatcttagcaccattatggctttggattccaagaactagatcaatcaatcaagggtctctgtccatcattttattaccgcacctcttttgtgtctcacaattatatatagtctacctgttaatttgtcatatatttatatatatatatatgtgtgtgttcaaatttggtttcatataatatatagtaattatctccaatgtgtcagtgaatagtatatatattataatgttggagtggatggatgatggtaagtaccgtcctccttctccttctcttgggcagtacagaagaaagactgcatgtataataattgagtgaatttttatcttcactaaaaaaaaaaaaaaaaaaaaactcgcgactagggcgctcgcgcgcccggcttcgggaaacctatccccatcaatcttattcttgctgttgttgctgagatagttcttgtgggtggtgctgagtactacagaattattaatggcctggacttggaagacaagcttcatccgggtggtccattcgacccattgggactagcaaaggatccagaccaagctgcacttctaaaggtgaaggaaat

SEQ ID NO: 7266 - DNA, 1350 bp, Glycine max
tacggctgcggaagacgacagaagggaatggagaagctttgaagcacaaagctttccaggggaacatttctgattataatccacatacagattcatctacttctactgttgaggttgtccgtttggtggcaggcaacatgactactggacaactttacagtcatctaatacccctcacactacttcttgttgatggtagcagtccaattgatgttaccgattcacagtgggagctgtatattgtgtgtcagaagaaaactgatcagcagggagagatccaatataggttgactggttttactgctgtttatcgattttatcactatcctgatgattcccgattgcgactaagccagatactggtattacctccttaccagcacaagggttatggtcgattccttctagaggtgctatatgatgttgctatatctgaaaatgtttttgacttcacggtagaagagccattagatcacttccaacgtgtccgcacatgtgttgacgcacttcgcctgcttcgttttggcccaattcagaatatagttactaaagccgtttcacttctgaagcaagaaaagttatcaaagaaagcacattgtcctcgacttttgccacctcccagcgctattgaggatgttaggaaaagtctgaaaattaacaagcagcagtttctccagtgttgggaggttttgatctacattggccttaatcctgttgacaagaacacggagaactttgttagtattattttgaaccgtgttaagtatgatatcttagggaaagattctgggacgtctgggaagcagcttattgaagtaccaagtgatgttgatcaggagatgtcatttgtcatgttcagatcagaagccaacgaagctagtagtgtgcaaatggatgacaatcaggctaatcaagaagagcaactccagaggttagttcaggaaagggtgaaagaaattcagttgattgcggaaaaggtaaccctgcatcttgggagctcaggggtggtggttaattagatttgtccttataaagatggcatgggatgacaaggtcatgcatctatgatattgtgtgattgttttctcgtggacctattaagagtttgtttttctggacaaacactcggtagtgtatttgggttcttcttctaggatatattttaagattctcttatagtattctgtgaaggaaccagtgatctattaagctgtaattaactgagattaaccacaacaaagttgattgagtgacattcagttgttattgtccattctaatacgtcttgctcgtacatttttttgacgtgccctagtatgatacatccaagaaatatgtgggttctggttt

SEQ ID NO: 7267 - DNA, 969 bp, Glycine max
ctcaattcttcgcgtaattggatttcccgctctgaaaaccctaactaccactgagactgagttgagcggagaagagaaggaagagcgaatggggcagaagcagcgttcaagttccgaagccgacaacgaagtcaagaaacgacgccgtgttggtttctcaggcgttgattctggagttgaggccaaagactgcatcacaatctatctagtttcaagcaaggaggaattcgatgctccagagagttttgtcattcatcctgtggatctgaatagcttttttgatgatgatgggaaaatttatggttatgagggtttgaagattaccatctggattagcagcatatcattttatgcgtatgctgatattacattccagagttcatctgatcgaggcaaaggggtcacagatctgaaatctgctcttcagacaattttcgctgagactcttgttgatagcaaggatgaattccttcagaaatatttggcagataatgactttgtcagaacaaacatctcaaatggagaaactttgaagcacaaagcttttaaggagaacatttgtgattctaaccagcttacagattcttctacttctactgttgaggttgtccgtttggtggctggcaacatggctactggacaactttacagtcatctaatacccctcacactacttcttgttgatggtagcagtccaattgatgttaccgattcacagtgggagctgtatattgtgtgtcagaagaaaactgatcagcagggagagatccaatataggttgactggttttactgctgtttatcgattttatcactatcctgatgattcccgattgcgactaagccagatactggtattacctccttaccagcacaagggttatggtcgattccttctagaggtgctatacgatgttgctatatctgaaaatgtttttgacttcacagtagaagagccattagatcactt

SEQ ID NO: 7268 - DNA, 1849 bp, Glycine max
  misc_feature (1)..(1): n is a, c, g, or t
ncgattgggtaccgggccccccctcgagttagctacgtaggccccccccccaaagctattgcaggaagatagcaagttgcagaggcttcataaggaacttgtggctagtggtaagcttacagaatcagaattttgggctacaaagaagaaaatgctggatcaagatgaaagcagaaagttaaaacaacagattggttttaaaaattctttgatctttgacacaaagcctatgagtgatggacggataaaccaggttaaatttcagttgacgccagagataaaatatcagatttttgccctcaaacctgccgtccaccaggcattcctgaattttgtacctaggaaaatgaatgaggtagatttctggaataaatacttcaaagctgagtatctccatagcaccaaaaatgctgttgcagcagctgctgaggctgctgaagatgaggatcttgctgtttttctgaaagatgatgagatattggaaattgaagctcgaaagaaggttcgaagggttgatccaactttagacatggaagcagatcaaggagatgattacacacatcttcctgatcatgggattttccgagacggtagcaaggatatatctgaagcccaaaattctttgtataagagaacattgttgcaagatcttaatagacaaggggcagttgttcttgaaggaaaaactttagatatggagatggaacacccaagaacagtagcagaaattcttgcccggagaaaacaggaatgtgatggggttgtagatgaggagcgacgaaacagaatttctaaaatgaccccgattgaggatcttcaggcacaagataatcatccatatgcaccactctgtatcaaggatcctcgtgactattttgattcccaacaagctaatgctgtaaaaacattggatgattcccaagctggaatggagcaaatgaaatgcagtttgggttctgaggaagcctatgactctttgagggcatcaatatctaaaatcaaaactactggattaagggatcctctctttagtccagatgttgctcttaaggtccttaacggattgactaaaaatatcacaagcaccaaatatcatcttgggaaaagttctcaagagagtgtccttgatattttacccaattcaactaaggagaaactactagatcattgggtgtgcagtcaggaattgctgaggcacttttggtcttcatatccagtttcaacacaaaaccttgtcagtaagacaagaagactgaaagattccatatcacaaatatattctaaacttgaggacataaaggtatctgctgagtcagacctgcggcaccatgtttcccttgttgtccatcctatgcagcaggctctgaatgctgccttgttacactatgaggctgacatcaggaaaagaaatgcaagaggacagaagcctaacggttatgtttagttggagaatgtttcgctctctgcactgcgagcatcatactataacaatttaggaatgtatattccatcaattttgccgtgaacacaaacccgaatggccatttatatcgtgatgaaaaaaatgaatttccatgagaattagtcagcaacagtcttaattgatagttaacatgtaacgtagaattacttgttaacactgtcccaaggcaaaggacacaagtttccagctcctcctgtctccctcttcctccctttaatatgtactttactgctgctttactttagaagcacatacaacaaaggataagtgaataacgtggtttaattaactgctctgtgtttgttcaagacggaaataattatactgctttgtgcttacagcaatacaattttgtatatttattgt

SEQ ID NO: 7269 - DNA, 3700 bp, Glycine max
agtgaaaatgtctacctcaaggcctagccaatcatccagcaattcaaggagatcaagacatagtgctagaatggctcaggcaactgtagatgcaaaaatccatgcaacttttgaggagtccggtagttcctttgattactccagttcggtgcgcgtctctggtacagctgatggagtcaatcaaccaaggtctgacaaagttacaacagcttacctcagaggcaagatgattcagccttttggttgcttgttggccattgatgagaaaaatcacatgcagacatgtaaggtcattgcatacagtgagaacgagcccgaaatgctgaccatggttagccatgctgtccccagtgttggtgaccaccctgcccttggcattggcactgacataaaaactctattcactgcaccaagtgtttctggattgcagaaggctctaggatgtgcggacgtttcgcttcttaaccccatacttgtccattgcaagacctctgggaagcccttttatgcaattgtccatcgcgtcactggtagtttgattgttgactttgagccagtcaagccttatgaagttcccatgactgcagcaggtgccttgcaatcttacaagcttgctgccaaagcaattacccgattgcaatcattgcctagtgggaacatggaaagactatgtgatactatggttcaggaagtttttgaactcacaggttatgatagggtgatggcttataaatttcatgaggatgatcatggagaggtgattcgtgagataacaaagccctgtcttgagccatatctgggtttgcactatccagccaccgacattccccaggcttcacgctttttatttaggaagaacaaggttcgtatgatagttgactgtcatgcaaaacacgtgagggttcttcaagatgaaaaactccaatttgatttgattttgtgtggttccaccttaagagctcctcatagttgccacgcgcagtacatggctaacatggattcaattgcttccctggttttggcagttgtagtcaatgacaacgaagaagatggggacactgatgctgttcagccacaaaagacggagagactttggggtttggtagtttgccataacactactcccaggtttgttccctttcctctaaggtatgcaagagaatttctgcctcaagtatttgccgaccatgtgcacaaagaaatagagttagaatatcagattattgagaagaatatcctgcgccacccagggcacctcttgtgtatgctgatgcgagatgcacccctaggaattgcatcagagagtcctaatataatggatctagttaaatgtgatggagctgccctcatatacaggaacaaagtatggagattaggagtgacaccaagtgaaccccagataagagagatagctttgtggttgtctgagtaccatatggattccacaggctttagtacagatagcttgtttgatgcagggttcccatcggctctttctctgggtgatgttgtgtgtggaatggcatctgttagagtaactgcaaaagacatggtattttggtttcggtcacacactgctgcagaaatccgatggggtggtgcaaagcatgaggctggagaaaaagatgatagtaggaggatgcatccaagatcatcattcaaggctttccttgaagttgtgaaggcaaggagtttaccttggaaggaatatgaaatggatgctattcattccttgcagataatactgagaaatgcattcaaagaagataccgagagtttggatttaaacgcaaaagcaattaatacaagactaagtgatttgaagattgaagggataaacgatttgaagattgaaaggatgcaggaactggaagcagtgacaagtgagatcgttaggttgattgacacagcaacagtgcctattttggccgttgatgttgatgggctggtcaatgggtggaacataaaaattgctgagttgacgggtcttccaattggtgaagctactggaaagcatttactcacacttgttgaggattcttcaactgatagagtcaagaagatgcttaacttagcactgctaggtgaagaagagaagaatgtccaatttgagatcaaaacacatgggtctaagatggattctggtcctattagtttggtagtaaatgcttgcgcgagcagggatcttcgagataatgttgtcggggtttgttttgtggcccatgatataactgctcagaagaatgtcatggacaaattcatccgtattgaaggtgattacaaggcaattgtacagaaccgcaatccattaatccctcctatatttggcacagatgaatttggctggtgttgtgagtggaatccagctatgatgaagttaactggatggaagcgagaggaggtgatggataaaatgcttttgggagagatttttggcacccagatggctgcttgtcgcctaaagaatcaagaagcttttgttaatttgggcgtcgtacttaataaagccatgactggtttggaaacagagaaggttccttttggtttctttgctcggaatggcaagtatgtggaatgcctgctttctgtgagtaagaaattggacgtagagggcctagttactggggtcttctgcttcttacagctagctagcccagagctccaacaagcattacatattcagcgtctatctgagcaaactgcttcgaagagattgaatgcattaagttacatgaaaaggcagatcaggaatcctttgtgtggaattgtattttcccggaaaatgttggagggtactgacttgggaacagaacagaaacaacttctgcgcactagtgctcagtgccagcagcagcttagtaaaattcttgatgactcagatcttgacaccatcatagatggttacttggatcttgagatggctgagttcaccctgcatgaagttctggttacctcacttagtcaggtcatgacaaaaagtaatggaaagagtatccgaatagtcaatgatgttgcagagcagattgtgatggaaactttatatggtgatagtcttaggcttcagcaggtattggctgactttttacttatttccatcaatttcactccaaatggaggtcaggttgttgtagcaggcactctaaccaaagaacagttaggcaaatctgtccatcttgttaagttagagctcagcataacacatggtgggagtggggtaccagaagtgttactgaatcagatgttcggaaacaatgggctagaatccgaggagggtattagcctactgataagcagaaagctgctgaagctgatgaatggagatgttcgctatctaagggaagcaggcaaatcagcttttatcctctctgctgaacttgctgcagcccataatttgaaagcttaaaagttttggaaaaaagaataaaagatgatgcaacagcaacacaatctgttttctacatcataaagagaacggagctagaaattaatttgcatccaatgtaactctaatttgttcccacgtttctttaactgcttcttgtaacgtacgttgtagatatgtatgataatcttcttcccattccgtggcctgttctttctagagtttttccttatttacttattcctccatcaaacagcaatgatgaatcatttgttgcggaatgaaacgtagaaattagaaaccgctaaaaaaaaaaaa

SEQ ID NO: 7270 - DNA, 1323 bp, Glycine max
ggatgaaagaaatataaatagaagcagcagcgggatttgctaaagctagaaattgcaatgaagaagaggagcagcagcagcagcagcagttcagtttttgaggcgaatggagtggaggaacctcaacaaccttcatcctgtgcagcagcagcacttgatgagttgcataaagagaaaaatgagaatggagaagaaaccctcgtgccttccaatccctatcccaatcttgacgatggcttctatgaaatcgaaaccatacgccgtaagaggctacgcaagggtcagctccagtacctaatcaaatggcgtggatggcctgagactgccaacacttgggaacctcttgaaaatctacagtccgttcctgatctcgttgatgcttttgaggacagcctcaagtctggaaaacatcagaagcgcaagcgcaagcatgtggatgtgcttcaactcaccctactcaagaagcgctccgaacgttctaccacttcttacagccttagacatttcccacctctaactcccactaatgcaaatgattatgatccaaagctcagtgaacttaaggcaccaacacacactggggttcagctagataaccttgcaatacatttccaacaaccaattccaagcagaggagcaaaaaggagaaaatctgcttcttctgtcaagaggttcaagagagacaccgatgcagctgcacttcaaccaatttctgctcctatcaacatgcctgatgctaatactgcctgcaatattgtcaagattatcaagccaataggctattcagcttctttatctgacaacatgcacgatgttttagtcacctttatggctatgaggtctgatggaacagaagtgatggtggacaacagatatctcaaggcatacaatcctcttctgctgatcaatttctatgagatgcatctccggtatactcctacaccgtgactgaacagggtaatgaaggggcttcctgtgtttgctgttggtgataacaatgtagttttgtagacgcagcggatcgtgaagggtaatacttttttggttagtgtatgacgatataaccattagaccaattgtttcaaatgcctgcctgcatgacttcatactaagacaaccaagaattagagccatgaacatgactaggaaattgtatttcaaatctttgcaaacctctttaatctaattattctacatcccgttctatcctctcattattatcgactaacatgtacaagagagagacacaaatattattatggcgagatttttcattatttgtgttggatttaccaaaaaaaaaaaaaaaaaaaaaaaaaaaaa

SEQ ID NO: 7271 - DNA, 685 bp, Glycine max
gaccgcctcgtgcgtaaagcagagtccgcatacgcagtttgcattcgtttgaactctgttctgttgcctccacaaaccaaaccaggcccaagtagtacagtgaaaacgaaattgaagtatagctaggtgaaaggaagtagtcaagtacaagagaatggcgaagtcattgagatcaaagagggagaagaggctgagggctattcggagggagattgttgaacctttctatgacaagaaagaagctgctaagctcgctgcccaagaggccgcccttgccgcacctaagctggaggttccttcgaaaccaaatactgccatggaagcgtccacttccactaacaacaccaacattgatgtggagatggctgatggcagtcaaagcatggcttccttaaagcctgttggtggaatagggaagaaatccaaaaataaattgaaattggctaaaaagaaacgacgtggtaatggaaagatcaagagaaaccgtaagatttgactccaagtaaagaatggtaaggatacctcatttatgtccaacatgaattcttacattatatctttccattgcacaattagttttttatttaaaaatatagccatcagatttgtattttgaggaactctagttattcaattatcaagtttttaatatttaacattatatttaactaaattagattaaaaa

SEQ ID NO: 7272 - DNA, 870 bp, Glycine max
ccacgcgtccgcccacgcgtccgtacggctgcgagaagacgacagaaggggaggaacaagaagcgaaaatataacaaataatttgtactttcatcaaaacaaaatcccgttgtatttttctcagatggctcgaacgaagcaaacggcccgcaagtccaccggcggcaaggcgccgcggaagcagctggcgactaaggcggctcgcaagtcggctccggcgaccggcggcgtgaagaagccgcacagattcaggccgggaaccgtggcgctgcgcgagatccggaagtatcagaagagcacggagctactcatccggaagcttccgttccagcgcttggtccgcgagatcgcgcaggacttcaagaccgacctccggttccagagctccgccgtctccgcgctccaggaggccgccgaggcttacttggtcggtctcttcgaagacacgaacctctgcgccattcatgccaagcgtgttactatcatgcccaaggacattcagctcgccaggcgcattaggggcgaacgcgcttaaacctaatccctgtccttttgtatagataatttcaagcgttcttagttagattgaattgcggttttctttaagaattctgtaatgttaacgctttaccaatgaaattatcgcttttgttcttcaattgaatttggttctcttcaattttaaagcttgtttatacgatgtagagttctgttgaatgcttgtcaaagctatttgagtgaattcaagatttaacgtcaaaactctctgtatgaaagaataagggccaccatgcgggtttaaacatacctcttttcatgaagattgtatatttgaaacgtgaaatttgttgaactatatggtttgatatt

SEQ ID NO: 7273 - DNA, 1465 bp, Glycine max
ccaccaccaattccaacaacaataatccttcctcggacgactccgtctccgccttccgcgccctctcaacagaactcagctacgtaggccccccccccctccgcgacgcccactggcgctccctctacggcctctcctaccctgtcttcaccaccgtcgtcgacaagctgaaaccccacatcgccctctccaacctttccctcccttccgactacgccgtcgctatggtcctctcccgcctcgcccacggcctctccgccaaaaccctcgcctcccgctactccctcgacccttacctcgtctccaagatcaccaacatggtcactcgcctcctcgccaccaagctctaccctgaattcatcaagatccccgtcggccgccgccgcctcctcgaaaccacacaggccttcgaggaactcacttcgcttcccaacatgtgcggcgccatcgacaccactcccgtccatctccgcaataaccctaaccctaatactaaccctaacttctaccgctgccgctacggctacccttcgttgctacttcaagtcgtgtccgatcataagaagatcttctgggatgtttgtgtcaaggcccccggcggcactgatgactccacgcacttccgcgatagtctcctctaccaccgcctcacctccggcgacgtcgtgtgggacaaggtcatcagcgtccgcggccaccacgtccgcccttatgtcgtcggggattggtgcttccctctgttgccgtttttgcttacaccgttttctccgagtggaatggggactcctgcccagaacctgttcgatggaatgctcatgaagggaaggtctgttgttgtggaagccattgcacttctcaagggaaggtggaagattcttcaggatttgaacaccggcgttcgccacgcgcctcaaaccatcgtggcttgttgtgtgttgcataatctgtgccagattgcgagggaacctgaaccggagctgtggaaggagcctgatgagagtggacctcctcctagagtcatggatagtgagaaatcgttttattactttggggaaaacttgaggcaggccctagctgatgatttgcaccagaaactatcctcaagatagttggaattggatagttacttgctttttactataactgcctcgcaagtaaggggaaggagggttcgatcaaacacacatagtgtgtttttatgagtatgttttagttttgaataatttatgagcttgttggtgttagtaacctggtgtagtagtagaatacatgataaagattggtggtggtggtgtggcgtctaactgtaatggcatagctccagtcttgtggatgtgaatgtgaatgtggagtagtggactactaacattgttctgtattcgtatatgaaatgatatgtttcagactagttttaactctaatgccatatgccatcttactctctaaaaaaaaaaaaaaaaaagaa

SEQ ID NO: 7274 - DNA, 1720 bp, Glycine max
  misc_feature (8)..(8): n is a, c, g, or t
cggaagangggacggcgcgtgcagcttcactcttaactgtagaaaagaaaaaccgaagatgagcttgttgaatgaggagagaaaaccgcacgctgtggttactccatatccagttcaaggacatgtgaaccctttgtttaaactagcgaagctgcttcatctcagaggctttcacataacctttgttcacactgagtacaactacaagcgtttgctcaagtcaaggggtcctaatgcccttgatggcctaccagattttagatttgagagcatcccagatggtcttccgccattggatgatgataatgttactcagcacgttccctctctctgtgactctatcagaaaaaacttcctcaaacccttttgcaaacttgttcatagacttaaccactcttctgccactgagggtctcatacccccagttacttgtttggtctctgacggttgcatgccttttactatacaagctgctcaagagcttggactccctaactttatcttttggcctgctagtgcctgttctttcttgtctatcatcaactttcccactctggttgagaaaggtcttacaccactcaaagatgagagttatctgacaaatgggtatttggactccaaagtggactggattcctggaatgaagaacttccggctgaaggacatacctgacttcataaggacaacggatctaaatgatgtgatgttgcaatttttcattgaagttgcaaatagaattcaaagaaacactactattcttttcaacacttttgatggacttgagagtgatgtaatgaatgctctatcctctatgttcccttctctttatcccattggtccttctgcgagaagacgacagaagggtccacaaagccacttgacatctttaggttccaatctttggaatgaagatctagagtgtcttgaatggctagaatctaaggaatctcgatccgttgtttatgtgaattttggcagcatcactgttatgtctgcagaacaactcttggagtttgcttggggtttggccaatagcaagaaaccctttttgtggatcattaggcctgaccttgtcattggtggatccgtgattttgtcgtctgagtttgtcagtgaaacaagagacagaagcctaatagcaagttggtgtccacaggaacaagtgctaaaccatccttcaattggtgtattcttgactcattgtggatggaactcaactactgaaagtgtttgtgctggagtgccaatgttgtgttggccattttttgcagaacagccaacaaactgtagatacatttgcaatgagtgggaaattgggatggaaattgataccagtgcgaagagagaggaggtggagaagctagtgaatgaattgatggtgggagagaagggaaagaagatgagagaaaaggtcatggagttaaagaggaaggcagaggaggtcaccaagcctggtggttgttcatacatgaacttggacaaagtaattaaggaggtgttgcttaattagacactgttagattgaagggttttctttttttctttttcttaatgctttaatttatcatgatagttcattgatcttctctagaattttctgcattgtagaaatggtgccctggaagtgccactttgtgttttgtttattgtggtatgtaatatcttagtcttgatatttcaaactttgattatttcccgtcattaaaatggaaaaaaaaaa

SEQ ID NO: 7275 - DNA, 1047 bp, Glycine max
taatgaccgtgtgagctagctaggcttcatcgatgattcaagatgagttacacagcagagacaaagcctcacgctgtgttcactccatatccacttcaaggccatattaacccattgttcaaactcgcaaagctgcttcatctgaaaggctttcatataacctttgtccacactgagtacaactacagacgcttcctcaaatcaaagggtcccgacgcccttgatgagcttcctgattttcgcttcgaaaccatcccagatggccttcctccctcggatggtgatgtcagtcaagacataccctctctttgtgactctctcagaaagaacttccttcaaccctttcgtgaccttcttgccagacttaaccattctgccactactcccccagttacttgcttagtctctgattgcttcgtcacttttcctatacaagctgctcatgaacttggaatccctgtccttctcctttctcctctcagtgcagctgcattctggggttttatgcactatcgcactctggttgatagaggaatcatacccctcaaagaagagagttatctgacaaatggatatttggacaccaaagttgactgtattccaggtttgcaaaattatcgcctcaaggatctgcctgactttttaaggaccacagatccaaatgatttcatgctacactttttcattgaagtggccgaaaaagttcctagtgcctctgctgttgcttttaatacttttcatgagcttgagagagatgcaatcaatgctctcccctctatgttcccttctctttattccattggtcctttcccttcatttttagatcaaagtccacataaacaggtcccgtctttaggatccaatctttggaaggaagatactggctgtcttgattggcttgaatccaaggaacccagatccgttgtttatgtgaattttggcagcatcacagttatgtctgcagaacaactcttggagtttgcttggggtttggccaacagcaagaaaccctttttgtggatcattaggcctgaccttgtcattggt

SEQ ID NO: 7276 - DNA, 1764 bp, Glycine max
  misc_feature (26)..(26): n is a, c, g, or t
aaaaaatatctgaaaaaacatagaantagtcaattttatttgaaaaaatgatattcatccagccacacagatcgaggagcccccttttttgacgaaaaagtgtggtccaagagtcataaatatggtcattaagattaatatctacacattgcaagtgatatgctataaaatcagctacgtaggccccccccccggtagagcaatcctctagcttatgctcacaatggcttcgtcatcttgttctgctgccaccatccacttcatcctgctttcaatatccctcttctcagtttcctctttaccattaccagatgaatcaacttccaaaccaaaaaaaatcttcttcctgcccattaagatagacgcagcaaccaacatgttctacaccacaattggcattggaactccccaacacagcacaaatctagtgattgatcttggcggagaaaacctctggcatgactgcagcaacagacgctacaattcatcatccaaacgtaagatcgtttgtaagtcaaagaaatgccccgagggtgctgcatgcgtttccactggctgcattggcccttataaaccaggctgcgcaatcagcgactgtactatcacagtaagcaacccattggctcaattcagttccagctatacaatggtcgaggataccatattcttgtctcatacatacatccctggctttcttgctggctgcgttgacttggatgatggcctctctggcaatgctttacaaggtttacccagaacctctaaagggatcataggcttttcacactcagaacttgcattgccatcacaactagttttgtcaaataagcttattcccaagttttctctctgcttcccttcttcaaataacttgaaaggatttggtaacatcttcattggagctggtggtggccaccctcaggttgagtccaagtttctccaaaccaccccacttgttgtcaaccccgttgccaccggtgcagtgtctatatacggtgctccttctatcgaatacttcatcgatgtgaaagcaattaagatcgatggtcatgttcttaacttaaactcttctctgttgtccattgacaagaagggaaatgggggtaccaaaattagtaccatgactccgtggactgaattacatagttcactctacaaaccctttgttcaagagttcatcaacaaggctgaaggaagaagaatgaagagagtggcaccagtgccaccgtttgatgcatgcttcgatacaagcaccattaggaattctatcaccggcctagctgtgccaagtattgatctagtgctacccgggggagcacagtggactatatatggagccaattcgatgacggttatgacaagtaaaaatgtggcgtgtcttgcatttgttgatggagggatgaaaccaaaagaaatgcattcgattcaacttgaagcctctgttgttattggggggcatcagttggaggacaatcttttggtcatagatatggcttcctcaaaattaagctttagctcctcgcttttgctccgcaacgcaacatgttcccatgtttgagtcttttattagaccctgagattaccactgttcaataatgctccttctatctatctttcgcccctgtacatctcgtgtacaataaatcaagcctcctgtagtactgtgacttcaaatttcaatacttataattcgtactgtaaaaaaaaaaatgtttattctgccattgtattttccaggactagtaaaataaacatattgaacgg

SEQ ID NO: 7277 - DNA, 1168 bp, Glycine max
agcagctagagtcaagtagattaaagcttacccagatagaacaagaacttcaaagagcacgctctcagggcttgttcgtggattatggaggtgttggaagtactgtaagctctggagccgcaatgtttgacatggaatatgcaagatggttagaagaagatcacaggctaatgggggagctgaggaacgggttgcaagcaccgttatcagatagtgatatgagagtgatggtggatggatatctttctcactatgatgaaattttcaggctcaaggttgtggctgctaaatcagatgtgttccaccttatcaatggcatgtggacttcccaagctgaacgttgcttcctctggattggtggttttagaccctctgatctcatcacgatgttgattcaacagttggagccactagctgagcaacaaataatggggatgtatggcttgaggcattcctcacagcaagcagaagaagcactctctcagggccttgagcagttgcaacagtctcttgtggacaccatagctggaggcccagttgttgatggtgttcaacaaatggtccttgccatgagcaagcttgccaatcttgaaggatttgttcgccaggctgataatttgaggcagcaaactcttcatcagctatgtcgattactcacagttcgtcaagcagcacgatgcttcattgttattggagagtactatggacgtcttcgtgcccttagttctctttgggcatcaagaccacgagagaccttgatcagcgacgataactcatgccaaacaactacggaaatgcaaatagtccaacattctcagaattatttctcaagtttctgagagatgtaattaaaacccattagcctgaaagaagtttgctcgccataattaaggggatttcgttgggctgctttacaaatgaatgtcagcgtcttcctaaaagaaaaatatttatttattttttcttttcaatcttctatgctcccttgtgtctttatgttttattgtaaatgtaaatctagtttttatgtgcatgatgaggaagctcctactttagctgaagagaaatagaaaaaaaaaagtttgagtttaagagaaggtgcacgtggcatggatgtagataaagtctccatacaattgactctatcttctagttagctaatggctta

SEQ ID NO: 7278 - DNA, 1737 bp, Glycine max
cccacgcgtccgtacggcggcgagctgccgacgcccccccacttcttcgttttcgacgatccccttctccttctctctctctttttcgcctcattccattttcatctatcaatggctccagtagcagcagcatcttcagattcaatcaagccaagagatgtttgcatcgttggtgttgcacgtacaccaatgggtggatttcttggtactctgtcatctctatctgccaccaagctaggctctatagctattgaagctgctcttaaaagggccaatgttgatccatcccttgtggaagaagtattttttgggaatgttcttagtgctaatttggggcaagctcctgcaagacaagctgctcttggagcaggaatatccaattcagttatctgcactaccgttaacaaagtttgtgcatcaggaatgaaagctgcaatgcttgctgcacagagtattcaattaggcacaaatgatgttgttgtggctggtggtatggaaagcatgtctaatgtacccaagtacctggctgaagcaaggaaaggatcacgccttggacatgattcacttgttgatgggatgttgaaagatggtttgtgggatgtctataaggatgttggcatgggagtgtgtgctgagctatgtgcagataaccatgcattaacaagagacgaccaggataactatgcaattcagagttttgaacgtggaattgctgcccaagaaagtggtgccttttcatgggaaattgctccagttgaagtctctggtggaagaggaagaccatcaacagttgttgataaggatgaaggcctaggaaagtttgatgctgccaagttacgcaaacttcggccaagtttcaaggagactggaggttctgttacagctggcaatgcttccagcataagtgatggtgctgctgcactagttttggtgagtggagagaaggcactgaagcttgggcttcaagttattgcaaaaatcactggatatgctgatgctgctcaggaaccagagttatttacaacggctccatcccttgccattcccaaagctattgccaaggcggggttggagacttcacaaattgatttttatgaaattaatgaagcctttgcggttgtggctctcgcaaatcagaaacttcttggacttaactcggaaaaagtaaacgtacatggtggagctgttgcactgggtcatcctcttggttgcagtggtgctcgcattctggtgacacttttgggggtactgaagcagaagaatgggaagtacggagttggtggcatttgcaatggaggaggtggtgcatctgcccttgttgttgagcttcagtaagacctatttcatgttcagtagatgtccttttaagagccagcgtttgatgcaaagctcaaaagatcttgcctccctctttagcaagcgaacatgcaagtttcaaatttattacaaggacaagaccgaaagagagcgaaatttagctacatagttgttaggtttaagtcgcatcttgtgaaagtgaaattttcttggcatcaaagtagaacatgaaacaatattatccaaattttagttttctctgaaatgttattggcgtactttggtttggaatgaatcattataaaacctcttattccaagcacaagaatacagataaaaaaaaaacgcaaaatgtgttccagaactgaaattgccaaaaagagtggaaataaggaagttgtagttggtcttgcgtaagct

SEQ ID NO: 7279 - DNA, 1271 bp, Glycine max
ggtttcctgttcgccgacgcgtccgacgcctccgcgaagacgacacaagggggtatgaggtgagagctagaaactgaggacttagctagtagttagagatgcctgagttttgcgtgacaggtggtactgggttcatcgcatcttacctggtcaaggccttactagagaagggtcacacagtgaggaccaccgtgagaaacccaggggatgtggagaaggttggttttctgactgaactaagtggagccaaagagagactgaagattttgaaagcagatctattagtggaaggaagctttgatgaggcagtgagaggagttgatggtgtctttcatatggcgtcccctgtgcttattccttatgatgagaacgttcagcaaaatttgattgatccctgtataaaaggaactttgaatgtgcttaactcttgtgtaaaagcaactgtgaaacattttgtgctcacctcttcttgctcttccataagataccgtgatgatgtgcaagaagtgtgtcctcttaatgaatctcattggactgatctagagtattgcaaacgctataagctgtggtatgcatatgcaaagacaatagcagaaagagaggcttggaggattgcaaaagaaaatggcatggatctagtggtggttaatccctcttttgttgttggtcctctgcttgcaccacaaccaactagcacactgctcttgatactaagcattgtcaaaggcatgaagggagaatatccaaatacaacagtggggtttgtacacataaacgatgtggtagctgctcacttgctggctatggaggaccccaaggcatctggaaggcttatttgttcaagcacagtagctcactggtcgcaaatcattgaaatgcttcgtgccaaatacccttcctatccgtacgaaaacgagtgtagcagccaggaaggagataataacccgcacagcatggacactaccaaaattactcagttggggtttcctccattcaaaactcttgaacaaatgtttgatgactgcatcaaaagttttcaagacaagggcttcctatgacatctgttgttacctttcgtgttggtgtgaggtgtcagtgtcatatgacccaaactaactagctcataaaaccaaataaaagaatttaactttatcttttatctatgtatttattccttctttcttgtttccacaacttacattattattagcttcatcgattcatgttacaaaagatttaactcagcaaaaaaaaaaaaaaacttttggtcc

SEQ ID NO: 7280 - DNA, 1236 bp, Glycine max
ctgtgttgaaggtaaaccatgggaatctagtgaagttggagggattttgcatagacccagaagaagcaaattgctatctagtctatgaatatgtagagaatggatctcttcagctacgtaggcccccccccaaaaaagaaaagttgagctggaaaataaggctaagaatagccattgacattgccaatggtctccaatacatccacgagcacacaaggccacgggttgtgcacaaagacatcaagagcagcaacattctcttggactccaacatgagagccaaaattgccaattttgggcttgcaaagtctggaatgaatgccattaccatgcacattgtgggaacacagggctatattgcccctgaatatcttgctgatggtgtggtctctacaaagatggatgtgttcgcatttggggttgtgttgcttgaattaatttctgggaaggaagtcattaacgaggagggaaatctcttgtgggcaagtgccatcaaaacctttgaagtggacaatgagcaagagaagacaaggaggctgaaggaatggttggacaaggatattttaagggagacattctcaatggaaagtttgatgggtgctctcaccgttgcaattgcttgcttgcatagagacccgtctaagaggcccagcataatggatatcgtctatgcactgagtaaaagtgaagatatgggctttgatatttccgatgatgggattggttccccacgggtgatagctaggtgagatgggttgaggtactgacctatctggttttgtttttggtcagagaaccatttcgacatttttgtctaaagaaatccattttttttttttgtaatctctggttggggtggccttgatcctttttgtatgcgattaggttttcttgttgctatggatatgccgaccacgaaaaagggtatagaagaccacccccaataagtagtacttcgtgaagtagggcttttctgagcccaaaaataatgagtgtaataatcttaggctgtatatgtaactagtctctacctatgctagcacacagttatgttggtttgtacacatgttgtaaaacgatttgtttatatagtaactagcataatacttgtgcatttgcactgattatgctggattttatacatattttaatagatgtcttgaaacaaatcccctcttataataaatggttaagcaagaaaaaatttgagtcattggctaatatgctagtttgttg

SEQ ID NO: 7281 - DNA, 651 bp, Glycine max
aattagtcctctgaatcttttagagactcccctatataaacaccattcatgaatcacactctcactatctggctttggtttgatttctagaaaatgggtgcactagattacctctccaacttttgcactgtaaccagcactaggacaaagcagaaagcaatgcagacagcagagataaaagtgagaatggactgcgatggttgcgaaagaagagtgagaaatgcagtgagttcaataaaaggagtgaaatctgtggaggtgaacagaaaggagagcagggtggtagtgagaggatatgtggatccaaagaaggtgctgaagagggtaaggagcacagggaaagtaagagctcagttttggccatatgttgaacagcatctggtctaccatccttatgcccccggagtatatgaccgtagagcaccctccggttatgttagaaacgtcttccagccttcatctcatgcccaagacaactttctctcctttttcagcgacgacaacgtaaatgcatgttccatcatgtaatcatttctcttgtatcaattaacatgcttttttcagttcaattcacaaaaaaaaaagtgcagtgccatgctatctatatacacaaatattaatctgtctctttaacacactaaataaaacgtg

SEQ ID NO: 7282 - DNA, 684 bp, Glycine max
gcacgaggatgcacgtcggcagagtccagggcgggttctcctacagattcttcagcaactgcgattttggatcggaacctcttctgcggcgtagcaatgggacactccaacgtttggaattctcacccaaaaaactacggtcctggttctcgcacttgccgagtgtgtgggaatccacatggattgatcaggaagtatggccttatgtgctgcaggcagtgcttccgtagcaatgccaaggaaattggcttcatcaagtatcgctaaaagagctgttgtcacctacggaccaatattatgttctggcactaggatgttttgaagatgttatgtttgaagaaacttgagacttgtttttttcatctattttattatcagacataatgtgtggaacgaataatacttttatataaattgttttgcactaaaaaaaaaaaaaaaaaaaaaaaaaaaaaaaaaaaaaaaaaaattggcctctctgtttgatcctttaataattctgcattgcatgtgcatgcgtatcacacaggtgcaagcttatgctaacttgcattcgcattgtcgtttgcttttgtgggtgttgtacaaattagaatcatacgattttagtttaactgttactactgctcaaacaaaatttaagccgatggcaaaagctttttttcatcttgttattttaaggtt

SEQ ID NO: 7283 - DNA, 1333 bp, Glycine max
atcatgagaaatttttattggacataaaacaaacgaatcctcaagctattagctatagtagattacactgaaacattaaaaaactggaggttgatagttaatctatctgcaacagcaacattgtgacagtgacagtgtcgtaggatggagaaggtggtatgtgtgaccggcggcagcggctgcattggttcatggctcgtccatctcctcttggatcgcggctacaccgttcacgccaccgtccaaaacctcaacgatgaagccgagacgaagcatcttcaatccctcgacggagcgtccacgcgcctccgcctcttccagatggatctcctccgccacgacaccgtcctcgccgccgtgcgtggctgcgccggcgtcttccacctcgcctctccctgcattgtcgaccaagtccacgacccccagaaggagcttctggacccggcgattaagggaaccatgaacgtgctcacggcggcgaaggaagcaggggtgcggcgcgtggtgctcacgtcctccatctccgcggttacgccgagccccaattggcccggcgatgttgccaagacggaggagtgctggaccgacgttgaatattgcaagcaaaaggggttgtggtatccattgtcgaagactttagctgagaaagctgcttgggattttgctaaagagaatgatttggatgttgtggtggtgaatcctggcactgtgatgggtcctgttattccaccaaggcttaatgcgagcatggtcatgctcgtgcgccttctacaaggctgtgccgaaacatatgaggacttttttatgggatcggtccactttaaggatgtagcattggcacatattttggtgtatgagaacaaatcagcggctggtaggcatttgtgtgttgaagctatctctcactatggtgactttgtggcaaaagttgctgaactctatccagagtataatgtgcctaagatgcaacgagatacccagccgggattattgagaacaaaggatggagcaaagaaactgatggatttgggtttgcaattcattccaatggagaagattattaaggatgctgtagaggatttgaagagcaaagggttcctttcataaataatgctgctgctgctgctatttagaaccagagtgtaatgtttgcaatatgagtacttatgacacgagcctgtaatgtatagtctgtttcctctatgcctatgatgctatgcaaattggcgctgactcgatatgtattttcaatctgatgcttttttattaataaaaaataaaagctagaatagaccgggagaggttaaggacttgaataaaaaaaaaaaaaaaa

SEQ ID NO: 7284 - DNA, 854 bp, Glycine max
tcccacggctgcgagaaggcattccaccagtacagaaaacgcagttctcaccatttccctctcgattgtgagacttgttgttgttaactgaacttttctgagcaagaatgtctgggcgtggaaagggaggcaagggtttgggaaagggaggagcgaaacgacaccgtaaggtgctgcgcgataacattcagggaatcaccaagcccgcgattcggcgtttggctcgtaggggtggcgtgaagcgtatcagtggtctcatctacgaagagacacgtggcgtgctcaagatctttttggagaacgtgattcgtgacgccgttacctacactgagcatgctaggagaaagaccgttacggcaatggacgtggtttatgctctcaagagacagggaaggaccctctacggatttgggggctaggtttttttattttattgttaggttcttttgttttggaggctaatctggatttgagaaacccttgctgttatggatatagtaaaaagaaatggcaaggattgggtgtgggaagttgccggtggtgttgcagtaacttgtaatgcagtctttagctgttattgctggcaagtttgtaattgaatcactatatgttgctaatgttagaatcttggtattagtattattttcgcgtttggttattgttacctgaaattgtgttgtggacttgtgggtaatgagctagtggattgttgtttagtgatttagcgttttcgaaatggatttagttgaatgtgctagcaatgcagttttgcttggtcctctataggaccactttatcaggttggttcgcgtcgttattccctattagtgaaatattacttttgtaataaaaaa

SEQ ID NO: 7285 - DNA, 1286 bp, Glycine max
cacgcgtccgctcttcggcctcccctccccccccaatggcttcaatctctcacttcagaacctccgcgaattccttcctctcccaatacgaacctctctctctgcttctcgctcctctcctctctctcctcttcgctcacgctctccgctccttcttccacctcctctcccagaacggactcaaagccacgctcctagggtttctcattaactccctcaaattggtccctggcgtgaagggatacatagatgccgaaaaacaaaaggttgtggataagttgcaatctgatggtaaatctaaaagagaaggttggaaaactgagttgccaagcacaggattagggacatctgtccttgagaaaatgagagaggagaaaataaatgatgcggtttggcaaggcaaatgctctggtacagtctacattggaggaagtgaatctgatggacatttttctctgataaatgaggcatgttcaatgtttgctcataccaatcccctgcatttggatgttttcaagagtgttgcacgctttgaggcagaagtggttgcaatgacagcagcacttcttggaagtaaggaaaagagttctggacgacaaatatgtggcaacatgacgtcaggcgggactgaaagtatattattagctgtcaagtcatctcgtgactatatgaaatctaagaaaggaattacaagacctgaaatgattattcccgagtctgggcactcggcatatgacaaggctgcacagtattttaatatcaaactatggcgtgtaccagttaacaagaatttccaagctgatgtgaaagcgatccgacgtcatattaacaaaaataccatcttgattgttggatctgctccagggtttcctcatggagtaattgaccccattgaaataatttggcaatttcttccgtaggaacttggtcatctggcatcaagctttggtatttgtttccatgtggacctttgccttggtggctttgtattaccatttgctcgtgagcttgggtaccacattccaccttttgatttttctgttaaaggggtttcttcaatatcagtggatgtacataaatacggtttagctcccaaaggaactagcgtagttctttacagaaaccatgaaatcagaaaggcaaggcaatgatttactctaagtttttggctgtaactgatgaattattttcagtctttagtttatacctgaattccaaattgattatataattttttgtactattcatttttgctacttcttggaaacatctcacagaatatgaca

SEQ ID NO: 7286 - DNA, 798 bp, Glycine max
  misc_feature (690)..(701): n is a, c, g, or t
  misc_feature (705)..(705): n is a, c, g, or t
  misc_feature (708)..(708): n is a, c, g, or t
  misc_feature (729)..(729): n is a, c, g, or t
  misc_feature (747)..(748): n is a, c, g, or t
  misc_feature (764)..(766): n is a, c, g, or t
  misc_feature (774)..(775): n is a, c, g, or t
  misc_feature (788)..(794): n is a, c, g, or t
tccgccgccgggagacgacagaaggcgattggtaccgcgaaacgcacatttcactattcattctcgtttccctttcgactgtgattgtttgttaactgaacttttcgagcaaaatgtctggacgtggaaaggggggcaagggtttgggaaagggaggagcgaaacgacaccgtaaggtgttgcgcgataacattcagggaatcaccaagcctgcgattcggcgtttggctcgcaggggtggtgtgaagcgtatcagtggtctcatctacgaggagacacgtggcgtgctcaagatctttctggagaacgtgattcgtgacgccgttacctacactgagcacgctaggagaaagaccgttacggcaatggatgtggtttatgctctcaagagacaaggaagaaccctctacggatttggaggctagtttgttttttttttttttttttaatttttattgttaggtttcgtttgttttggaggtttatgtgggatgtaagagacccttgctattagggagatagggaaaaaaattgcaaggatttggtgtagtaagttgctggtggtgttttaggtataagggtttctataacatgtaatgtattgagctatattgctgccaagcttgtaattgtatcacaatatgttgctaatgtcagattcttgtttttctgtcccatttttattttgannnnnnnnnnnnaaanaanaaaaaaaaaaaaaaaaaaaanaaaaaaaaaaaaaaaaannaaaaaaaaaaaaaaannnaaaaaaannaaaaaaaaaaaannnnnnnttgg

SEQ ID NO: 7287 - DNA, 700 bp, Glycine max
gcacgaggcctcgtgccgaatgcgccaggcgcacatttcactattcattctcgtttccctctcgactgtgattgtttgttaactgaacttttcgagcaaaatgtctggacgtggaaaggggggcaagggtttgggaaagggaggagcgaaacgacaccgtaaggtgttgcgcgataacattcagggaatcaccaagcctgcgattcggcgtttggctcgcaggggtggtgtgaagcgtatcagtggtctcatctacgaggagacacgtggcgtgctcaagatctttctggagaacgtgattcgtgacgccgttacctacactgagcacgctaggagaaagaccgttacggcaatggatgtggtttatgctctcaagaggcaaggaagaaccctctacggatttggaggctagtttttttttttaatttttattgttaggtttcgtttgttttggaggtttatgtgggatgtaagagacccttgctattagggagatagggaaaaaaattgcaaggatttggtgtagtaagttgctggtggtgttttaggtataagggtttctataacatgtaatgtattgagctatcttagctgttattgctgccaagcttgtaattgtatcacaatatgttgctaatgtcagattcttgtttttctgtttaaaaaaaaaaaaaaaaaaaaaaaaaaaaaaaaaaaaaaa

SEQ ID NO: 7288 - DNA, 1684 bp, Glycine max
gtgtacgtaatgacagcagcacttcttggaagtaaggaaaaagatttctggacgacaaatactgtggcaacatgacgtcaggcgggacttgaaagtatacttcttagctgtcaagtcacctcgtgctctatgaatctagaaggaattacaagacctgaaatgattcttcccgagtctgggcactcggcataatgacaaggctgcacagtattttaatatcaaactatggcgtgtaccagttaacaagaatttccaagctgatgtgaaagcgatccgacgtcatattaacaaaaataccatcttgattgttggatctgctccagggtttcctcatggagtaattgaccccattgaaataatttggcaatttcttccgtaggaacttggtcatctggcatcaagctttggtatttgtttccatgtggacctttgccttggtggctttgtattaccatttgctcgtgagcttgggtaccacattccaccttttgatttttctgttaaaggggtttcttcaatatcagttgatgtacataaatacggtttagctcccaaaggaactagcgtagttctttacagaaaccatgaaatcagaaagcatcaatttgttgctgttaccgagtggtctggtgggctgtatgtatctccaaccatagctggaagcaggcctggaagtcttattgccggtgcatgggcagcgatgatatctctagggaaagaaggttacttgaaaaatacaaaagaaattatggaagggtcaagaagaatacagcaaggcatagaggagattgctgagttgtttattgttggaaaacccgacatgacgatagtggcttttggatccgacgttctagatatattcgaagtcaatgatgttatgtcatccaaagggtggcatttgaatgcattacagcgacccaacagcatccatatctgtgtgacactgcaacatgtgccaattgttgaagactttctcaatgatctgaaggaatctgtgaaaactgtgaaagcaaatccaggtccaataagtggaggcctagcacctatatatggcgccgcagggaagatgccagatagaggcatggtccaggaattgctggtagattatatggacggtacctgctaatggcgttcgacatttctaccagacttttctggcgacatgtactgtagtggacctttacttgataatattccattttatagtgcattctttcatattggggagaaaactgaagactaataataaggccttgtttgtttgtgtgtgtgccattgtacgtttaagaggccacgttgttttagattcacatctgagcattattatcatggatgggtggggggggagttcgttgctatttcacaatcttgctcttgacattgaggacagtaatatttctgaaacccccataaccaaaaataatgcacatgtgattgattgtacaaaaacaaaatgtacgtgtgattgataatcatcataaatataagggtgaaaatcagggttacagaccagtgtaatgcttatccatcagtccacaataagagctgggcatggataggaacagtatttttgtcgtgatgataaaaaaatttggagggaatcttactttgttctccttgatgagtaattacattacattgtcatcctttctaattttaaaatgtttttcttgtgagacataaa

SEQ ID NO: 7289 - DNA, 1902 bp, Glycine max
ccggaacacgcatatgtagctcctgatccgtttagagagacacaagctggggtccatttttcaaatggagcctggaatttgattcacccacagaacaagccgcgtgtgattgaggatggtgtgatgcagggttctgtaacagccacaggattgagggagaagaggagttatctcatgaatgatatgtcacatgaagaagagagaagcaacaagctttcttctgtctactccgatgattcggagccatctagcatgtttgatgaggtgctgctttgtaaggatggtaagagtccatccattttttatgctggccgtgaaccatcaccatcgcagattgctgactcaggaggatctaatgggaagaaaacacgatcaaagagaggttccaataaggggacaagggcaagcgtgacgacggtggatttatggactttgctaattcaatgtgcacaggctgtggctagctttgaccaaaggactgcaaatggaacacgggagcagattaggcagcactcttcaccttttggcgtcggcctcctgcgccccccccccttcttcgccgatggcctcgagaaacggttagctgctgggacaccaaagttcatttcctttcagtcagcatctgccgcagatatgttgaaagcataccgagtgtatatctcggcatcaccatttctaaggatgtctaatttcttggcaaaccgcactattctgaagctagcgcaaaatgaaagcagtcttcacattattgactttgggattagctatggtttccagtggccttgcctcatccaacggctttcagagaggccaggcgggcctccaaagcttcttatgacaggaattgatcttccccagccgggatttaggccggcggaaagggttgaggagacggggcggtggctggagaagtactgcaagaggtttggagtcccatttgagtacaattgccttgcacagaaatgggagactataagacttgaggacctcaaaattgataggagtgaagtaactgtggttaactgtttgtacagattgaagaacctttccgatgaaaccgtgactgcaaactgtccaagagatgctttgctgaggttgatcaggaggatcaatccaaacatcttcatgcacggggtcgtcaatggcacttacaatgcaccatttttcgtgacaaggttcagggaagcactcttccacttctcatcattgtttgacatgtttgaagttaacgtgcctcgtgaagatccatctaggcttatgattgagaaaggggtgttcggaagggatgcaatcaatgtgatagcatgtgagggggcagagagggttgaaaggccagaaacctacaagcagtggcaagttaggaaccagagagcagggttcaagcaacttccattggccccagagcatgtgaatagagtgaaggaaatggtgaagaaggaacatcataaagattttgtggttgatgaggatggcaagtgggttttgcaaggatggaaagggcgaattctttttgctgtttcctcttgggttcctgcttgaggaatgaccaactcctaacccactcattggcaaggaaaattgttttaggtgtaaggtgcactaagggtatatttatccttgaatagaagtgaatcatgatcatattttgtttctatttgaatagtgaaaataccctcttatatgtgcacttttatgaacaagagtagaagacttaaactcctctgaaatcactgattttagaaggatatctaatatccacattaatgtactagttttctagtgatgcctaggagcaacatagaaagaagttggtagttattataaatcttcatttgcttaatgctcactgctgtactctaaactttattttctcgtttatgttacaagtggtgaatcattccc

SEQ ID NO: 7290 - DNA, 513 bp, Glycine max
ttccgggtctagagatttctttcttaatagcgggtcttcagactcgagacctcgcaggtcgttgttttttccttctctgcagaagatggggttctggactctgctagaaggttttctgctctttgcaaatgcattggcaattttgaatgaggaccggttccttgctcgaagaggatggacattggcagaaatgacaggaccacaaaggaattctcttaaagggcaagtaatagggcttatatatgcctgtcaattcttgagacttccccttattctcttcaatgttatcaccataattgtgaagctgttctctggatagcttaaaaagagtggtatcatgctttatgctttgttctgtgtatgatatgtaaattttatgttcgtgaacaagttgcaattctacaaattcaattcagaggcataatgaacagagtacaccagttgtattagtttttttattgaatgtgtcctctgtcttgattatcattcccaaaaacaaaaaaaaaaaaaaaa

SEQ ID NO: 7291 - DNA, 1025 bp, Glycine max
ggcaggaggaccgatacagagggatgaagaaagttgggcctaacgtgtgaagcccagcaagtgcaggagttcgggtctgcggcccggatctgcgcctgcatctaacagagaggagagtgaagttttgtggtgtggtttagtgtcaaatggcggcgagtagaagcacttttcctctgatgaaatacttgagagtgcgcgtcgacgctcttccccgcaacactcccttaaccctcgctcccaactttttgattcgccgcttctgtgaagaggttaggggttgttttctcgacaagtctgaggtcacagatcgcgtcatttcctgcgtcaaaaacttccagaaagttgatccttcaaaggttaaccctaatgctcacttccagaatgaccttggattggatagtttagattcggtagagattgtgatggctcttgaggaggagtttgggttcgagattcctgataatgaggcagacaagatcaactccattaaacttgcagtggacttcattgcatctcatcctcaggcaaagtagtggaattcttttgtttctcaacatctagtttagatgatccatcagacatttttgcttccatagtggaactttgttttctcatccctcagaagggtgttagctggggatgtgccagcttcatttggcggtattggcatccagaacttcacattctgtgttcctcctatattcgtgtcaataagaattgtgttaaatttccgattatgaaattgtgaggtcttgagttgtcctcagcaacagatgcattatgctattctcttttgctctgttttctgttattacatcatccgtaataattttgcttttgtttaatctccatgcatcataattgaagttatacatttatactctgccagatggttcttatgtaatgagttgtttccgtgttaagaaagaactgctcttttagagttctaatccaaaaaaaggtgatttattgtgaaaaaaaaaaaaaaaaaaaaaaaaaaaaaaaaaaaaaaaaaaaaaaaaaaa

SEQ ID NO: 7292 - DNA, 744 bp, Glycine max
atcatccatctaacagaatcaaaaagaaaagaatagagaagagagtgaggtttggtggtgtggtttagtgtcaaaatggcggcgagtagaagcactttacctctgatgaagtacttgagagtgcgcgtggacgctcttccccgcaacactcccttgaccctcgcttccaacttgttgattcgccgcttctccgaagaggttaggggttgttttctcgacaagtccgaggtcacagatcgcgtcatttcctgcgtcaaaaacttccagaaagtcgatccttctaaggttaaccctaatgctcacttccagaatgaccttggattggatagtttagattcagtagagatcgtgatggctcttgaggaagagtttgggttcgagattcctgataatgaggcagacaagatcaactccattaaacttgcagtggacttcattgcatctcatcctcaggcaaagtagtggaattcgtgtataatttttcttttgtttctcaacatctagtttagatgacgcatcgacatttttgcttccaaagtggaactttgttttctcatccctcagaagagtgttagctggggatgtgccagcttcatttggcggtattggcatccagaacttcacattttgtgttcctccaatattcgtgtcaataagaattgtgtgttaaatttccaattatgaaattgtgaggtcttgagttgtcctcaccaccaatatattcttattcttatctaaattttt

SEQ ID NO: 7293 - DNA, 669 bp, Glycine max
tcgagtcagctacgtaggccctccccccccagtgttagttattagtttccacttgcaaatgggacgatcaccatgctgcgacaaggtaggtttaaagaaaggaccatggactccagaggaagatcagaagctcttagcttatattgaagaacatggccatggaagctggcgtgctttgccagcaaaagctggacttcagaggtgtggcaagagttgcagactaagatggaccaattatcttaggcctgacattaagaggggaaaattcagcttgcaagaagaacaaaccatcattcaacttcatgccctcttaggaaacaggtggtcggcaatagccacacacttgccaaagagaacggacaatgagatcaagaactactggaacacgcatattaagaaaaggttaactaaaatgggaattgaccctgtgacacacaagcctaaaaacgatgcacttctctctagtgacggtcaatccaaaaccgctgcaaacctcagccacatggctcagtgggagagtgctcgccttgaagctgaagcaagacttgtaagagagtcaaaaatacgttcacattctcttcagcatcaacttgggaagtagttcttctacatttgcatcttcttcttctgcatcaacttcagcttcagctctcaataataataataagc

SEQ ID NO: 7294 - DNA, 999 bp, Glycine max
cccacgcgtccgcccacgcgtccatacgcctccgtcccgcccacccttgccgatcatcaaatcaaaaaccctaattcccaaattctctcatttatcaagtttcaaccaagaaaagcagcaacaatgtcgggtcgcggaaagggtgggaagggtttaggaaagggaggagcaaagaggcatcgcaaggtgctccgcgacaatatccagggaatcacgaagcccgcgattcggagactggcgagaagaggtggcgtgaagagaatcagtggtttgatctacgaagagaccaggggcgtgctcaagatctttctcgagaacgtgattcgcgatgccgtgacgtacacggagcacgctaggaggaagacagtgacggccatggatgtcgtttacgctctcaagaggcagggaaggactctctatggtttcggaggctgagggtttggccttctttggtggctttggtttgtgtaaatggaaggaatttgtgttttgtagtgattatatatgtacttggattatcttctgctcggtacatgctcaaggttcttctgttttttttttttaattctactagtaattgcatcctaattgttttgaattgaagtaaatttagtgaatgatgaatgttggatgttctatttctcacatttattattgttagtagtggtgtgggagagataacttttaagtgggttgttaatgctaatattaatttgttccttttttgctttcttacaactgggattgatgtggagaagtttgatagttgattcttgtggtgttattttgaaacattgtttcgtgttctttatcagcgaagaattgatagtttagttctgaagtgggtgtgttgagaatttgaactttttgctgaatttaacttattcaaacgcactttgttgttgttcaatgacgagaatggggcctggcttaagtgcagtcgtgttagttgaaaagtaatgtttttttcccatgggaattaacttgaagttcaatcta

SEQ ID NO: 7295 - DNA, 2319 bp, Glycine max
tcagctacgtaggccccccccccccttttgaatgaaaaagaaaagataaaatcaaatctagaggcctatggaatagaagacacatatttatcttttaaaaggactctgttagatggacctccagctgaagagggtctgaagaagcttgacagtttcaaccaatggatgagtaaagagcttggagatgtggaagaatcaaataaaccatccacttctggtggttattgggatacagttgaaactgaaaatgaggttggcaacacaactattccttcccaagggcacctggacacctatgtattggatccatctgtttcccatgatcagctttttagcattattgactattccccaagctgggcatttgaagggtcagaaattaaggttatcatttctggagaattcctaagaagtcaacatgaagcagaacaatgtaagtggtcatgcatgtttggtgaggtagaagtgccagcagtgatcattgcaaaaggtgttctttgttgtcatacacctccacacaaggctgggagggtacctttctatgtaacttgttccaataggttagcatgtagtgaagtgagagaatttgatttccaagtccactatactccagaagacactacaggtgagaatagaggaagcacttttgatacttttagtatccgatttggagaacttttgtccctggggcatgcctttcctcagaattcagattcaattagtgtaagtgagaaatctcaactgagaagtaaaatcaattctttattgagggaggatgatgatgattgggacaagctactaaaacttactcaagagaaagatttttctccagaaaatttacgggagcagctgcttcaaaatcttctgaaagataagttacatgcatggctccttcagaaaataactgaagaagggaaaggccctaatgtattagatgagggtggccaaggtgtgcttcattttgcagctgctcttggctatgattgggccctagaacccacaatagttgctggtgtgaatgtgaactttcgtgatgtaaatggatggacttctcttcattgggcagcattttgtggcagggagcgcacagttgctttcctcatctctctcggcgcagcacccggagcactgactgatccatgtccagaacatccttctggtagaacaccagctgacctagcttctgcaaatggacacaaaggaattgcagggtatcttgctgagtcttcactaagtgcacacctcacaactctcgatttgaacagggacgcgggagaaaattccggagcaaaagtagtccaaagactccaaaacattgctcaagttaatgatcttgatggtttatcatatgaactgtcattgaaagattcactggctgcagtgtgtaacgccacccaagccgcagctcgtattcatcaagttttcagaatgcaatcatttcagagaaaacaactgaaggaatatgatgatgacaaacttggattatctgatgagcgtgctctttcactcataaaaatgaatgtaaaatcacacaagtctggaccacgtgacgagcctgtccatgctgctgcaatacgaatccaaaacaaattccgcagttggaagggaagaagagaatttttaatgattcgacaacgcatagtaaaaattcaggctcacgtgagaggtcaccaggtcaggaaaagctgtgggaagataatttggtccgttggaatcttggagaaggttattttacgttggcgtcgaaaaggtagtggcttgcgtggatttaaaccggaggccaattctgagggaactatgatacaagatgtatcttcaacagatgatgactatgatgtcttaaaagaaggcaggaagcaaacagagcaaaggttgcagaaagccctagctagggtgaagtcaatggttcagtatccagaggcaagagaccaataccataggctgttgaatgttgtaactgagatccaagaaaatcaggtaaagcatgagagcagttctaacaattcagaagaaccgagagaattcggtgacctcaatgatcttgaagcattgttggacgaagatattttcatgcctacagcaacttaaaatttcattgttaaggggtgatttagaatttcacagctgagttaggtgatcaactgtctcactttgattgttatagtaaattagtaatcttaattctcattcttttgttgttaaggggtgatttgctaacatgtcacacaagaattaaaaaaaaaatgcataaccattaaaaccattcttacaatgcaaaataaacatgtcaggttccctatcaaaaaaaaaaaaaaaaaa

SEQ ID NO: 7296 - DNA, 1937 bp, Glycine max
attattgaacgatgttcttgtgcatcttccaaatcccgtttcccccccaccccgtccccccaaaagaatgatgttattttgaatgacatgtcttatattttcaggttttgagtgccaaaatagaggaatatgcaccaatagcgtatactccaacagtgggtcttgcatgtcagaactatagtggactgtttagaagaccaagaggaatgtacttcagtgctgaggatcgtggagaaatgatgtctatggtgtataactggccagctgagcaggttgatatgattgtagttactgatgggagcagaatcttgggacttggagatcttggagttcaaggaattggcattgccattgggaagcttgatctatatgttgctgctgctgggataaatcctcaaagggtacttccggtgatgattgatgttggtactaataatgagaagttactcgaagatcccttatatttgggattgcagcagcatcgtcttgatggggatgattatcttgctgtagttgatgaatttatggaggctgtctttactcgctggccaaatgtgattgtgcagtttgaagatttccaaagcaaatgggcatttaagttattacagcggtatagaaatacctacagaatgttcaatgacgatgtgcagggaacagctggagttgcaattgctggacttctaggtgctgtacgggcgcaaggaagaccaatgattgacttcccaaagcagaagattgttgttgctggtgctggaagtgctggaattggggttcttaatgcagcgagaaaaacaatggcaaggatgttgggtaataatgaagtagcttttgagagcgcaaagagtcagttttgggttgttgatgcacagggattaatcacagaaggacgtgaaaatattgatccagatgcccttccttttgcaagaaatttgaaagaaatggatcgccaaggactgagggaaggagcaagcctcgtggaagtggtcaagcaagtgaagcctgacgttctcctaggattatcggctgttggaggattattctcaaaagaggtactagaggccctcaagggttcaacatcaaccagaccagccatatttgctatgtcaaatccaacaaagaatgctgaatgcaccgctgaagaagcattctccattttgggtgacaacattatttttgcaagtggaagtccattcagtaatgtggatcttggaaatggtcatattggccattgcaaccagggaaacaacatgtacctctttccaggcattggtctcggaactcttctttcaggcgctaggatcgtctctgatggcatgctgcaggctgcagctgagcgtctggctacatacatgagtgaagaggaggtactcaaaggaattattttcccttcaacatccagaattcgagatattacaaagcaggtagccacagctgttataaaagaagcagtggaggaggacctagctgaaggatatcatggaatggatgctcgggagctgcagaaactaagcgaggatgaaatcgcggaatatgtgcagaataacatgtggagtccagagtaccctacattagtttacaagaaagaatgagtaacctgcagggttgataactacaatttccctctcgatgcatgtttggttcgatcaggttgttcacagaatcctgtttactggattagatgatttaaattctgaaacattatctcatagcatatttctaaaagtctagcaaacttgtattttatgtacatgatgcttcttttaaataaaaatgaaaagccaagattagtttttaatttactttttatttctgtagtgttatacttctgaatcacttaggctaatagcgaaggttttttcattttttttatggaaagactttgtatttcattcaaaaaaggagttatgtacatccaaaaaagaggagaccattcacct

SEQ ID NO: 7297 - DNA, 1443 bp, Glycine max
cttttgggatttttgaccttaatgtgtggcctgattggaattcctcctgcaaatggcccccgcccccgccctcccgtccgcccacgcggccgggcaactcttaaacatcagttgcttcgtaacaaactggtggtaaccgcacgaaaaagtatgggaaagaatgctagtttaggacagttatatggcaacatgctagatgcctacaatcaaatgcagacccctcttgtttaccaggacccctctgctcgagcacaaggactaagagaacttaaagaatcaaccattcaagcagctaccagtatgggaaacgtggatgccccagtagatgagactatatttgatgttgagaaagaaatagacgacctgcttcctgttgaggtaaaggaacagcgtctcagtaacttgcttcaatcaacaatggtgggaggatgcgttgcggccatgcctttactcaagaagatcccaacctcagtcctttggggttactttgccttcatggccattgaaagtttgccaggaaaccagttttgggaaaggatcctattactcttcactgcaccaagcagaagatacaaggtgcttgaggactaccatgctacttttgtagaaacagttcctttcaagacaatagcaacattcaccatttttcaaaccatttatcttcttatatgttttggactaacatgggttcctattgccggggtcatgtttcctatgatgatcatgctcttagttccggttagacagtactttctccctaagtttttcaaaggggtacaccttcaagacttggatgcagcagcatatgaagagcaaacagctctaccattcaaccttgcaacacactcggagtttggagctggtgcttctcaagttggagaaggtgaaatcctagatgaagttattactagaagccgtggagagtttaggcacactagcagtccaaagatcacaagctccaccccaacaccaagaactgatcctaaaagccatttaagcccacgcctctcatttagtgctcgcgtgggtgagttcaaaactgagcagagtccacgatctggtgcaagaggtcccctcagtccaaaggcaggagaagtgagattatcaaatctgggaagaagtccacttaatccagattcaaaacagcaggaccaaaactaataattaaacgtagaagattgcagtcatatgccttagaaggactttataggaggcttatttgttgctacatttccattctagtttgttctttaattttgcttgtcatggttgtaacttgtaaagtcctttcccttgtcccatattcgacagatatgagatatgtaacaaagtgtggcgctttcctatatcaattgtattagtgaatgttactatatttgtgcaaatgtatatcatcatcacaagtttgtttcaataaattgtgactagtttgagtcttgtatt

SEQ ID NO: 7298 - DNA, 1988 bp, Glycine max
gacaactgagaaaggcaagaagcagccgtgtgggtcacctcattggactgacttcaccgcagaaaggggacggaactgcacatccgcaattctctctctcccgataacgccacagcacagtttctttgtatttcacagtacaatcaaatcgcttgtccatctaaacatgggagaatatgcttcgagaaccaaccttagctactgtccagattatcgcattgacgaggactccatagatgacatgcctttaacaagtgaccccgaatgctatgacgatgatcgccatcttaaacgaacagggaccatttggactacaagctcccacataataacagctgtggtaggatctggggtgctctccttagcctgggcaatagctcagatgggttggattgctggtcctgtcagctacgtaggcccccccccagtcactttgtatacttcatcatttctagctgattgttatcgtactggtgaccccatattcgggaagagaaattatactttcatggatgcagttagcaccattctaggcgggtacagtgttacgttctgtgggatagttcagtacttaaatcttttcggaagtgcgataggatacacaattgcggcttcccttagcatgaaggcaatccaaaggtctcactgtatcatccaattctctgatggagaaaaccaatgtcatattccaagtatcccatacatgatcggttttggtgcagtgcaaattttcttttctcaaattccagattttcataacatgtggtggctctcaatagttgcttcagtcatgtctttcacctattccataattggtctcgttcttggagttaccaaaattgcagaaacgggaactttcaagggtagcctcactggaataagcattggaactgtgacggaggcccaaaaagtttggggtgttttccaagctcttggtaacatagccttcgcctattcatattctttcgttctccttgaaattcaggataccatcaaatctccaccatctgaagtaaaaacaatgaagaaggctgcaaagttaagtattgcagtgaccacaacattttatatgctttgtggctgcgtaggctatgctgcttttggagattcagcacctgggaacctgcttgctggatttggtttccataaactatattggcttgtggatattgctaatgctgctattgtaattcaccttgtgggggcataccaagtgtatgctcaacccctctttgcctttgtagagaaggagacagcaaaaagatggcccaaaattgacaaggaattccaaatttctattcccggtttgcaatcctacaatcagaacatatttagcctagtttgtaggacagtgtttgtgatcataaccactgttatatcaacgttgcttccattcttcaatgatattttgggagtgattggagcattggggttttggcctttaactgtctactttcctgtggagatgtatatattgcaaaagaggattccaaaatggagtatgagatggatttctctggaattgatgagtgtggtgtgcctcttagtaacaattgcggctggtcttggctcagtggttggtgtctatcttgacctccagtaatacaatccattcagttcagatcattaaactccacataacatctattgcctccttgggaatgtaagaaactctgagggtggtgatggttgtgatctctattgtatcatcatcttacaagtggtgctaactcaaaattatccctatgataatttaagaagagtcggcacttgaaataattgctgcccaatgtattttagatacttctagtctgcattttttcattattttgtaccaatagaagtggtacgtcaaaatgattaaataagttgtagtaatttactatgttatattgcttatgcaatttgtttgtatttttatgagatttgtaatttaatctaaatattattttttccgtattggatatatgttaattgtattgtcttag

SEQ ID NO: 7299 - DNA, 917 bp, Glycine max
atacttttgactttctaatgttctacctcgttccctcagtaattcctcatacatataatacttagtagacgacagaagggggatgagcaacaaaaaaattaaattcttatcatttacagaatatggagtcccagacttccacacgagagaaggagtctctcaatctcagggaagtcccagaagcagataaaaccttgggcttggacatggccaagggcagcgcattctgcaagatgggtgaaggttggacatgcatcataactaaaactgaggggcctgatgctggcaaagttttcgttaaatgtggtgaaaattgcacctgtaccattgagggcgaagcagtgtcccaagaattgaatttgccacctgatgttgtgagcagcagtggcagtggagcattctgcaagtgtggtgaagggtggagttgtgtcattttcaggactgaaggccctgatgcaggctctggcaagggctttgctgaatgcgctggacagtgttcttgtactattgatgacaaatccacctaagataaacgatgagtgcatctatgatataatctgatggttatttttctcttgattctgctacaggtttgtaaaattaattgtattgaagaaggggacaattatgatcagtagtatgtgtggtcaagtgtatgtatgatatatatactatgatggttggtttacttccactttgatacatgtttgtaacataagttgtatggaagaagtgagtgaaccatcttcagtataatgtgtgatcagtaataaaggaaatgaagggactgccatgactattatgcttgatccgtattagtttgtacttaattgcttttcagttttaggaattattgcttaataatatgctccatttgtttttttattggagtatattcattactccattcataattc

SEQ ID NO: 7300 - DNA, 1528 bp, Glycine max
acgaggctccactctcattttagtgtgctactagtgatgtcagttatataagggtggtgaaggggatagttcccacttgtgaatcatcattaccaaacttctctacaaaacaaaaccaacccccccctccttaaggccttaacttttgagtcaaaatttatcatttcaaagcactctccaatagagataagtttgattcatccatcccagttggttggttgtaacccggctctggcactgttaaaggtttcaatctctcattgttgccagcttttgtgtacatgccagtttatagcaacctttaccacttcttttaaaccaaaacaataagcttttttcccttcattgttgtctcagaaaaaaaatggccccttctggaaggacaacaacagcatcaacaaggacaacctcaaagacgacaacaacaacaagaagaacaagacagcagagaagaacaacagcaacaacaacaaacttcaagaagaagcagcacaacacaaagagcaacaacaaaaaacaacaagaacaggttcttgttccaactgttttgccctctagctgcagctcctcctccataagctcacaagactcttctaattcaaaggaagtggacaacaacatgcatggttctgccgaggtgattgatgttgtttgcaacagcaacaccaacagtccatgttccacaccaaagggtcagaaattcaggattcctgagatttcaacatgccctccagcaccaaagaagccaagggttctctccaattgctctttgcgtaggtctccactctcattctttgcaccccctgacttggagcacttcttctttgtggcacttagagatgtctcggtttgattttgtgtgttaatagaagattaagaaagatacatgtgttatagtaataagatcataacactttagaagatggacttttgaagtggttttttagtatattattatgtacctctagcaaatcacagaggtatgtatgctttgagaactttagatgttggtgtgtgttcatcttaggaaaatagttactctttaatttctgctaattttaacaatttctagggtttgccagtcactaaatttagctggggtggctctccaactaaatttggattttaagcttactttttttctcccttttcctcttatagaagacatgttctgacctttaagtgtgtgctgagtgcaaatgtaatgggtttggtttaaggtttgtgagtgttcaagcttgcaactctacaaagcttcagttgtcaattagagaaagtaaagtcatacactttccttttgtatgcaaaaatctctttattttcatcttcttcaacttctaaatgttgcatcacttgttggtagtgattaatgatcattttagtttccaccagtttggtgcttttgtttctatgctactgcttagaaacactttgcggggatttattcattcatggagaccccaagttaggtaatagttagcatcatgccattctatgcatcactacaataaatcattgcagaactagt

SEQ ID NO: 7301 - DNA, 1338 bp, Glycine max
acggctgcgagaagaccacagaagggggttcttttcatgcatgtgttgaatgcacatgctggtctccggtccggttagggcatttctgggaccttaaatcaccaatttctcacccaatcaattccaattaagctgagagtgtttctgatctatatgtgatgggtgctccgaagcagaaatggactgcagaagaggaacaagcacttaaagccggagttgtcaagcatggtgttggtaaatggcgcaccatactgaaggatccagagtttagtagtgtcttgtacctgcggtcaaatgtggatctcaaggataaatggagaaatctgagtgtgatggcaaatggatggagctctagggaaaaatctaggttatcagtcagaagggtgcatcaggtcccgagacaggatgagaactctatggctatcactgctgttgctccaagtgatgaagaaattgttgatgttaagcctcttcaagtttctagagatatggtgcatattcctggtccaaagaggtctaatttaagtttggataaacttataatggaagcgatcacttgcttgaaggagaatggtggttctaataagacagctattgcagctttcatagaggaccatcgcaagtatagaattgcacctatagcagcatattctgacagaagaagaaactcatccgtgttatatttggaagggaggcagaaagcctctatgaaaattgacagggatgagaccaacatccttactagatctcagatagatttagagttagaaaagataaggtctatgactccacaagaggcagctgcatttgctgctcgagcagttgctgaagcagaagccgccattgcagaagcagaggaggcagcaaaggaagcagaggcagcagaagctgatgcggaggctgcacaagcttttgcagatgctacaacaaaatcagcgaaagggagaaaatccccaaagaggatccatgcttgatggaagtttgaagaattagactcgaggagagatgaacggtggaattgagtaggacagccagccagctaaatatcatttgctggtatagtctatagtttgcaatattggaggctcttgtgactatgcaagtttcacctttattaggatatatttttggatattgaaatatccttcttgtagatagaaccattgtttgaatctttattgtaatttctttatagctgttgttaccttagcgctctgtccatgtacttgttgtttatagaaagtagatgtttagatgaatgggaattcgtccaaaaaaaaaaaaaaaaaaaataaaataaaagcggccgctccacccgacccaagaataagaaagaga

SEQ ID NO: 7302 - DNA, 1561 bp, Glycine max
atgtatctgttgaatgcacatgctgttgggtctctggtccggttagggcatttggcgcgggatgcaaacaaatctgggaccttaaatcaccaatccaatcccaatcaattcattttcctccaattccaattaagctgagagtgtttttgatctacacgcgatgggtgctccgaagcagaaatggactgcagaagaggaacaagcacttaaagctggagttgtcaagcacggtgttggtaaatggcgcaccatactgaaggatccagagtttagtggtgtcttatacctgcggtcaaatgtggatctcaaggataaatggagaaatctgagcgtgatggcaaatggatggagctctagggaaaaatctaggttatcagtcagaagggtgcatcaggtcccgagacaggatgagaactccatggctatcactcctgttgttccaagtgacgaagagattgttgatgttaagcctcttcaagtttctagagatattgtgcatattcctggtccaaagaggtctaatttaagtttggataagcttataatggaagcaatcactagcttgaaggagaatggtggttctaataagacagctattgcagcttttatagaggaccaatattgggcactgccaggcttaaaaagtatgttgtctgcaaaattaaagtttttgacagcaagtggaaaactgatcaaggtaaatcgcaagtatagaattgcacctatagcagcatattctgacagaagaagaaactcatccatgctatatttgaaagggaggcagaaagcctctatgaaaattgacagggatgagaccaacatccttactagatctcagatagatttagagttagaaaagataaggtctatgactccacaagaggcagctgcatttgctgcccgagcagttgctgaagcagaagccgccattgcagaagcagaggaggcagcaaaggaggctgaggcagcagaagctgatgcggaggctgcacaagcttttgcagatgctacaacgaaatcagcgaaagggagaaaatccccaaagaggatccatacttaatggaagtttgaagaattagacatgaggagagatgaaccgtggaattgagtaggacagccagccagctaaatatcatttgctggtatagtctatagtttgcaatattggaggctcttgtgactatgcaagtttcacctttattaggatatatttttggatattgaaatatccttcttgtagatagaaccattgtttgaatctttattgtaatttctttatagctgttgttaccttagcgctctgtccatgtacttgttgtttatagaaagtagatgtttagatgaatgggaattcgttcaaatttcttctgaaaaaaaaaaaaaaaaaaactcgagactagttctctctctctctccctcgtgccgaattcgcacgagggagagagaacgcggccctctaattgtgtctcagtgctcttaaatggcttagttctaatgcaattcccaccctcattccacaacccattctcaaaatgagatggagcaaatgtcctaagaaacc

SEQ ID NO: 7303 - DNA, 790 bp, Glycine max
atcgacggctgcgagaagacggcagaccggggtctgcgcctgatttctcagttctctcacacactcattcggtgctccgaatctcagattctagggttagggttcccaatttctccaccgatcagaaaatgagttcaactggtggttctaccaagggcggaaggggcaagcccaaagcctccaaatccgtttcaagatcgcagaaagctggtctccaattccccgttggaagaatcgctcgattccttaaggctgggaaatacgccgagcgtgttggtgctggtgctcctgtgtacctctctgcagtgctcgaatatctcgctgctgaggttttggaattggctgggaatgctgctagggataacaagaagaatcgtattgttcctaggcacattcagcttgctgtgaggaacgatgaggaactgagcaagcttttggggtctgttaccattgccaacggaggtgtcttgccgaacattcaccagactctgcttcccaagaaggctggaaaggggaagggcgaaattggatctgcctctcaagagttttagggtttttgttttacccatttggactatagttttgattttattgcgtttgtaacatacatgtttcggttattttctacatgtcttctctgagaaattaggtgcttctcagtctgatgaactggatggtgtattatcacttttgaatcagatgtgaatgtgaagtgctatttggattaaaaaaaaaataaaaaaattttataaagaaacccccgcataagctggcgcacattgctttttac

SEQ ID NO: 7304 - DNA, 794 bp, Glycine max
ccggaattcccggttcgggatctgcgcctgatttctcagttctcacactcattccgtgctctaaatctcaaattctagggttagggttcccaatttctccgccaatcagaagatgagttccaccggtggttctaccaagggcggaaggggcaagcccaaagcctccaaatccgtttcaagatcgcagaaagctggtctccaattccccgttggaagaatcgctcgattccttaaggctgggaaatacgctgagcgtgttggtgctggtgctcctgtgtacctctctgcagtgctcgagtatctcgctgctgaggttttggaattggctgggaatgctgctagggataacaagaagaatcgtattgttcctaggcacattcagcttgctgtgaggaacgatgaggagctgagcaagcttttgggatctgttaccattgccaatggaggtgtcttgccgaatattcatcagactctgcttcccaagaaggttggcaaggggaagggcgaaattggatcagcttctcaagagttttagggtttttgttaggcctatttggactatagtttttattttattgcggttgtaatatacatgttttggttaatttttagatatctgctctgaggaattaagtgtttctcagtcttttgaactggatggtgtaatctcacttttgaatcggatgcgaatatgaagtggtatttggattatttttaatgggttgtgaatgaaaataacgttacctgttgagatcgtaaaaaaaacaaaaaagggcgaccgcaaaaaaaaaaaa

SEQ ID NO: 7305 - DNA, 1298 bp, Glycine max
actagtgatcccccggcctgcagaattttttttttttttttttctttttgctatcgagtggctgaactataatatgggagaaaaacacttatagttacaatgatagtacagctccaaagtccaaacacaaaaagctgctaaccgcagcaactgcatagaacaactgaactaaaccataaaccaggtaagaacaaaagccaaaaatctatcttaacttagaccgctttggcatgctactgcttagactcgctcctcgtgacttaccaaagctttttgcctttcttcttttcctatcttcttcactgtcagactcatttcccttctccctatctgcattgctagcttccctctccagttcctcccatgtttttcccttctcttcctctgaatcctcctcggaatcttcatcgtcatcatcatcctcagactcaacaagtgattcactgtcagaagcttcgtcctccgaatcagattcaggttccacatcagatggttcgtaacctttatcagactcctccgagttctcagattctgaatcagtagcttccaaattcagaaactcccaaccgccaccttcaataaagctctgagggtcatccgttattgtcttcaggatctgacgccagttcagattcagcctgctctcataatatttgatgtctgttgtgtcaagccactccttgatgccatccagtgatgtagaagggatagaatcaatcctgaggacatccctcttgaagtccttaaatactactgtcatatcaaagtttttctgcccaagtccaactctctcaagattaacaatctcaatctcactaagcgtgacaacaaggaaaggagtctctatcagttcaacaaggcaggcagaagtaggtacgataaatactgaagatttatgaggcacaccagggaagccaagctctctaagaggttgatcaaactccaggtcaaggccattgaattgaggttgtccccagagatcattcacccgattcacaaaggtttggaattctacattaattttattcttcctctgtcgctctcgctgttcttcttcaagctcatcagggtcatacgttgacctcttaccacccccaacattctggaccatgtccataacctcaacataaaattgaacgtccttggtcttcttattccctaccataatatggttgtgcagatggaagtgtaggagagtgatcatttcattctcagcgggttggaaaaatgcatgcttaatgttgggaaacattatggggggggggcctacgtagctgactcgagggggggcccggtac

SEQ ID NO: 7306 - DNA, 851 bp, Glycine max
ttcgtcccacgcgtccgacggctgcagaagacgacagaaggacactgctacaaaaacattgaaagaaatagaaaaagcaaaactggtttctcgcatttcctccgaaacaaaccgtttcgctcgtttctcggatctgcaatggaagccccacccaaaggcgctgctggaagaagaggtgacaggaagaagtccgtttccaaatccatcaaagctggcctccaattccccgtcagccgcgtcgccaggtacttgaagaaaggccgttactctcgccgccttggcaccggcgctcccatttatctcgccgccgttctcgaatatctcgccgcagaagtgttggagctggccgggaacgctgcacgtgacaacaagaagaataggattaaccctaggcacgtgttgctggcggtgaggaatgatgatgagctggggaaactgcttcaaggtgtgactattgctagcggtggagtgttgccgaacattaacccggttttgttgcctaagaagagtaccactgcgccttctgagaagtcctctactcctaagtcccccaaatctcctaagaagaaatagaagtttcattttgtaaaggcttatcgttttttattttttttttttggggggtaggggttggtaacattaccatatatatatatatagttcttaggttaggtgaaatatgatggtgtaatttagcgccaggtgttcgcttttttgctttttttggtcaccccatcgatggctgaatatgatgttaaatgtagtgggttgccaattcgtgtatggaagaagcctttttcatttaaaaaaaaagtttatttattactcggtgggcgggcccgtacccattc

SEQ ID NO: 7307 - DNA, 2000 bp, Glycine max
  misc_feature (1983)..(1983): n is a, c, g, or t
  misc_feature (1992)..(1993): n is a, c, g, or t
  misc_feature (1998)..(1998): n is a, c, g, or t
gatggaagttgagaatgcaaaactgaaagctgaacttgctggtagaatagctttaatatgtgcgctctgtcctgagttagagtacgagtcattggatgatgaaagggtgaataatatattgaggaatgccgcagagaagacacaagaagccttgcatttgaaagatgaatatattaaacatgttcaatccatgcttaagatgaagcagatgctatgcgtgtcctatgagaaacgtattcaagaattggagcagaaattgtcagatcagtatgtgcaggggcagaagatgtgtaggcccccccccaaaatgatacggctgactttcctcttgtggctgggaagacagataattacaaatcagaatctatcagtggtgaagccaacatgccttgcatatctacttctgagcccatggatgaggtttcatgcatctcaagttccttggatgcaaaacttggtttgttcacagaacatactggtaaagcgttagatggggtggatgaaaacatgctggattcctctggagttcagaacccgcagttggattcatctatgatggagccgcatcgcgaagaagcacagagtgctgataaagataaaaaaggcaagataatagtacaattgggcatgtcactgacaaacagttctactggtgagaacatgcctgtgtcacatgatcttgtaccttgtgactcagcagtttgtcaagacttggaatccaaagtaaacgatgaaaaagtgttggagctacaaagtgcacttgcagataagtcaaatcaattgaatgaaactgaaaccaagcttaaaactgttatggaggaggttgctgtgatcagaagggagttagaagcaagtcaaaaactacttgatgaatctcagatgaattgtgctcacctggaaaattgtttgcatgaggcaagagaggaagctcagacacaaaaaagttctgctgacaggagggcctctgagtatagtttactgcgtgcatcggttattaaaacgcacagcttttttgaaagactcaagacctgtgtttattctcctggtggtgtggctggttttgcagattccctgcgtaatttggcgcaatctttggccaattctgctaatgacagagatgatgacgatattgctgaattccgaaaatgcattcatgtattggctgatagagttggtttcatatctaagcaccgggaagagctgcatgagaagaacacaagaacagaagctgctaacgaacagctgcggaaagaattggaggagaaaatcgaccaggtcaaaacttattacaataagcatcaacttgaaaagcaggcaaataaagagaagatttgttttggttgcctggaagttcacgatatagctgcctttgtgctcactccagctggtcactacgaggcaattactaggaactgctctaactactacttatctgatgaatctgtagccctgtttgcagaccgtcttcctaccagacctaactacattgttggacaaattgtgcatattgaacgccaaattgtgaagatgccgacgcctcggcctgagcacggtggggctgataaatttacccctgacaaggggactgactggttgaccttgaattcaggctcaactccaaacccttacggtctccctgttggctgtgaatatttcctagtgacagtagccatgttacctgataccaccattcattcatcctctccttcctgatcctgcttcatccctggcagattagacgtgatggaagaatttaattgtacataaactacattcaaaatccaaatgctcttttcttatggtcggttaaccatttgtacagctgatgaaccaatttagtttcaatcttcctcgtgtacatatttctaccctttatgataatgtataaattgtgaatattatttacaacttgtttatttgcacgtttgatattttcaaagaaaaaaaaaaaaaaaaaagtctgcctgccccggggatcactangtctgaggnngccgncc

SEQ ID NO: 7308 - DNA, 954 bp, Glycine max
gaaaacctcaaccaacaccagcttaagctgaggtcgactaaagcaacctagctgtggttagttaaaaagggctagctctctcgtccgacggctgcaagaagacgactggggggggagctattggtacgcacgctaatgttgggagttatacgagctcgaacgtggttgcgatattcagagccccttcttcaaccatggaaggtagggttctcctctttgtccgccattgacggccgtaaacaccaccttctgaatctgcaggagatcgagacagttctgaccgacgttaaagctgacgacgttaaggtgataccagttcccaagcactgcgattgggctgatttcatggtactcgccactggcaggtccacctggcacgtcaagaacatcgctcaagccctaatttacaaggctaagcagaaacagagaggagttgaacgaatgatgctaccgagtgtggaaggtcaagcaggaggaaagtggatcgtcattgactctggtaaagtgatagttcatgcactcgatgaaaaggctagagcttactacaatttagagggtctttggacccctgggggaattcaaaatgaacatgatgaggatttacaaaaggctttggtgaaggttcgtcggaaaaacaattcaaagaaacctgcacaaaagaatgcttaattggagtttctatgcaataggggctaaagatacctgcacaaaagaatgcttaattggtgtttctatgcaagagggctgcaaataaccttttaaaactgtggtttctgactctgcattagatgtaattttacttgttctgaatacaaatttttacaggttgtcttgctgcaatgccaaagttacaaaaaaggtagagctgaagaagttttcatgttgtcctacaatcgttttttaactgaattggtcgtaaaattgatgaagagttaatttacggtttgtaagttt

SEQ ID NO: 7309 - DNA, 752 bp, Glycine max
aggtcaaagaaacacattgttcattgcagtaatagtagtgactagtcgttattaattatatccctaatccatggaataaaaaaaaaaaaaaaaaactcgagactagttctcgcacgaggcctcgtgccggaattctgaatcagaagaagcgagcgaagatgtcgggtcgtggaaagggaggcaagggtttgggaaagggaggagccaagaggcacaggaaggtgcttcgtgacaacatccagggtatcaccaaacccgcaattcggcgtttggctcgcagaggtggtgttaagagaatcagtggtctcatctacgaggagacacgtggcgtcctcaagatcttcctcgagaacgttattcgcgacgctgttacctacaccgagcacgctagaagaaagaccgttaccgctatggatgttgtttatgctctcaagaggcagggcaggactctctacggtttcggtggttaatttctagggtttccatcggcgtagcagctgcttattggttattgttgtaaatggttgctttttaggcttcttgttatatttgcttcaattgtaatggaacaaagagtattttgtttctggtatttgaatcttaatggttgaagttctcttaattgtcatggttactctgattatctgctagttaattgcgacttaagagaaaatttgtgttaattttggtagctgtaccctttacatagcaaatataccttttgtttaattttgcagtaaaaaaaaaaaaaa

SEQ ID NO: 7310 - DNA, 1679 bp, Glycine max
  misc_feature (1665)..(1679): n is a, c, g, or t
tcagctacgtaggcccccccccccccccgctgtcgacaccaagaaacgtcgcagtcgtccatacaaacgctgcagcaaccactatcttctcaccacgtggccctgaaaatgccctttgaatgtcagaactttcgtcatccaccacgcgtcgacccgagaaagatgctctcagaaatgcactctctctctttctctctccagaacacaactcaacacactcttcaatttcaaacgcacactcttcaacttcactgtccctccctttttaattgaaaccaaagcaaacctcgctttctcagtttctctttcttagggttttctccaccgtccattgcaaagtcttgcgcccaatttccatggaactgtaaagagaggatagttagaagattaaatcttaaagcagtaagtcatcatggataaatcagagcagactcaacagcagcagcagcaacaacagcatgtgatgggagttgccgcaggggctagccaaatggcctattcttctcactacccgactgcttccatggtggcttctggcacgcccgctgtaactgctccttccccaactcaggctccagctgccttctctagttctgctcaccagcttgcataccagcaagcacagcatttccaccaccaacagcagcaacaccaacaacagcagcttcaaatgttctggtcaaaccaaatgcaagaaattgagcaaacaattgactttaaaaaccatagccttcctcttgctcggataaaaaagataatgaaagctgatgaagatgtccggatgatttcagcagaagctccggtcatatttgcaaaagcttgtgaaatgttcatattagagttgacgttgcgatcttggatccacacagaagagaacaagaggagaactctacaaaagaatgatatagcagctgctatttcgagaaacgatgtttttgatttcttggttgatattattccaagagatgagttgaaagaggaaggacttggaataaccaaggctactattccgttagtgggttctccagctgatatgccatattactatgtccctccacagcatcctgttgtaggaccacctgggatgatcatgggcaagcccattggcgctgagcaagcaacactatattctacacagcagcctcgacctcctgtggcgttcatgccatggcctcatacacaacccctgcaacagcagccaccccaacatcaacaaacagactcatgatgactatgcaattcaattaggttggaaagtagcctgcaccttttgattattacaaatttacttaatgcctttcagccagctgtagtttagtgttgtgcattgaaaaaaagcaaaagattgttttgaggtttcttgcactcatttatgattgtatgagctcttgtgatgagttacttttggttgtgtttactattggtgtagtggttaaattatttggcagctgtccataaccagagagcgtagctgcttaattaggaggtttgatatgatgaaatagtttgtattgttattgcagaaggtaggtttaattcagtattccattctactgcaatggctgaatttattgctcatctgcatagtactagttgatgttttttcctgtgactcgttatgtgttagagtgcgaagaagaataagtgtgccataaaaaaaaaagnnnnnnnnnnnnnnn

SEQ ID NO: 7311 - DNA, 1668 bp, Glycine max
ttacggctgcgagaagacgacagaaggggcctccctttttaattgaaaccaaaccaaaccaaaccaaaccaaacctctctttctcagtttctctctcttagggttttctcctcccccattgacccaccgtccatcgcaaaggaagtcgcgcccaatttccatggtttgtagattaaatcttaaagcagtaagtcatcatggataaatcagagcagactcagcagcaacatcagcatgggatgggcgttgccacaggtgctagccaaatggcctattcttctcactacccgactgctcccatggtggcttctggcacgcctgctgtagctgttccttccccaactcaggctccagctgccttctctagttctgctcaccagcttgcataccagcaagcacagcatttccaccaccaacagcagcaacaccaacaacagcagcttcaaatgttctggtcaaaccaaatgcaagaaattgagcaaacaattgactttaaaaaccacagtcttcctcttgctcggataaaaaagataatgaaagctgatgaagatgtccggatgatttctgcagaagctccagtcatatttgcaaaagcatgtgaaatgttcatattagagttgacgttgagatcttggatccacacagaagagaacaagaggagaactctacaaaagaatgatatagcagctgctatttcgagaaacgatgtttttgatttcttggttgatattatcccaagagatgagttgaaagaggaaggacttggaataaccaaggctactattccattggtgaattctccagctgatatgccatattactatgtccctccacagcatcctgttgtaggacctcctgggatgatcatgggcaagcccgttggtgctgagcaagcaacgctgtattctacacagcagcctcgacctcccatggcgttcatgccatggccccatacacaaccccagcaacagcagccaccccaacatcaacaaacagactcatgatgaccatgcaattcaattaggtcggaaagtagcatgcaccttatgattattacaaatttacttaatgcctttaagtcagctgtagtttagtgttttgcattgaaaaatgccaaagattgtttgaggtttcttgcactcatttatgattgtatgagctcttatgctgagttacttttggttgtgtttatttgaggtactggtgtggtagttaaattagtttgtagctgtccataagtaaacagcgtagctgcttaattaggaggtctgaaatgatgaaatagtttgtattgttattgcagaaggtaggttttattcagtatttcattttattgcaatggctgaatttaatgctcatccgcttagtactagttgatgttttttcttgtcactcgttacgtgttgagtgtgaaaaaaaattagtgtgccattcttcacctgtttttgcacactacagccccggaagaacaaattgttccgatcattttcaattttttttcccggtaacatgaaaagtggttgatgttaaatgctgtccctgtaaaaaaaaaaaaaaaagaattgacagcaggaaaaaaaaaataacgagctgttctttttcttgattcaaaaccacataaatatatccagattagttttatagttaataattgattttattcggaag

SEQ ID NO: 7312 - DNA, 1973 bp, Glycine max
tcgagtcagctcacgtaggcccccccccccctttcaaatcctctcctctatagtctactgcactctgacactatcagatatcaatttcagaggcggagcctggaggctggagctgcttcaagtcttcaactatctgaatttctgaactcatccattcgttagcgcagctagaacgaaaactgagtaatggaaagtggagggaactcccttccatcagggtcagatggtgtgaagagaaaggtttcatatttctatgatccagaggttggaaactattattatgggcagggacacccaatgaaaccacacaggattcgaatgacacatgctcttttagcccactatggattgcttcaacacatgcaggttctgaagcctatggctgctaaagatagggacctttgcaagttccatgctgatgattatgtggcctttctgagaggcatcacccctgaaacgcagcaagatcaattgagacagctgaagaggtttaatgttggcgaagactgccctgtatttgatggtctttactctttctgccagacatatgcaggaggttctgttggtggtgctctaaagttgaaccatggagtatgtgatattgcaataaattgggctggtggtctacatcatgcaaagaagtgtgaggcttctgggttttgctatgttaatgacattgtgctggctattttggaacttctcaaaatacatgagcgtgttctgtatgtggacattgatatccaccatggtgatggtgtagaggaggccttttacaccactgacagggtcatgactgtttcgtttcataagtttggggattactttcctggaacaggtgatattcgcgatattggatatggtaaagggaaatattattcactaaatgttcccttggatgatggaattgatgatgagagctatcagtccttgtttaagccaataatgggaaaggttatggagatttttaggcctggtgctgttgtattacaatgtggtgccgactctttatctggggacagattaggttgtttcaatctttccataaaaggtcatgcagagtgtgtcagacatatgagatcttttaatgttccccttctattgctcgggggaggtggctatacaataagaaatgtggcacgttgttggtgttacgagactagcgttgctcttgggattgaactagatgataagatgcctcaacatgagtattacgaatattttggtcctgactatactcttcatgttgctccaagtaacatggaaaacaagaactcccgacatttattggatgaaataagagcaaaacttcttgataatttatctaggcttcaacatgcaccaagtgtcccattccaggaacggccacctgatgcagagcttctagagagagatgaagatcaagatgatagagatgaaagatgggatcctgattctgacagggaggctgacaatgacagcaatcctgttcgcagaagggtgaaaagtgaatgtgttgaagctgaggataaagatgcagtgttgggggtggactcaatggcagtggatgaaccatgcatcaaagaggagcaggataatttaaaagagctttctgatcacaggtcacgatgaagcaataataagcattattgatcaaccttctccttgactagtgtctggcgacctggaaattattaagtttcctcctaaagctggccggcattcattcatctgacatctgttgtgtttcaaattttttgcttgatctagaaactgaagacatatatggtgcaagcttgccttggcttttgatgtttaatattactgcaagatgaatgtagtagttattttttctgtatgttacactatggtaggagcctttgtcaagggagcagctcattgttggatccgttgagatgaagtaataacattcatcttgtgtttcattggaaaaatgattaaacaaaaaaaaaaaaaaaaaaaaaaaaaaaaaaaaa

SEQ ID NO: 7313 - DNA, 1094 bp, Glycine max
ttttacgtcagctacgtaggccccccccccgaacacaatactcttcaaacactttaccttcttcttaagacaacaagctaaaagcgcttctaacttaagtgatggctaacgctgctgaagtttcagcgttgaaacgcatcaagttgcatcttttgggtgaactctctccactggccactccccaaaacaaatttgaccaaacaaaccctagcccctctgaatcttccaattccgaatcttcttctatttctcttaaccactacttcactgacctcctcgaacccgaaattgaatttcctctcttcgaattcgattccaaaccccaagtaatcgacctcgaaaccccgaaaaccctaatttcagctgagaagaagcctcaatttaatcggaaaccgtcgctgctaatcgctgttccgaagaagaccgagtggatccaattcggaaaccctgaggtggcggcgccggagaaccagcctgagaagaagcactacagaggtgtccgtcagcggccgtggggcaagttcgccgccgagatccgcgacccgaacaagcgcgggtctagggtttggctcggaaccttcgacaccgccatcgaagccgccaaggcctacgaccgagccgccttcaggctccgcggctccaaggccatcctcaacttccccctcgaagttaacaccgcggcggagaccgtctccgtcgccgccgtcgacgtcgagaggaagcgccgccgcgaggaggaggaggtggtggtggaggatgtaaaggcggtggtgaagaaggagaaaataacggagcatgatgtgagttgttttagggggatgccgttaacgccgtctatgtggaccgggttctgggacagtgacgtcaaggatattttcaacattccgccgttgtcgccgttatctccttttggattttcaccgctcgtggctgtgtgaaattccaatttaggactgcgttttttcgtgttttagtacttacagcgtcctcctgttcagggatgagtacattgtacatttgacgaatttgtttattcaacaatcttttattcacttttatttgctaaaaaaaaaaaaaaattttttggaagtttg

SEQ ID NO: 7314 - DNA, 847 bp, Glycine max
tttgggaggggaaccaaatttccccccggaaaaaagttttggcccaggtttcccccaagcgcccaattaaccccccctaaagggaaccaaagcggggagtcccccccgggtggcggccgctttagaattagggatccccccggcctccaggaattcgccccgaggccagtcccaactttattgtgtcttagaacatcctaatcgaaacctttttcggtgcctctttcttcattaatcagtgtccctccttcccaaaataatacaaaagccaccaccaccaccatctttactctttactctttactctgccccgaaagtcacatttttcttttcttttctttttctctgaaagatctgtgactattattattattattattatttctgatttttgtgggaaaatggctgactgggcaccggtgttgatcggggtggtgctgttcgtgctgctccaaccggggctgcttttttcctttccgggaaacgggaagcagctagagtttgggagcatgaagaccaacggcaaggccattttcatccacactctcatcttcttcgccctctactccatcctcatcctcgccgttaaagtccacatctacaccggctgaaccggttcccgggcgggatctcaggtatcatttggtttggttactgagaaatgaaaggaaagaaaaacaccaccattgctgtaacaattgcctgttcttcttcttgtgttatccttttatggaaataaataaaaaaagcaaagatttttctatttatttagtaatggaaatgcatagatctgactaaaaaaaagaaaaaaattttacttttgattgattgaagtgtagttttgggt

SEQ ID NO: 7315 - DNA, 1044 bp, Glycine max
tacggctgcgaggagctcgagccgaactaggacacaagacgataacaaatggcatcatctcagtcgaggaagagagttgacgccgtcgattctcgcgctgcttccgttctcgttcgcgccaaagatggcagtgcttttgctcgttgcgacgattgcaagaagaatgtgccggttgcactcatcgacatgcacagttgcagccttgaagctaaaattaaaatgaacctagacgctcaagttgtggaacaggctgctgaagctaagaagccggagaggaagaagcccaaatctaaagagcctatggcaaaaaaagctaaagttgggaaggggaagaaagtcaaggatcctaacatgcctaagcgtcctcccacagctttctttgtcttcttggatgattttagaaaatctttcaaagaagctaatcctgattctaaggatgttaaaagggttggtaaagaggctggtgaaaagtggaggtctatgactgatgaagagaagaagccatatcttgacaaagttgctgagcttaaggaagagtacgagaaggctatggaaagctatgaagctggtcaagatgaagaagatcaaactgtgtctgataaggaaacttctgataaggaagctgctgcaaaagaagttgcaatagaagttgaagaggagctaactgacgaggactaatggttgcattatggcactccttgaacttgatagctattattctaagggccacataattacttaacgactagggttgtaaattttggaacatgttttagttggagttaaaaactgttgaaatccatgcgcaatatcttttcattttttgtaatgctctcttgtgatgttcgtgaatggtagtcacattgttttctacaagaggcttgttggtctcttttaggattgattattgcttgcatatgtttgagcctttgaggcaattggtaaatagtctgatggctacagcgatattcattggattgacatgtgcgttgcattgaataggagttgcttagctttgttggcttgattcaaaaaaaaaaaaaa

SEQ ID NO: 7316 - DNA, 690 bp, Glycine max
tcgagtcagctacgtacgacaattctcgaaaaaaaatagagaaaacacaaaaagttctgttctttttcccacccaattcagttttctcaaatggctcgtacgaagcaaacggctcgcaagtccaccggcggcaaggcgccacgtaagcagctggccaccaaggcggctcgtaagtctgctccggctaccggcggcgtgaagaagccgcacagattccgtccgggaaccgtagcgctccgcgagatccggaagtaccagaagagcacggaacttctgatccggaagctcccgttccagcgattggtccgcgagatcgcgcaggacttcaagaccgaccttcgatttcagagctccgccgtctccgccctccaggaagccgccgaggcctacttggttggtctcttcgaagacaccaatctctgcgctattcacgccaagcgtgtcactatcatgcccaaggatattcaactcgctaggcgtattaggggcgagcgcgcttaaatctaattattgattctctgtatagacgatttcaatttcaagcgttcttagttagaacttttgatttggttttcttgttgttgaggattctgtaatgctgctgtgatgttaacgctttattaatgaaattatcactttttgtcttccaaaaaaaaaaaaaaaaaaaaattaccccaaaaaaaaaaaaaa

SEQ ID NO: 7317 - DNA, 1497 bp, Glycine max
gaactacttttccctccaatttcgcttcaccacacatgcatggattctttgattttcatcttctctcagctacgtaggccccccccccccagtttttaatttttctccattgaagatagttgttaacagagtgttttgggagcttttgatatgtcgagtggatccgtgagacgggtttcccgtcaagatattcagttggtgcaaaatctcatagaacgatgtctacaactgtatatgagccagaaagaagttgtggaaacactactagctcaagcaaaaatagagcctggtttcactgaactagtttggcaaaagcttgaagaagaaaatgaagaattcttcaaggcttattatgcaaggttggttttgaagcagcaaataatgcaattcaacaaattgctggatcagcaagtgcaattaatgcagttacactcaagtgctgttgcatcactacctatgtctaacgggtcacatatccctgcagtgacatcactacctaactctaatgggtcacatatccctgcaatacctgagaatccagcatgctacacttcagaccgaacccaaacaagtttgaagccagaaaatatgcaacatgctgttgattccagattatctaatgtgtttaataatggcggttcatcattacatacaagtatgcctgctgcagttgatatgtctgttcatggcaataggattaatggccctgctagcgtgctttctgctcaaagcgcaaacatgggtctgatacaaggaatcaatggtggtggaatgatcaaatctgagcctggatattctggttgttctccttacatgtttggtactgatggaaatgtcctggagacacgcccaactattggtggtgcttcagtcacgtcattcactaatgttgagtccaactcacattctctgaatgaggcggtcctagatccagacacttcttcatttggatttctggggcagattcccagaaattttagcctttcagatctgactgctgatttttctcagagttctgatatactggagacctattctaggtcacccttcctagctacggataatgagaacttccttgacagaggagaacaagacaacaataggctggactccatatcagaaggcttgagttatgaagactttgggagtgagtgaatagttgaataccatttagtcatcaaactttcaggttgaacaaaatgcttaaaatgttgtacataaaactttagaggttttgaaattttaactgttggatgaacatatgcattggtgtgtagaacgtgcattcacctcattcttggtgatgggaaatgaaagttggaatgcttgcatggaagggaaagacttggtgcaaataaataataatcttttttcccttgtgtgtttggccttttgtactaataagcttattctacgttgtgttgatactagaattaatataattgtgttttgttgtttgtccgagaaaaaaaaaaataaaatttgttttttaggaaa

SEQ ID NO: 7318 - DNA, 426 bp, Glycine max
tacggctgcgagaagacgacagaaggggattgaaggtcaacttcaaatccctaatctctcaattacaactgcaactacttttccctccaatttcgcttcaccacacatgcatggattctttgattttcatcttctctcgcgttttctgattctgatcttagggttccttatcccccaactttattgcttcctcacgcgtctttatctttttttcttttcgttgatccaaccttttccactaaagcttcgattttttgctttttattttttttttatcttttttgtagtttgtttgtattgtttcgttagggaattaggaatcttcgattttcaagcgccgcttatatcctttgtttgctggtaattattatgggtctggtgtgtgtatgtggctgaagtttcgtgagaattttacttctttttctg

SEQ ID NO: 7319 - DNA, 3184 bp, Glycine max
ggcttctctggcgttgctccgcagaaagcttatcatcaccagaaccacactctcctactcgcacgtgcgcgcacgagccttctccgcgggaaacaacaaacaccgcatcgagaagattctagtagccaaccgcggcgaaatcgcttgcaggatcacgcggaccgcgcggaggctcggcattcaaaccgtcgccgtttacagcgacgccgacagggattcgctccacgtggcaaccgccgacgaggccattcgaatcggaccgccgccggcgcggctcagttacttgaacggagcctccatcgtcgacgccgcaattcgctccggcgcgcaggctattcaccctgggtatggattcttgtcggagagtgctgacttcgccaagctctgtgaggagagtggtctcacttttatagggcctcctgcgtctgctattcgagatatgggtgacaagagtgcatcgaagagaataatgggagctgcaggtgtgcctcttgtacctggatatcacggatatgatcaagatattgaaaaaatgaagttggaagctgatagaattggatatccagtcctaattaagccaactcatggtggaggtggaaagggtatgaggattgtacacactccagatgagtttgttgaatccttcttagctgcacaacgggaagcagctgcttcttttggcgtcaacacaatattgttggagaagtatattacacggccaagacacatagaagtccagatatttggggataagcatgggaatgttctgcatttgtatgagcgagattgcagtgttcagagaagacaccaaaaaataattgaagaagctccagctccaaacatttctgctgactttcgtgcacaattgggtgtagccgctgtttcagctgcaaaggcagttaattattacaatgctgggactgtggagtttatagttgatacagtctctgatgaattttactttatggagatgaatacacgtcttcaggttgagcatcctgttacagaaatgattgttggtcaggatcttgttgaatggcaaatccttgttgccaatggagaagctcttccattgagtcaatcacaagtacccttatcaggtcatgcttttgaagctcgaatctatgctgaaaatgttcaaaaagggtttcttccagcaactggagttctacaccattatcatgttccagtctcatctgcagtccgagtggagactggagttaaagaaggagacaaagttagcatgcactatgatcctatgattgctaagcttgtggtgtggggagaaaatcgtgctgctgccttggtcaaactcaaggatagtctgtcaaagtttcaggttgcaggtctgccaaccaatgtcaactttcttcaaaagcttgctaatcacagggcatttgcaaatggcaatgtggagactcattttattgataactacaaagaagacctctttgttgatgctaacaattcagtgtctgtgaaagaagcatatgaagctgctagacttaatgcatccctggtggccgcatgcctcattgaaaaagagcatttcatattggctagaaatccacctgggggcagcagcttgctccctatatggtattcttctccaccattcagagtccattatcaagctaagcgtagaatggaacttgagtgggataatgaatatggtagtggtagctcaaagatcatgaagcttaccatcacttatcagcctgatgggagatacctaattgagacaggagaaaatggatctcctgttttagaagtgaaagcaacatatgtaaaagataactattttagagttgaagctggtggtgtaatcaatgatgttaatgtagctgtttattcaaaggatcaaataaggcatattcatatttggcaagggtcctgtcatcattatttcagagagaaactaggcctggagctgtctgaggatgaagaatcccaacataaacccaaagttgaaacatcagccaaccctcaagggacagttgtagcacccatggcaggcttggtagttaaggttctagtggagaacaagacaagagtggaggaaggacaacctgtgttagtattggaagcaatgaagatggagcatgttgtaaaggcaccttcttctggctatgtgcatgggcttcaacttatggtgggtgaacaggtttcagatggcagtgttcttttcagtgtaaaggatcaataaaatcgcacttgacagctttacgccaagactttggcaagggggacattatctggaattctggatggatagttatacgcaggttaacaaccgaacacccgaacacctgggagttgattacttgcttaacaatctttgtaactcaatttttcaagttacaaaagttgaaatatactttacaataatgcaagtagttcctccagccattaataacaaagctgtaatttgcttcatgtttagatattcttccatcaacgggtcttcacctgccccttaaataaatctctaaaggggagatgcccacacgcctaaaatcatgtgatagtcggaacaccatattccaactacgaatccaagattcaattgtcttgggggaaacaagggtactaacttatggattcgtttcataatatacgcgtttcatgctagcaaagtgaagagccataattgaaacttttacattgttggtctaaaataatagtgccacactgcacgtattgatttttcacactattagattttgcctcgttaatttccaaattttgaagtcgttatatgcatacggtttgttggagcttcaaagggaactccaaatctgaaaaaaaaaacctagcgtttattaattgaagtgatgaccatacatccatcacatgcctgttgagttcaagcaacttgatctggaccactccagagggtgagttatttttcttcttctgaagactcaattgatcattaggcgagagattttgacgtgcttcatcagtacattatttatggcttttgatagatattagagatagattaactctcgttaaactaccaaaacaaagtactccgtactccacctttaccttaaagactgaatgaagtggttgatggtcggttcaggataaactttgatacacttttctctaattctagtctttaatttaggttatcactttgtatgttataactcgcctgtgcttcccaaacttgagt

SEQ ID NO: 7320 - DNA, 1582 bp, Glycine max
ccacgcgtccgtacccccgcgacagggcgcccgcccgcgactcacaccaaaatttgccaattgccatttcaatccccagtttcttcttcaacgtcctcttacgagcagatcccaattctccttcccagtttcaaaccctaattccctcattcccatggcctcagaagagcccactgtcgcggtggaacccgctcccgaacctgccaccgccgagcctcccccggaggagaaggaggagcccaaacctgaagccaaggctaagaaaaccaaggaacccaaacctaaaaaggtttccagaccacgcaaccctcccactcatccttcctacgaggagatgattaaagacgcaattacctcgctgaaggagaaaaccggttcgagccaacacgcgattgcgaagttcatcgaggagaagcacaagcagcttccaccgaacttcaggaagcttcttctctaccatttgaagaaacttgtagccgctggaaaactcgtcaaagtcaaaggctccttcaagctcccacctacccgaccttctgcatcttcttcttcttcgccggcgaagaagaagaagcccgcacctgctaagccccaacccaagcccaagcctaagcctaagcccaagcccgctgctaaagccaaggacactaaggcaactaagtcaaaggcaccagctaagcccaaggcagctgctaagcctaaagccaaagttccagccaagcccaagcccgcccctaaaccaaaggctgctgctgctgctgcttccaagcccaagcctgctgccgccaagcccaaagggactaagccagctgccaagcccaagcccaagcccgctgctaaaacaaaggctgctgctgccaagcccgcggcaaagcccaaagcgaagcccgccaaggcttcaaggacgtcgacacggacttcaccagggaagaaagcagctcctgctgcgaagccggcagcgaagaaagtagcgcctgctaagaaagcgccagtgaagagtgtgaaaccaaagagtgtaaagtctccagcgaaaaaggctacggctaagagagggggtaggaagtgagaatgtggtgggtagagtggttttagggttagttttgtgaagttctttgtcctcttggtggtgtagttggggttacagatgatcctataatatatgaaatctgattttatgaaacctttgttttttttttcttttatttagtttgaattttttctttggttcgaccttagggagtagattaaaaaaagcttctagctctgcttttcagctaaatgagttaatcataaaatgtatcttatagagtatgaggtttctctgcgttatagtacctttgatggatcaatgtagtataagcacctttttcacatgaatggatttgtagtatatgctttctgtgtatgaagtatgaaatttgcctttaagatgccattggtgtctctatgatatgagttgatatgcctgcatttgcttgattgaccttcttgtatgaattgattagcaattgattgtttgcatctcaacttcttccttggctttagttgattttttttttttcagtgcaatttctgtaatttcaat

SEQ ID NO: 7321 - DNA, 1480 bp, Glycine max
  misc_feature (1468)..(1468): n is a, c, g, or t
tacggctgcgagaagacgacagaaggggacaacaaaatttgccaattgccatttcaatcctcagtttctttcttcaacgtttccatcatacacagatcccaatcctctctcaagccctaatttcccctcatttccatggccacagaagagcccactgtcgcggtggaacccgctcccgaacctgcctccgccgatcctcccccggaggagaaggaggagaccaaacctgaagccaaggctaagaaaaccaaggagcccaaacctaaaaaggtttccagacctcgcaaccctcccactcatccttcctacgaagagatggttaaagatgcaattacctcgctgaaggagaaaaccggttcgagccaatacgcgattgcgaagttcatcgaggagaagcacaagcagcttccaccgaacttcaagaagcttcttctctaccatttgaagaagctcgtcgccgccggaaaactcgtcaaagtcaaaggctcgttcaagctcccacctaccagacctgctgcatcttcttcttcttcttcttcgccggcaaagaagaaaaagcccgcagctgccaagtccaagcctaagcctaagcccaagcccgctgcgaaagccaaggatactaaggcaactaaatcgaaggcaccagctaagcccaagccagctgctaagcctaaagccaaagctccagccaaggccaaacccgctgctaaaccaaaggcttctgctgctgccaagcccaagcctgctgccgccaagcccaaagccgctaaaccagctgccaagtccaagcctgctgctaaaacaaaggctgttcctgccaagcccgcggcaaagcccaaagccaagcccgtcaaggcttcaaggacgtcgacgaggacttcaccagggaagaaagcagctcctgctgctaagcccgcggcgaagaaagttgcggtggcagcgaagaaaacgccagtgaagagtgtgaaaccgaagagtgtaaagtctccggccaaaaaggctacggccaagagagggggtaggaagtgagaaagagtggtcggtggggtagggttgttttggggttggtgttgtgaagttctttgtcctcttggtgtagttgggggttacagatgatgttcctataacagatgaaatctgattttatgaaacctttgttatttccctttttagttttgatttttttttggttcgacctaggaagtagataaaaacaatgtttctagctatgcctttcagctaaatgagttaatcataaaatgtatcttagagtgtgaggtttctttgcgttatagtacctttgatggatcgatgtagtataagcacctttttcacatgaatggatttgtagtatatgctttctgtgtatttaaaaaaaaaaaaaaaaaaaaaaaaaaaaaaaaaggacaccagctcagaggaccaagaaaataaataaaaaaaaaaaaaaaaaaaaaaaaaaaaaaangggggcggcccc

SEQ ID NO: 7322 - DNA, 1349 bp, Glycine max
gcggggcacgcttctcaaaacccgcttcgcgggcccccccccctaaaaactacccttccctttcgtcgttctccgtctccctcatttgttcactttctctctctaaatccctaaaccagatctcgcactcgcgctttctctctctaggattcgacaatggcggccgctccctcgcctcgcgaagagaacgtgtacatggcgaagctcgccgagcaggccgagcgctacgaagagatggtggagttcatggagaaggtctccgccgccgccgacaacgaggagctcaccgtcgaggagaggaacctcctctccgtcgcgtacaagaacgtgatcggagcgcgccgcgcctcgtggcgcatcatctcctcgatcgagcagaaggaggagagccgcggcaacgaggaccacgtctccgtcatccgcgactaccgatccaagatcgagtccgagctctccaacatctgcgacggtattctcaagctcctcgactctcgcctcattccctccgcttcctccggcgattccaaggtcttctacctcaagatgaagggagattaccacaggtacctcgccgagttcaagaccggcgccgagcgtaaggaggctgccgagagcactctctctgcatacaaagccgctcaggacattgcaaatgccgaactgcctccaactcatccaattaggcttggccttgcacttaacttctctgtattttactacgaaatccttaactctcccgatcgtgcctgcaaccttgcaaaacaggcttttgatgaagctattgctgaattggatacactgggagaggagtcatacaaggatagcactctgatcatgcaactccttcgtgataacctcaccctttggacctctgacatgcaggatgatggagcagatgaaattaaagaagcagcaccgaaacaggatgaccagtaaaaatattttactgctaattagaattgaacttctcctccatatctttttgaagggagaaggtgtttgttgctaatatctctttggtactgagattttaggcattcatgtttgttatgattgtggatgtactgggccgtttttagtttgtccttccattttcaagtgttttccaaattgcctattttattaaggacgctgaagtttttattatatggaattggaattttaagattcttctcttctatctagtaaacttgatgtcacccgcttatattgtgaggattagatatatttgtattctttttgaagcctcgatatttaaatttagtttgattggaattgggtttgttctcgttgaactattttgagcattgtacacttcattctgatagaagtttctgctgttcgagatc

SEQ ID NO: 7323 - DNA, 568 bp, Glycine max
aaagggttcttcgtttctccctcgcgccgccgcctcctctctcgtcccggcgcgcttggagctcgacctacccgcgcgccgcccaccatgatcatctccaagaagaaccgcaatgagatctgcaagtacctcttccaagagggggtgctgtatgccaagaaagactacaacctggcgaagcacccgcagattgacgtgccgaacctccaggtgatcaagctcatgcagagcttcaagtctaaggaatacgtcagggagaccttctcgtggcagcattactattggtacctcaccaacgatggcatcgagttcctgcgcaacttcctcaacctgccatctgagatcgtgcctgccacgctcaagaagtctgccaggcctcctggccgccctctcggttctggcccacctggtgaccgcccaagggggccacctcgctttgagggtgacaggcctaggtatggtgacagggatggctaccgtggcggtcctcgtggtgcacctggtgactttggtggtgagaaaggtggagcccctgcagagttccagccatcattcaggagctctggtg

SEQ ID NO: 7324 - DNA, 813 bp, Glycine max
tcgtctcgatataaaacggctgcgagaagacgacacatggccacatcgcacatcaattattctttcgcaccttcgaaaatcaattttctgtcttctctgcgtcttcttcctctctcaatcgttttccatggctcgtaccaagcaaaccgctcgcaaatccaccggtggaaaggctcctaggaagcaactcgccaccaaggctgcaaggaaatctgcaccgacaaccggtggagtcaagaagcctcatcgctatcgccctggaactgttgctcttcgtgagatccgaaaataccaaaagagcacagagcttctgatccgcaagctccccttccagcgtcttgttcgtgaaattgcgcaagacttcaagaccgatttgaggttccagagtcacgctgttcttgcgcttcaggaagctgcggaggcttacttggtgggtttgtttgaggacaccaacttgtgtgcgattcacgccaagagggtgaccatcatgccaaaggacattcaactcgcacgccgcatccgtggagaacgtgcttaggctaataataagagtaataacgtagttgctgctgctttttttcgttttgcaatacatttcttgttttagggttatttttagtgttatgttccggtttgtctgttatgggatgtatagaagatagatatatcaatcaacaacttagcatttgtaatgatcctaaactgaaatatttgaataattagattcactttggccaaaaaaaaaaaaaaaaaaaaaaaaaaaaaaaaaaaaaaaaaaattttttttaaaaaaaaaaaaaaaaaaaaaaaaaa

SEQ ID NO: 7325 - DNA, 811 bp, Glycine max
aattcccgggccgacccacgcgtccctacggctgcgagaagacgacagaaggggacatcgcacaacattattctttcgcaccttgcagaatcaattttctctctcaatcgtctttcatggctcgtaccaagcaaaccgctcgcaaatccaccggtgggaaggctcctaggaagcaactcgccaccaaggctgcaagaaaatctgcacctaccaccggtggagtcaagaagcctcatcgctatcgtcctggaactgttgctcttcgtgagatccgaaaataccaaaagagcacagagcttctgatccgcaagctcccctttcagcgtcttgttcgtgaaatcgcgcaagacttcaagactgatttgaggttccagagtcacgcggttcttgcgcttcaggaagctgcggaggcttacttggtgggtttgtttgaagacaccaacctttgtgcgatccacgccaagagagtgaccatcatgcccaaggacattcaactcgcacgccgcatccgtggagaacgtgcttaggcttataataatgataatagcatagttgtcgccttttcgttttgcaatacatttcttgtttcttagggttttagtgttattttccagtttgttatgttttgtatagaagatagatatatcaacagcaacagcttcttaccatttgtagtgtgcctaaacggaaatatttgaataattagattcactttggccaattctcttgtggatttaatcaatattactttttcaagtttttgccactaaaaaaaaaaaaaaaaacccaaaaaaaaaaaaaaaaagcccct

SEQ ID NO: 7326 - DNA, 2299 bp, Glycine max
ataaagtgacatatattttgtacctataacttgattggaaaaagaacacctattatggaaggtgtgctgagcagagatgtcaacgaattatggttgctcatatgttaatgtcacattatttctggggtgattgataacaacatttaagacttcgttcacaatggggtaaagggtcagtttcccatttgactgcaactatataacactcgtaacaatttcacaaagttcataaaactttactataaacagtagtggagagagggagaaaaaccaaagaagattgaccatggcttcttcattgaggatctcaaggctcctctctcgttcttttctttctgcttccactactactcctttgttttctagaggcggaagtggtgctcttggtgcagggctcagtaaattcagcactgctgctgccattgaagaaccaattaaaccaccacttaaagttgaacacacccagctcttaattgatggaaaatttgttgatgctgctactggcaaaacttttccaacgttggaccccaggacaggagatgtgatttctcatgttgctgagggtgaccatgaagatgttgatcgagcagttgcagctgctcgcaaagccttcgaccgcggaccttggccaaagatgacagcctatgaaagacaaaggatattgctgcgtgctgctgatctgtttgaaaagcacaatgatgaccttgctgcactcgagacttgggataatgggaagccatatgaacagtctgctcaaatcgaaattccaatgctggttcgcctatttcgatactatgctggttgggcagataagattcatggtctcacagttccagctgatgggccatatcatgtgcaaacattgcatgaacccattggtgttgccggtcagatcattccgtggaacttccctcttgtcatgtttgcctggaaggttgggccagcattggcctgtggtaacaccattgttctcaaaacagctgagcagactccattatctgctttgtatgcatcaaagttgcttcatgaggctggactgcctcctggtgttctgaatataatatctggctttggtccaactgccggtgctgctattgctagtcacatggacatagataagcttgctttcactggttcaaccgaaactggaaaaattgtccttgaactggcggctagaagtaaccttaagcctgtaactttggagcttggtgggaaatccccattcattgtatgcgaagatgctgatgtagatgaggctgttgagttagcacactttgcattattctttaatcagggacaatgctgctgtgccgggtctagaacatttgtacacgaacgtgtgtacgatgaatttattgagaaagcaaaggcacgcgctttgaagcgtgctgttggtgatccattcaaggggggaatagagcaaggtcctcagattgattcagaacaatttcagaaaatactgaagtatattagatccggtgttgaaagtggagctactcttgaaaccggaggagatagatttggcaactcgggcttctatattcagcctactgtcttctcaaatgttaaggatgacatgctgattgcgaaggaagagatctttggcccagtgcaaagcatattaaaattcaaggaccttgatgatgtgattcaaagagcaaataacacacactatggccttgcagcaggggtgttcacaaaaaacattaacacagctaatactttgactagagcattgagagctggaacagtgtgggtgaactgctttgatacatttgatgcagcaattccctttggagggtacaaaatgagtggccaaggaagagaaaaaggagaatacagtctcaagaactacttgcaagtgaaggctgttgttacatccttgaagaaccctgcttggctttgaacatcattagctttagatttatttgatgaaaaagattaataaataggctccaataataaagataattaaattgggtttattccattcaaagtatctgataatgatgaatatgatctattttctttttctgtttttgcccctgcattttatgggtagcgcgaaatatactatggtgtaaaattcatcgtagaggtgaatttctggttggaatgggaatcaaatttgcataatgatggatgtaaacttcatattacttgttctcagaggacattgttcgtttttagtaaatggcagtgttatgattgaactgtgattcaactaacaacgattcagtatcaaaaaataagagttatttttggtagttatttcattcaaaaacacattgtatatatt

SEQ ID NO: 7327 - DNA, 1942 bp, Glycine max
ttctcgagccgaatcggcccgagcggcccgagctgacatggcttcttcactcagaatttcaagactcatctctcgctccttttcttctacctccttcttttcacgaggtgggaatggtttccttggttcaagacactgcaaatacagcacttcttctgccattgaagaagaacccgttaaaccatcagtgcaagtagaacacacccaactcttaattgatggaaaatttgtagatgctgcttctggtaaaacttttccaactttagatcctaggacaggtgaagtaattgctcatgttgctgagggtcactctgaggatgttgatcgagcagttgcagctgcacgaaaagcatttgatcatggaccatggcctaagatgacggcttatgaacggcaaaggatcttgttgcgcgcagctgatctgcttgagaagcataatgatgagcttgcagcacttgagacttgggataatggaaagccttatgaacaagctgctaagattgaagttccaatgcttgttcgcctgattcgatactatgctggttgggcagataagatccatggtctaacagttccagctgatggaccatatcatgtgcaaacattacatgaaccaattggtgttgccggtcagatcattccttggaacttccctcttctcatgtttgcctggaaggttggaccggcattggcctgtggcaacaccattgttctcaaaacagctgagcagacaccgttatctgctttatatgcagcaaaactatttcatgaggctggacttcctgctggtgttttaaatgtagtatctggctttggtccaactgctggtgctgctcttgctagccacatggaagttgacaagcttgcttttactggttccactgatactgggaaagttgtccttgaactggcagctaaaagcaatcttaagcctgttactttggaacttggtgggaaatccccctttattgtgtgtgaagatgctgatgtagatcaggctgttgagctagcccattttgctttattctttaatcagggacaatgttgctgtgctgggtctcgaacatttgtacatgaaagtgtatacgatgagtttgttgagaaagcaaaggctcgtgctttgaagcgtgttgttggtgatccattcaaggggggaatagagcaaggtcctcagattgattcagatcaatttgagaaaatactgaggtacatcagatctggtgttgaaagtggggcaacccttgaaaccggaggagacaagcttggcaacaagggcttctacattcaacctacagtcttctcaaatgttaaggatggcatgctgattgcaagggatgagatctttggtccagtccaatccatattaaaattcaaggatcttggtgaggtagttcaaagagcaaataacacacgttacgggcttgcggccggagtgttcacaacgaacatggacactgcctacactttgacgcgggcactgagagttggaacagtgtggataaactgctttgacacatttgatgctgcaattccctttggagggtacaagatgagtggtcaaggcagagaaaaaggagagtatagtctcaaaaactacttgcaagtgaaggctgttgttaatcccctgaaaaacccagcatggctttgagcaaacactagccttctttggataatcaataactatcagtgcctcaatgataatgatgataaaaataaaatcctgcttttttttttttttggcgttacacgagttatgagttatgacgttgttgatattttcctggtcttcatccttttatctcttttgtcaatttctattccttgcatttgtataagtcagaagagtgacacacttgttactcttatggtctaaattgagtttttaattatacgtgtttgaattggattattttaaaattatattttttttgtaagttttttc

SEQ ID NO: 7328 - DNA, 2133 bp, Glycine max
  misc_feature (1046)..(1049): n is a, c, g, or t
ggaggcccacgcgttcaggccatcgagctgcggcagcggatcctagagtccaataccatggaccatgggcgaagatgacagcctgtgaaagacaacggatatggctgcgtgctgctgatctgtttgaaaagcacaatgatgagcttgctgctcttgagacttgggataatgggaagccatatgaacaatctgctcaaatcgaaattccaatgctggttcgcctatttcgatactatgctggttgggcagataagattcatggtctcacagttccagctgatgggccatatcatgtgcaaacattgcatgaacccattggtgttgctggtcagatcattccgtggaacttccctcttgtcatgtttgcctggaaggttgggccagcattggcctgtggtaacaccattgttctcaaaacagctgagcagactccattatctgctttgtatgcatcaaagttgcttcatgaggctggacttcctcctggcgttctgaatgtaatatctggctttggtcctaccgctggtgctgccattgctagtcacatggacatagataagcttgctttcactggttcaaccgaaactggaaaagttgtccttgaattggcagctagaagtaatcttaagcctgttactctggagcttggtgggaaatctccttttatagtatgcgaagatgctgatgtagatgaggctgttgagctagcacactttgcattattctttaatcagggacaatgctgctgtgctgggtctagaacatttgtacacgaacgtgtgtacgatgaatttattgagaaagcaaaggcacgtgctttgaagcgtgctgttggtgatccattcaaggggggaatagagcaaggtcctcagattgattcagaacaatttcagaaaatactgaagtatattaggtccggtgttgaaagtggagctactcttgaaactggaggagatagatttggcaactcaggcttctatattcagcctactgtcttctcaaatgttaaggatgacatgctgattgcgaaggaagagatctttggnnnngtgcaaagcatattaaaattcaaggacccttgatgatgtgattcaaagagcaaataccacacactatggccttgcagcaggggtgttcacaaaaaacattaacacagctaatactttgactagagcattgagagctggaacagtgtgggtgaactgctttgatacatttgatgcagcaattccctttggagggtacaaaatgagtggtcaaggaagagaaaaaggagaatacagtctcaagaattacttgcaagtgaaggctgttgttacatccttgaagaacccagcttggctttgaacatcattagctttagatttatttgatgaaaagattaataaataggctccaataataaagatcattaaattgggtttattccattcatagtttctgataatgatgaaaataatctagtttctttttctgtttccccccctgcattttatgggtagagcgaaatatactatggagtctatggtataaaattcaacgtagagatgaatttctggttgggactggaatcaaatttgtataatgatggatgtaaatttcatattacctgttctcaaaggacattgttcgtttttagtaaatggcaatgttatgatttgaactgtgattcaacaaaaaaaaaaaaaaaaaaaaaaaaaaaagggggaaaaaattttttttttttaaaaaaaaaaaaaaaaaaaaaaaaaaaaaaaaaaaaaaaaaaaaaaaaaggggcggccggttttaaaggacccaagtttacttccccgtgcttgcaacgtaatattttttttttagggccccctaatttaaattaactgcccgtggtttaacaacgtcgggactggaaaaaccctggggttcccaaatttaatccctttgaaaaaaatccccttttccccagttgggttattaccaaaaaggccccccccaatcgcctttccaaaaatttgcccaccctaattggcaaatggaaccccccctgtaccggccctttaaccccgggggttgtgggggttacccccagggtgaccgttacatttgcaagccccttagcccccgttcttttggtttttttcctttcttttt

SEQ ID NO: 7329 - DNA, 1846 bp, Glycine max
agctaccgtgggcccccccccccggtcggcgaaaacactcacaaagacacagagtgcgttcgttgacgacaaacacacacaaacacacaacaaaagctcgccggaaaatctttctccggcgacctggaattccgacgaaggtagttgcggctccttcgtcccgaaactgaggccctcaaagtataaactttggtggtggtgggtaggatctggcggtgtatgatgggatcttgcatatgcccgttggagactccggcgaggttgctttggaccacaagcttcttccgtcataagcttatgatcttctaataattaataattcacgcacacaaacaaacaaacaaacaaacaaaaaacacttcataacaacaacaacaacccttctgaaattctcaacacaagtttcaaaaaacagagtaaaagaaacagagcaaaaacacacacacaaaaacacaaacacagacaccttttaagtattaaggtgtctctttctctccccggaaagtttctccgtcggcggtggtgattgaccggagtgccatggagtctggacggattttctttggtgcctctgcttcaagcggcaacaacatgctctttctcggcaacactgaacttgcttttcgagggagatcgattatgagcatggaggaagcctcgaagaggcgacctttcttcacctcaccggatgaactgtatgatgaagagtattatgagaagcagtcgccggagaagaagcaccgcctcagttccgaacaggtccatctgttggagaagagctttgaggaagagaacaaattggagcctgagaggaagacccagttggctaagaagctgggattgcagcccaggcaggtggctgtgtggtttcagaaccgcagggctcgatggaagaccaagcaacttgaaagggattatgatgttctcaagtcttcatacgataccctactttcatcctatgattcaattatgaaggagaatgagaaactcaaatctgaggtggtatccttaaatgaaaagcttcaagttcaagctaaagaggtgcctgaggaaccattatgtgacaagaaagttgatccaattccagtagatgaagatatggctccgattttcggcacaagggtggaggaccacctgagtagtgggagtgttggaagtgcggtggtggatgagggtagtccacaggtggttgttgacagtgttgattcatacattctagctgacaactatggtggatgtgtgggcccggtcgagagggttcagtcggaggaggaggatgggagtgatgatgggaggagttacttggatgtgtttgtggtatctgaaactgagcaccaaaaccatgaggaaggagagacattgggttggtggactaatatgtattatgttggataaaatggtaatgcagcagtgctttcgaaattagatgcttaattaagaaaacgtaataatattgtataatgtatcatgtgggcgagggaggaaaaagtaaacgcctggattgggtggcttggacccctaggaggagttgaagtgtccttaacccgagtttaataaataaagtctagtagtaatttggtcaatggtgtcttgtgttggttaatggttgtactgccaaaattaaagtaagtatatttcttgttcaagtattaaaacatggttaattagtactatacaaaatttgagctgtctcttttttttttttgaatccaattttcgaaaaccattttgccaacttaatcaaaataaaatcgggggtaaggcccccaaaaaaggcaaagccctccccattgtcttgtaacccgtttcgaatagggcctattagcaaaaattattttccccccct

SEQ ID NO: 7330 - DNA, 1432 bp, Glycine max
ggaaaaaatggcgatgctcaagagatgctgtagtagatcagaagtattgcgaacggcacatgcaccgacgtcgccccccccccccaaagcctgtggaaggccaatcaggccatgccctcaccaccactaacacacctaatgcttcctcaaactcaaccgtggtgcccggcaaccacaacaacaacacctttgcacacatcaatgtgcaccaccctcttcctcctcattcctctccagccaataccatcaataggatgtttatgagtaataataaagagaacaacaacacgagtgagaggatgaaggatggccttgcccttcccatgctacctcctactcttgagctgaaaccaaaggacaacaacaactctttcatggttcataaacaccaagaaccatatgatgaatcctcaaggaacaagaatgagtttggactcgtcacttctgattccttgcttaacccttcacagaaaagaagctttgattcttcttcttcttcttcacaaaaggatgattcttctgagtcccaacaacaacattccctcaggcacttcattgatgactctcccaaaccacagtctcatcataatcataaccatcgttcgtcgtcatctatttggcctgaactcgacaacatgcagtcagacaggactcagttatcaatctccataccaatatcttcctcagatcacttcatgtcatttgcaacttcctcgccctcgaatgaaaaactcacgttgtcgccactaaggctttcgagggagttcgaccccattcaaatgggattaggagtgggaagtgcctccaatgaagcaaacactaggcaagccaattggattccaatcacttgggagagttcaatgggtggtcctcttggagaggttttgaaccttagtaacaataataataacagcaatgcaagtgatcaatgtggcaagaacaacaacaacacttcagctctcaacctcatgaaagatgatgacgatgatgatgggtgggacaatagtcctcctccaatagggtcatcaccaactggggtgcttcaaaaaacagcatttggatcactttccaacagcagtgctgggagcagtccaagaggggcaccagagaacaacaacaaagaatagagatttctgatgattccttgttttcacgtttgaactgttttttgttgttgttgttcttcttcttcctcaaaaaattgtttgggaatggattggcgtttgtagaatgtgtggaccacaacaactcaacaagagttgtagctggctagctactgtctctttcactccaaagttcttcaaaatctttggtttcacgggtttgtactattgtctggttttatatttggaattgtttaacttgaaaaaattacttctgttttcatcttaacttttatattgttttcatgtaaataaaaaaaaaaaaaaaa

SEQ ID NO: 7331 - DNA, 525 bp, Glycine max
gggagaaggaaacggcggaaaacggcggaaacgacggtgatgacgatgccgcgccggagtatgattcgccggacagtgaaattaccgattcaggatctcaggaaatgcaacccagtgtgatgaacaacaacatatgttctaatcatgaagaatgcgaaggacgttcttcacagataaagctgacaaaaggtttcacagcaaaggagtccgtgaaggggcacatggtgaatgttgtgaaaggattaaagttgtatgaggatgttttctctgaatcagaaatctgcaagctgactgattttgtgaaggagattcatgctgctgcccagaacggggagctctcaggtgaaacttttatactgttcaacaaacagatgaagggaaacaagagagagctgattcagttgggtgttccgatatttggacagataaaggacgataccaaaaacaacatagagccgattccagcacttcttcatgatgtcattgatcaccttattcaatggaaattaattccagagtacaaaa

SEQ ID NO: 7332 - DNA, 1364 bp, Glycine max
  misc_feature (1280)..(1282): n is a, c, g, or t
  misc_feature (1291)..(1291): n is a, c, g, or t
agctatcgtagcaaagaaagaaagaaagaaaaccctagcttaccttttcaactttcaagatgcaaatcttcgttaagacactcactggtaagacaatcacccttgaggtggagagttcagataccatagataatgtaaagtccaagattcaagacaaagagggtatcccaccagaccaacagaggctcatctttgctggaaaacagcttgaggatggccgtacccttgccgattacaacattcagaaagagtccaccctccacctggtgctccgtcttcgtggtggcatgcaaatctttgtcaagaccctcactggaaagaccatcacccttgaggtggagagctctgacactattgacaatgtcaaagctaagattcaagacaaagaaggtatcccaccagaccaacagaggctcatttttgctggaaaacagcttgaagatggccgaaccttggcagattacaacatccagaaagaatctaccctccacttggtgctccgtcttcgcggtggtatgcaaatctttgtgaagacccttactgggaagaccattactttggaggtagagagctctgacacaattgacaatgtgaaggcaaagatccaagacaaggagggtattcctccagaccagcaaaggttgatttttgcgggaaagcagcttgaagatggacgcacgctggcagactacaacattcaaaaggagtctacccttcaccttgtccttcgtctgaggggaggtatgcagatctttgtgaagactttgacaggaaaaactatcaccttggaggttgaaagttcagacacaattgataatgtcaaggcaaaaatacaggacaaggaaggtatccccccagaccaacagaggttgatctttgctgggaagcaactggaggatggaaggactcttgctgactacaacattcagaaagagtctactcttcaccttgtcttgcgtcttcgtggtgggttttgagtttgagaatggtctgcaggtcccttgtttggtgtgaactgaagtatgtgaaagtctataatctggtcttttctttttttatgttcctgaactttgtgtatgtgtgcatcccgggtccattagcggaccttgaaaagctatgaatgtgtacaatttgcaatcatgttttaatgaatttagtactttcaataccttaaaaaaaaaaaaaaaaaaaaaaaaaaaccaaaaatttagaagtggattaatatctacatatgggcagacgatgctgcacattgtttttcattgcttgtgccggaaatnnnctttgacancttttggaagtaggttgaactttcacataaaatttcatcccttttatctatgtaaaccaacgggactattgcc

SEQ ID NO: 7333 - DNA, 2293 bp, Glycine max
cgtcccacgcgtgcgcccacgcgtccgtacggctgccagtagacgacaccagggggtaccaaaggcgaatagccattcgtattgtcgcagagaaagaaaaccctagctcaccgtttcaagatgcaaatcttcgttaagaccctcactggtaagaccatcactctcgaagtcgagagttcagataccatagacaatgtaaaggccaaaattcaagacaaggaagggatcccaccagatcagcaacggctcatttttgctggcaagcagcttgaggatggacgtacccttgctgattataacatccaaaaggagtccactctccacttggttcttcgtctccgtggtgggatgcaaatctttgttaagaccttgacgggaaagacaatcacccttgaggtcgagagctccgacaccattgacaacgttaaggctaagattcaggacaaagagggtatccctccagatcaacagaggctgatctttgctggaaagcagcttgaggatggccgtacccttgctgattacaacatccagaaggagtccactcttcatttggtactccgtctacgtggtggaatgcaaatctttgttaagactctgaccggaaagacaatcacccttgaggtggagagctctgacaccattgacaatgttaaggccaagattcaggacaaagagggtatcccaccagatcaacagaggctcatctttgctggaaagcagcttgaggatggccgtacccttgctgattacaacatccagaaggagtccactcttcacttggtactccgtctacgtggtggaatgcaaatctttgttaagactctgaccggaaagacaatcacccttgaggtggagagctctgacaccattgacaatgttaaggctaagattcaggacaaagagggtatcccaccagaccaacagaggctcatctttgctggaaagcagctagaagatggccgaaccttggctgattacaacatccaaaaagaatctaccctccacttggttctccgccttcgtggtgggatgcaaatctttgtcaagactctcactggaaagaccatcacccttgaggtggagagctctgacactattgacaatgtcaaagccaagattcaggacaaagaaggtatcccaccagaccaacagaggctcatttttgctggcaaacagcttgaagatggccgaaccttggctgattacaacatccaaaaagaatctaccctccacttggtgctccgtctgcgcggtggtatgcaaatctttgtgaagacccttactgggaagaccattactttggaggtagagagctcagacacaattgacaatgtgaaggcaaagatccaagacaaggagggtatcccaccagaccaacagaggctcatttttgctggcaaacagcttgaagatggccgaaccttggctgattacaacatccaaaaagaatctaccctccacttggtgctccgtctgcgcggtggtatgcaaatctttgtgaagacccttactgggaagaccattactttggaggtagagagctcagacacaattgacaatgtgaaggcaaagatccaagacaaggagggtattcctccagaccagcaaaggttgatttttgctggaaagcagcttgaagatggacgtacactggcagactacaacatccaaaaggagtccacccttcaccttgtccttcgtctcaggggaggtatgcagatctttgtgaagactttgacaggcaagactattaccttggaagttgaaagctcagacacaatcgataatgtcaaagcaaaaatccaggacaaggagggtatcccaccagaccagcagaggttgatatttgctgggaagcaattggaggatggaaggactcttgctgactacaacattcagaaagagtctactcttcaccttgtgttgcgtcttcgtggtgggttttaaaagtctgagaatgttctgtaggtgtcttgaagtctaagcatgtggaagttccgaagatctttgggtttttttttttaatgttcctgaaaggtttactcttgttaaattgtttccatggtcaatagtggcctttgaaaaactgttgtttgttctggtctttttataaattctgtttggttcgtgaatttgtgaagctaccttttatgaaatttagttctttgctatgaataagtacaatctgttgtcatgtttgatgaaatttatgttcaatatcttccgatttagcagcacaaatcttttaataatatctatataagcagatagaatactgtaattcgttttc

SEQ ID NO: 7334 - DNA, 1259 bp, Glycine max
  misc_feature (982)..(983): n is a, c, g, or t
  misc_feature (995)..(995): n is a, c, g, or t
  misc_feature (1042)..(1043): n is a, c, g, or t
  misc_feature (1083)..(1083): n is a, c, g, or t
  misc_feature (1094)..(1094): n is a, c, g, or t
  misc_feature (1099)..(1100): n is a, c, g, or t
  misc_feature (1164)..(1165): n is a, c, g, or t
  misc_feature (1168)..(1168): n is a, c, g, or t
  misc_feature (1172)..(1173): n is a, c, g, or t
  misc_feature (1191)..(1191): n is a, c, g, or t
  misc_feature (1203)..(1217): n is a, c, g, or t
  misc_feature (1221)..(1222): n is a, c, g, or t
  misc_feature (1224)..(1224): n is a, c, g, or t
  misc_feature (1253)..(1253): n is a, c, g, or t
gcccgcgaatccaaatatttaatcctatcctatcgtagcaaagaaagaaagaaagaaaaccctagcttaccttttcaactttcaagatgcaaatctttgttaagacactcactggtaagacaatcacccttgaggtggagagttcagataccatagataatgtaaagtccaagattcaagacaaggaagggatcccaccagaccagcaacgtctcatttttgctggcaagcagcttgaggatggacgtacacttgctgattacaacattcaaaaggagtccactctacacttggtgctccgtctccgtggtggaatgcaaatctttgttaagaccttgaccggaaagacaatcacccttgaggtcgagagctctgacaccattgacaatgttaaggctaagattcaggacaaagagggtatcccaccagaccaacaaaggcttatctttgcaggaaagcagctagaagatggcagaaccttggctgattacaatatccagaaggaatctaccctccacttggtgctccgtcttcgtggtgggatgcaaatctttgtcaagaccttgactggaaagacaattacccttgaggtggagagttctgacaccattgacaatgtcaaggctaagattcaagacaaagagggtatcccaccagaccaacagaggctgatctttgctggaaagcagcttgaggatggccgtacccttgccgattacaacattcagaaagagtccaccctccacctggtgctccgtcttcgtggtggcatgcaaatctttgtcaagaccctcactggaaagaccatcacccttgaggtggagagctctgacactattgacaatgtcaaagctaagattcaagacaaagaaggtatcccaccagaccaacagaggctcatttttgctggaaaacagcttgaggatggccgtacccttgccgattacaacattcagaaagatctacctcccactggggtcgnnttcgcgtgtganaatttgaaaccttatctgaaccatactttttgagagagttgaccatnntcatgaaagagagtcgcaccgagagtctcaacaccaaaantattgtcgagncttgnnggagtcctgactcactataaaagatcttcccttcttttgttggggggggtgtaattactagacnnacncttnntgtagaattatgagaaantaaaagttttcnnnnnnnnnnnnnnntttnngnaaaaagggtgcacaaaaaaactctcctcntgtgtg

SEQ ID NO: 7335 - DNA, 1465 bp, Glycine max
ttcttcccacgcgtccgcccacgcgtccgtacgcctgcgtagtagacgacagatggggaagacaatttttttttcccttgtttctttgttgatcgttttggatttgaaaaagactttcttattttcttttcatcaagttgctggcatggctttttggttctataaattctccggttgaagcatacagagtccccttccactttcttccttctttctcatcactcttttaagatatttttgttacatagtttatggtctacgagagccctgcctctgtagagtgtagaccaacctccttttctttgctttgagctcgctcgatcttcttccatttcatgtcttgttttattttattttatttatttaagccttttaaatgcccaacattttgttcttgatgtttgagattgatgtattcaattctgagtgaaatcttcttttccgggtgtatgatcaattccactgtgagacgcaggacccatttagttcaatccttctctgttgctttcctttactggctctactacgtttcatgatttctaaccccctctccaattattaattaaataaaaccctattatatatctcttacatatttttatctgcaaaaaaaaataatctttttttgttcttgttcttgtttagtgtctgggtcctgcgaactccaagtacaagaagggtcaatttttgtttttctgttaacttttgattactatggcttgttcaagtggaacatcttcaggggcgacgtcgtcgatgcttcaaaataactcaggttcggaggaggagctgcaggcactgatggagcagaggaagaggaagagaatgatatcgaaccgcgaatcggctaggcgatctcgaatgaggaagcagaagcacttggatgatctagcatcgcaggtgactcagctcaggaacgagaaccaccagattctcacatcggtgaacctcactacccagaagtacttggcggttgaggctgagaactctgttttgagagcacaagtgaacgaactcagccactggttggagtctctgaacgagatcatccacttcttgaatgccactgatggtggtccaccaccaccaccaagctccttctttgagcccgatgctaccttcttcaacaaggcttatctgagccagccgattatggcttcagcagacatgttgcagtactgagtgtgatggttgttggtttcttttaggttttagtctgttagggaaaattgtaatcgctggcagatagtgagtacgataaggaataatgatgaatgtgtaacatatcataaagcgggtaagcttgttggggcccctgtagtcttcagagatcagatcaccctattattgttgcaactgcacttccccatactagacttattatttatgtcatatcaccaaatcatataacattaagtttaatttagtgtcaaagtaaaagaatttatcaaaaaaaaaaaaaaaa

SEQ ID NO: 7336 - DNA, 3234 bp, Glycine max
aattcggctcgagccaaaccaaactctaagcaattattgtatacattctcttctctctcccttttctcatcacacactaacttgctttcgaggttttcttcttctttctcgaattttcacataccgaacttctcgtctttcacatctccaggtttgaaatgaatcctgagaagtttactcacaagactaatgaagctcttgcgtcggcccacgagctcgcgatgagttcaggccacgcgcaattgactcccatccacttggcccacgcgctgatttccgatcccaacggcatcttcgtgctagcgataaacagcgcgggcggcggcgaggaatcggcacgcgccgtggagcgagtgttgaaccaggctctgaagaagctaccctgccagtcccctccgccggacgaggtgccggcgagcaccaacctcgtgagggccatcaggagagcacaggcggcgcaaaaatcacgtggcgacacgcatttggccgttgatcagttgatcctcggaatcctcgaagactcccaaatcggagacctgttgaaggaagcgggggttgcggtggcgagggtagaatcggaagtggataagcttcgtgggaaggaagggaagaaggttgagagcgcttccggggatacgaatttccaagctttgaagacttatgggcgtgaccttgttgaacaagcggggaagcttgaccctgttattggccgtgacgaagagattagaagggttgtgaggattctatcacggaggactaagaacaacccggttctcattggagaaccgggtgtgggaaaaactgcggttgtggaagggttggcacagaggatagtaagaggggatgttccaagcaaccttgctgatgtgaggcttattgcgttggatatgggggcgttggtcgcgggtgccaagtatagaggcgagtttgaggagcggttaaaggctgttttgaaggaagtggaggaggctgaggggaaggtgatactcttcattgatgagattcatttggtccttggtgctggtagaactgaaggctccatggatgctgctaatctattcaaacctatgcttgctcgcggccagcttaggtgcattggtgccaccacgcttgaggagtacaggaagtatgtggagaaggatgctgcattcgagaggaggttccaacaggtttttgtggcggaacctagtgtggttgataccattagcattcttcgtggcttgaaagagagatatgaaggccatcacggtgttagaattcaggaccgtgctttggttatggcagctcaattgtctaaccggtatataactgggcgtcatcttcctgacaaggcaattgatttggttgacgaggcttgtgcaaatgttagggttcaacttgatagtcagcctgaggaaattgataaccttgaaaggaagagaatgcagctagaagtggaacttcatgctctggagaaagagaaagacaaggctagcaaagcccgtcttgttgaagtgcggaaagaacttgatgacttgagggacaagcttcagcctttgatgatgaagtaccgaaaagagaaagagagggttgatgagattcgaaggctcaagaagaaaagagaagagcttctttttgctttacaagaggctgagagaagatatgatctggctagagctgcagacctgcgatatggagcaattcaagaggtggaaactgcaatacaacaacttgaagggagcactgaagagaatctgatgttgactgaaactgttggaccggagcaaatagctgaggttgtgagccgctggacctggtataccagttacaaggcttggccaaaatgaaaaagaaagattgattggacttggtgacagattgcacagcagagttgtaggacaagaccaagctgttaatgctgttgctgaggctgtgttgagatctagagctgggctaggaagacctcaacaaccaactggttcattcctattccttggtccaactggtgttggtaaaactgagcttgcaaaggctcttgctgagcaactatttgataatgaaaaccagttggtgagaattgatatgtccgaatacatggagcagcactcggtttcaagattgattggtgcaccaccagggtatgttggacatgaggaaggtggacaactaactgaagccgtaaggcgaagaccttacagtgtggtgctttttgatgaagtggaaaaggcacatacatctgtgttcaatactcttcttcaagttttggacgatgggaggttaactgatggacaaggccgtactgtggactttagaaacactgtaattatcatgacctcaaatcttggagcagagcacctcctcagtggactttcaggaaaatgtaccatgcaagttgctcgggatcgggtaatgcaggaggtgagaaggcaatttaggccagaattgctgaatcgacttgatgaaattgtggtatttgaccccctttcacatgaccaattgaggaaggttgcaaggctacaaatgaaggatgtagctagtcgtcttgctgagaaaggaattgccttggcagtcactgatgcagcactagactatatactttccgagagctatgatccggtgtatggtgctagaccaataaggaggtggcttgagaagaaggtggtgacagagttgtctagaatgcttgtaagagaggagattgatgagaattcaacggtttacatagatgctggacccaatgggggcgagttggtctaccgtgtagaaaagaatggaggggttgttaatcctacaactgggcagaagtccgatatcttgattcagatacctaatggacatgcacctaaaactgatgctgttcaagcagtcaagaagatgaagattgaggaaattgatgatgatgaaatggaagagtgaattttatgataaaatgtaattagtttgatggcgcaagctcctcttgaacttccttctttgtcttttatgtgttttgaatgggtgtgagtgaaaattgaagaagtcccttgtaacacctgctttttgtctgatcaataaattttctttctgtaaatagattgattacagctgaggtggagagcttttttatagtttttctgtgcagcggctgctctgtgataatttagttgcctgtcatatttacttggcgaagccgtaaaatgaaatctgtggtattggtattgttattttttagacaaattccactgttaaagttcgttgttatgcgatttaacactt

SEQ ID NO: 7337 - DNA, 1020 bp, Glycine max
tacggcacgacagaagggtacggctgcgagaagacgacagaagggtacggctgcgagaagacgacagaagggtacggctgcgagaagacgacagaagggtacggctgcgactctttgtttcttgcgggtgtatgaaaaaaaaggagacgaaaaggaaaaaacagaagaacagtgttcgaagatggagaaaatgatgcgactgagaccattgttccgatcactgagttgcagatcttatcatttcgttcttcgtccttctcttctctctcgctctcccaatcctcttccttctccttcaccctcagaatgcaggtctcctctctcaatgggtttagggagtatgagattctatagtgaagatgtgacccacatgcccaatattaaggaccctgtgctttacaatgctttcaaggatttgatggcggtaagttggagtgagcttccggattctgtcatatctgatgttaagaatgcactgtctaaaaacactgatgacaaagctggcaaggaggttgtggaaaatgtgttctgtgcagccaaggctattgaggagtttggcgggattctaatctccttgaaattggaatttgatgacagcattggaatgagtggcgaggatgtaaagccattgcctgatcatataaaaaatgctctgcataccatttttgatcgctactccacctatttgaattcctttggacccgacgagagctatctacggaagaaggtggagacagagttgggtgcaaagatgattcacttaaaaatgagatgcagtggccttggtgccgagtggggaaaggttacggttcttggaacttctggacttgcaggttcatatgttgagcaaagagcataaaagcaatattttagaaacagtgcatgtaattgtttgtctctgttttatatcatgcttttgaggatgcctgtagactctttgatttgtttttgcctgacctttttgttcccaagcgtttgatagcatggaaataagagcgcttgactttgttagctgggatt

SEQ ID NO: 7338 - DNA, 1079 bp, Glycine max
aacataatatacaggagaaaaagtaacgtttttggtaggtcgcgagcgagcatcttcgagttgcatttcgcagtgtgtgtgagaagaagagaaaaatggagaaaatgatgcgactgagaccactgttccgatcactgagttgcagatcttatcatgccttcccattcatcaaccatgtcgttcttcgaccttctcttatctctcgctctcccaatcctcttccttctccttcacactcagaatgcatgtctcctttctcgatgggtttagggagcatgcgattctatagtgaagatttgacccacgtgcccaatattaaggaccctgcactttacaatgctttcaaggatttgatggcagtaagttggagtgagcttccggattctgttgtatctgatgttaagaatgtgttgtctaaaaacactgatgacaaagctggcaaggaggctgtggaaaatgtgtttcgcgcagccgaggctattgaggagtttggtgggattctagtctccttgaaattggaatttgatgacagcattggattaagtggcgaggatgtaaagccattgcctgatcatataaaaaatgctctgtgtaccacttttgatcgctactccacctatttgaattcctttggacctgatgagaactacctgcggaagaaggtggagacggaattgggtgcaaagatgattcacctaaaaatgagatgcagtggccttggtgctgaatggggaaaggttacggttcttggcacctctggacttgcaggttcatatgttgagcaaagagcatagaagcaacaatttagaaacattgcatgtaattgtttgtctctgtttcatatccatgcttttgatgatgccggtagactctttgatttgttttctcctgacctttttgttgtcaagcgttgaatggcatggaaataagagagcgcttaactttgttaaaaaaaaaaaaaaaaaaacaacgttttgtttcgttctcaatgtcattttccgaagttaacaagtaacatgttggtgaagttctaaggacttgtatatatcttattgatcatatgaaaatgacaagtcaag

SEQ ID NO: 7339 - DNA, 866 bp, Glycine max
ggctcgacccacgcgtcagcggacgcgtgggcggctccaaaaaaacaacagaagggggacatcataggcacccatttggatctaatcctcagaatcagcttcagcctttctctctaactccctcactcacactcacagttaagcaatggcggggaaaggaggaaaggggcttcttgcagcgaaaaccaccgcggctaacaaggacaaagacaaggacaagaagagacctatttctcgttcatctcgtgccggaatccagtttcctgtgggacgtatccataggcagctgaaacaaagggtccaagctaatggacgtgttggtgccactgctgccgtatacttagcctcaattcttgagtatcttactgctgaagttcttgaacttgctgggaatgcaagcaaggatctgaaggtgaaaaggataacaccaaggcatttgcagcttgctatcagaggagatgaggagttggacacccttattaaagggaccattgctggtggtggtgtcattcctcacatccacaagtccttgatcaacaaaacagccaaggattgagctcgctctttggccttctgatttcatgttgctgtttactgagaactaagtttgtgtttattgtgaattgatcacagtagtaggtttgtatgaatgatttattttaacagttttataactcaggttgtagtgtgtacatggcttgctagacaatgctttctttaactattttaatgggtctgttgttagagctttaaccatgttggattgcttgctagacaatgcttgcttttaggtgcaatctgtgatttgttgttgtctttgttggcaaaaaaaccctcaccccttcatatatggtttttctaacttt

SEQ ID NO: 7340 - DNA, 804 bp, Glycine max
tccggctgcgatttggaggcaatttcggagattcgtcttcagtttcagcctttctctcccactcactcactcacaggtaagcaatggcgggaaaaggagggaaggggcttcttgcagcgaaaaccaccgcggcgaataaggacaaagacaaggacaagaagagacctatttctcgctcttcccgtgctggaatccagtttcctgtgggacgtatccataggcagctgaaacaaagggtccaagccaatggacgtgttggggcaacagctgcagtgtacttagcctcaattctagagtatctgactgctgaagttcttgaacttgctgggaatgcaagcaaggatctgaaggtgaagaggatcacaccaaggcatttgcagctggctatcaggggagatgaggagctggacactcttatcaaagggaccattgctggtggtggtgtcattcctcacattcacaagtccttgatcaacaaaaccgccaaggattgagctctctttggccttctgaattcatgttgccctttactgaaaactaagtttgtggttattgtgaattgatcacagcagtaggctagtacgaggatttgttttaacagttttagaactcaggtggtagtgtgtaaatggcttgcttgctagacaatgctttctttaactgttttagttggtctgtttttagagctttaaccatgttggattgctagacaatgcttgcttttagatacaatctgtgatctgttgttgtctttgttgcccattgaccccttcatatatggttgttttattttaatctttgcaa

SEQ ID NO: 7341 - DNA, 1547 bp, Glycine max
  misc_feature (1539)..(1539): n is a, c, g, or t
tcagctacgtaggcccccccccccaacctgcgtctgttttctttttctcacatctctcctctcctcttctcttctcagcacagctaaagctttcaactttcaacctcttctgaatccaaataacctttttctctttccaacacacactctctctctctctctctctctctctgtttttcggtttcctctgatcatgggtcgtccacccagtaatgggggcccagcctttcgcttcacccagcctgaggtatcagaaatggaagctattcttcaagaacataacaatgctatgccgtcacgtgatgttcttacagctcttgcagagaaattcagtgaatcacaagatcgtaaaggcaagatttcagtgcagatgaagcaagtttggaattggtttcaaaataagcgatatgcgataagagcaaaatcaagtaagactcctgggaagttaaatattacacccatgcctcgggatgattacaattcaaccccaataaggagtatgcctcaacaaccaacagctgcttcaattcctgctgcttctgctacagttccaacagcagtaaaggcaactacagaaaattcagttatggaatttgaagctaaatctggaagggatggagcatggtatgatgtggctacctttctatcacacagatatttggaaaccagtgatccggaagtgctggtacgatttgctggttttggacctgaggaagatgagtggattaacattcgaaagcatgttaggccacgctcattgccttgtgaatcatcagaatgtgttgtagtcatccctggtgatctcatactttgttttcaggaaggtaaggagcaagccctatactttgatgcccatgtccttgatgctcaaaggagaaggcatgatgtacgaggctgtcgctgtagatttctagttcgttatgatcatgatcagtcagaggaaattgtgccgcttaggaagatttgtcgccggcccgaaaccgattatcggttacagcaacttcatgctgtgaatgaggcagcacctgtggatcagcagaagactggcatggatccagcagcaaatgttaatgccgtgagggctactactactgaaacagtgccaaagcagctgattgcagcaaacattcatatggagacgacgccagttccagttgtgcaaacaaatgttcctcaacaacctccacaaagtatggatatggatgtggatcaaaagaaagctgaaacaattgctgatgttcaagctggaaattccatcatcaccccaggcagtgttgttactaacatcattactacaagcagtgttcctgaagtctttagtcagactcagaacatggttgaataaaatttctgtttcatttttccaaacttgatcagacttgagtgcgttcttttagttttttagaactgttaactatctggtgtagtttatgttcagcaaacaatgcttataagtgactttctcttgctgttttatttgaaccataggaattaaaaagaaaaaaaatgaggttatacaattatcgagcaaaaaaaaanaaaaaaaa

SEQ ID NO: 7342 - DNA, 1368 bp, Glycine max
gggacaaaagacttacttgcccccagcaatcttgagtatccctccaaacccttgtatggctgaagcaaggaagggtccgctgcgtgggctgccccccgccattgaccagcttctggagaaaactggtgtgaaggctaaggatattgggattttggtggtgaattgcagcttgttcaatcccacaccttctctctctgcaatgattgtgaaccactacaagctgagagggaatatccaaagttataatcttggtggcatgggttgcagtgctggacttatctctatagaccttgccaaacagctcctccaggttcatccaaactcttatgccttagtggtgagcatggagaacatcactctcaactggtattttggcaacaacaggtcaatgctagtctcaaattgtctcttcagaatgggtggagctgcagttctactctccaacaagtcttctgatcgcagaagagccaaataccaactgatccatacagtgcgtactcacaagggtgcagatgacagatcatatggttgtgtcttccaagaagaagatgagaagaaaacaattggtgtggcactctcaaaggacttaatggctgttgcaggagaagccctcaagaccaacatcacaacacttggcccattagtccttcccatgtcagagcagcttcttttttttgcaactttggtggctagaaaagtgtttaagatgaaaataaagccatacatccctgactttaagctagcttttgagcacttttgcatccatgctggaggaagagcagtgttggatgagttggagaagaatcttgagctctctgattggcacatggagccttcaagaatgacactgaacaggtttggcaacacttctagcagttccttgtggtatgaattggcctacactgaagctaaagggaggatcagaaagggtgacaggacttggcagattgcatttggttcagggttcaagtgcaacagtgctgtgtggcgtgcattgaggaccattaatccagcaaaggagaaaaatccttggatggatgagattcacgagtttcctgttcatgtgcctaaagtggcaaccattagttcctaagttaaacaacctcttgcatttttttgggaggaggaaattaatttacttgaggttttcattgttaatcttaggaggtgtgcaaaatttagaagagaagattactcccagctgatttgatcttgtgctagtgtgttcaagtcgtaagagtgtgcatacaattattgtccaatgaaatttattacacgatttttcataaaaatgtattacgtttactacttgacctttcaaaggttcatgaaatttgattttttaagttgctaaaaaaaaaaaaaaaa

SEQ ID NO: 7343 - DNA, 2250 bp, Glycine max
  misc_feature (1199)..(1199): n is a, c, g, or t
ctcgagccgttcaaattcccacacattcttattagcctaacatactctctcttccaaagttgtttcactttaccaaaaaagctttccctttgagaaataaaacccaaaaccagtcttttgataattttgagcagttgcattccttgttttcttcctttttgggtcccctcaaaagtagtttcaaagagttcctcttcctccacagatatcatggcagatcaaaccccgggttcaggaaccgtttctgttgaagcttcttcacaagaaagaaggaaacttccaaactttctcttgtctgtgagacttaagtatgtgaagcttggttaccactacttgatctccaatgctatgtaccttttgctcataccccttcttggtgtagcttctgcttatctatcaacaatctcttaccaagatgttgttcagctatgggaaaatctcaagttcaatctcctctcagtgactctatgttccagtcttatagtattccttgtcaccttttactttatgagccgtccaaggggtgtttacttggtggattttgcgtgttacaagccagagccagagtgcacttgcacgagggagattttcatgaacaggtctgtggaaactggtgtgttttcagaggagaacttggcctttcagaagaagatacttgagaggtctggtttggggcaaaagacttacttgcccccagcaatattgagtgtcccttcaaacccttgtatggctgaagcaaggaaagaagctgagcaagtgatgtttggagccattgaccagcttctggagaaaactggtgtgaaggctaaggatattgggattttggtggtgaattgcagcttgttcaatcccacaccttctctctctgcaatgattgtgaaccactacaagctgagagggaatatccaaagttataatcttggtggcatgggttgcagtgctggacttatctctatagaccttgccaaacagctcctccaggttcatccaaactcttatgccttagtggtgagcatggagaacatcactctcaactggtattttggcaacaacaggtcaatgctagtctcaaattgtctcttcagaatgggtggagctgcagttctactctccaacaagtcttctgatcgcagaagagccaaataccaactgatccatacagtgcgtactcacaaggggtgcagatgacagatcatatnggttgtgtcttccaagaagaagatgagaagaaaacaattggtgtggcactctcaaaggacttaatggctgttgcaggagaagccctcaagaccaacatcacaacacttggcccattagtccttcccatgtcagagcagcttcttttttttgcaactttggtggctagaaaagtgtttaagatgaaaataaagccatacatccctgactttaagctagcttttgagcacttttgcatccatgctggaggaagagcagtgttggatgagttggagaagaatctagagctctctgattggcacatggagccttcaagaatgacactaaacaggttcggcaatacttctagcagttccttgtggtatgaattggcctacactgaagctaaaggaaggatcagaaagggtgacaggacttggcagattgcatttggttcagggttcaagtgcaacagtgctgtgtggcgtgcattgaggaccattaatccagcaaaggagaaaaatccttggatggatgagattcacgagtttcctgttcatgtgcccaaagtggcaaccattggttcctaagttaaaacctcttgcattaggaaatttaattgaggttttcatggttaatcttaggaggtgtgcaaaatttagaagaggaagattactcccagctgatttgatcttctgctagtgtgttcaagttgtaagagtgtgcatacaattattgtccaatgagaacatttattacacgatttttcataaaatgtattagtacttgacatttcaaaggttcatgaaatttgattttttaagttgcctatggagctaaggggctgtattggacaaagaaaaacgtatggagagttattgcttatcgagctgaggggctgtagtagtacagtgacattgttggataaattgatcgattagatgaataattaatgttgagcatctaagatctgacacttaattaggacacaacattcgttgagagctcaaaactggtagataggattttttttaatggtcttatattaagaaattaataaatatttttttactt

SEQ ID NO: 7344 - DNA, 861 bp, Glycine max
  misc_feature (93)..(93): n is a, c, g, or t
caattgttttttagattcaattcgccagagttcgaactatctcacagttctggcatttctcacaagggctcagagatatctcgtgttgtcgancgagacgtgtgcatccaccagttcaatggggcactctaaccccacctccccctcctccacaaggggtacctcctggcgcacctatggcaaatcctcctagagctcctccacctccaatgccgggatctatgccacctcctcctcctatgacagcagctaacggtcctagacctgcaccttctggtggaatgccatctattccacccccaccccctgttgcaagtgggacatcgggtttcaacatgggtgctagacctccatcaatgccacctccccaaggttttccttcccaacctatgcagggtcagggtgtccgtcttcctcctccgccccctaacatgggacagtaggtccacggggctttagggtaggacagcaagcatcattggaactgttaaacaactgcagtagaatgtgtccgttaaggacttaatgctttgtatggtagaggcaaggtttcttaaacaatacaccaaattacctgtacactcttcctttgtcatttttacattttcaaattaagatgtggaagtatcgagatttctggctttggcattgatgtctttggagtattcaccgtatccacaaatttaggtctcagtagcttgatatggttggaaaatttttgcttgttgcaagtaatttaggattaagactatttgattatggggaatcacaagaccgattttttacttgtttttaaaaaaaaaaaaaaaaaaaaaaaaaaaaaaaaaaaaaaaaaaaaaaaaaaaaaaaaaaaaaaaaatt

SEQ ID NO: 7345 - DNA, 1505 bp, Glycine max
tacggctgcgagaagacgacagaaggggaacgtaactcaactgaaaatggatcgagaatggggatcgaagccggggagcggaggtgcggcgtcggcgcagaacgaagccatagaccggcgagagcgtctccggcgactggctctggagaccatagacttggcgaaggatccctatttcatgcgcaaccacctcggaagctacgaatgcaaactctgtctcactctccacaacaacgagggtaactacttggcccacactcagggcaagcgccaccaaaccaacttggccaaacgtgccgctcgcgaggccaaggacgcccccgcccagccccaaccccacaagcgcaaagtcactcttcgaaaaacagtgaagattggacgccctgggtatcgtgtgaccaagcagtatgacccggagacaaaacaaagatctctcctattccagattgaatatccggagattgaagacctcatgaagccgaggcaccggtttatgtcctcctatgaacagagggtgcaaccctttgataaaaggtatcagtacctcttgtttgctgctgaaccatatgaaatcgttgctttcaaggtgcccagcacggagattgacaagtccactccaaatttcttctcgcactgggatcctgactccaagatgttcacgctacaattgtattttaaatccaagccgccagaggcgaacaaaccgcagcctgcctctactgccaatggcacagcaccatctggtgtaccaccaaggcctttgcccccaccaccccaaggtccactaccaccacctccacctcctccacaagggctacctcctggtgcacccatggcaaatcctcctagagctcctccacctccaatgccgggatctatgccacctcctcctatggcagcaactaacggtcctagacctgcaccttctggtggaatgccatctattccacccccaccccctgttgcaagtgggacatcgggtttcaacatgggtgctagacctccatcaatgccacctccacaaggttttccttcccaacccatgcagggccatggtgtccgtcttcctcctccacccccaaacatgggacagtaggtcctcaggctttaggacagcaagcatcattggaagtgctaaacaactgtagtagaatgtgtccgttaaggacttaatgctttgtatggtagaggcaaggtttcttaagcaatacaccaaattacctgtacactcttcattgtgccatttttacatttacaaattaagatgttgaagtatcgagatttttggctttggtggtatttatgtctttggagtgaccgtgtccacaaatttaggtctcagtagcttgatatgattggaatattttggtttgttgcaagtaatttaggatcaaggcttgatcgggtcatttatgtagtagtaactacttgattatggggaatcacaggtgatacggtttccgcaaaaaaaaaaaaaaagggcgccgctcgcccacgcgtccgct

SEQ ID NO: 7346 - DNA, 1521 bp, Glycine max
gaaccaactgagttagattttggtgttatcctttgatataaaccaagctcgttcgcccccccccccccaaaacttccagcttcttccttcctctgtgactcaaactgcatcaaccaagttagtgggattttctataaattgttgtcaatttggcatgtcatgtatatgagaaattcatgaaaactctggtggtgacttattagttctctcggcaagtaaggatttcaaacaaactaaagttgaagagagtataaatgactttggaaactcttcaatccaatgagttctccaacttcattatctatgacactatctctgcaactccatttagcagccatggctccccagaggctagtttcttggaaagttttgtgaactatcaggagcagcatgaccaccctacatttgataattgcgcaatgaggacccgaaagcgtgaagccagcgaaccagaaagcattggccggaggcagaattcggtggcagtgcaagggaggaagaagaggagaaggaagccaagggtttgcaaaaacacggaagaggctgagacacaaaggatcacacacattacagtggaaagaaaccgccggaagcagatgaatgagcatcttgctgtccttcgttcactcatgccggagtcctacgtccaaaggggtgaccaggcctctatagtgggtggtgccatagagtttgtaaaagagctggagcacctcttgcaatcacttgaagctagaaagctgcaacttttgcaccaagaagtggcacaaaccaatgaaaatacggccatttccaaactcatgcaacctccttttgcacattgtttttcgtatccacagtacacatggtcccagactcctaacaaatacacatccaagaccaaagctgccatagctgatatcgaggttactttaatcgagacccatgcaaatcttcgaattctcaccaggagaagcagccacgggcagctaacaaagttagtagctggttttcaaacgctgtgcctcaccgtcctacatcttaatgtcaccaccatagaccctttggtgttctattccttcagtgctaaggttgaagaaggattccaacttggttcagtagatggtattgcaacggcagtccatcatttgcttgcaagaattgaagaagaggcttccctttgctgttgatcaggttcatctggggacacgagattttagtgaaatgaccaaatcaaccatctacaccaacctcaacagagagagagggggggaaagaatatttgctaatggctttagttttttatttttgtttgtttgatgtccaactgatgtgttaatgctaaactttagtttcagtagatgatggtgttttttaaaagttgcttcaagcaagtacaactaaaaatcaaatgaaaaagaatgttgatacagtttatctcgtttgcagttagttgagctctattgtcctcttcagtggccctaatatgaaagtagtttgcaatgaggatgataatcttcataacataaaaaaaaaaaaaaaaaa

SEQ ID NO: 7347 - DNA, 896 bp, Glycine max
cggccgctcgagccggccaggcgggattttcgatgttacatccaacttgttagagtctgtagttgatccaagaccctgttttcagggagaacctccttggtgttactacatttcctacggctgcgacaagacgacagagggagatataacactgtcactcttacaatctcagctcatagcattcttcttcttccaacgagaatcagtctttgtgttccaaatggctcgtacgaagcaaacagcaagaaagtccaccggaggaaaagctccaaggaagcagctcgccaccaaggcagcacgtaagtccgctccggcgacgggcggcgtgaagaagccccaccgtttcaggccggggacagtggctctgagggagattcggaagtaccagaagagcacggagcttctcataaggaagcttcctttccagaggctcgtaagggaaatcgctcaggacttcaagaccgatctacgcttccagagcagtgctgtctccgctcttcaggaagccgctgaggcctacctcgttgggctctttgaggataccaacctctgcgctattcatgctaagagggttaccattatgcccaaggacattcagctagctcgtaggattaggggcgagagagcttagggtttatgatttacaaagccgtagtgttttctaagggttattattttgcaatcgattccttcagcttagtattagggtgaaagtccttgttttattgtgactgtattggaaactcgtttctgtaacgtgagaaatattaatgttgagtcctctcattttaagcttaaacctgcttggatctgtagaattacatcgtgtttggtcgttattctgatttcataacataattaatagatgtttgggatttttctggaaaaaaaaaaaa

SEQ ID NO: 7348 - DNA, 1936 bp, Glycine max
tcagctacgtaggcccccccccccgagtctctgtgttgtgtctgtctgctgagtgctgagagagaatggagctgtgcactcgaaccttcacaagtttctttcttttcaacccttcttcctcttcaaaccctcttcttcttcgtgctaatgccaacgctaaaacacccttcaaattcaattcccttaaactctcatctttcccccctcatattcacctcttccaaccctttctctctcctcacacttcttctcccttcacactctcagctgcttctgcttcttcttcttcttcttcagttgcagttggcacagaacaggaccgtcttccagcagaattgaatgtcactgaaacagcggaacccaattccagagttagattgcatgtggaggtgccatcattggtatgtgaggattgttacaagagggtcatagcagagtttatgaagcaagcaaagatccctggatttcgccctggaaagaaagttccagaaagcattcttattagttatgttgggagtcaaaatgttcagaaggctactattgaatctatattgaggaggacactctcacatgctatgacatcggttactggaagggctttgcaggactcggtacgaatagtgactaagttttctgagatggaggagacatattcttctcttgggtctcttagatatgatgtccttgttgatattgcaccagaaatcaaatggattccagataataatgcatacaaaaatttaaagattgttgttgagatagatagtgatatagatgctcacacagcatctgaacaagaatttagaaggcgctataaatccattggtgctctgaaagtggttactgacagagggctacaggttggagatgttgttgtccttgacatctcagcaacaaccattgatcaagatgaatcaaatgttaaaagtattccttctgctgaaagtaaaggctttaattttgatacagaatatggtgaaaaagtattaccgggtttccttgattgtataattggaattcaacaaggtgaatcaaagtcttttcctcttgtatttcctgaaacatggaaccaagaaaatcttcgaggtgttcatgctcagtttactgttgaatgcaaagaacttttttacagagatttacctgagctggatgattctattgctgataagcttctccctggatgcaccacagtggagcaggtcaaagacttgttgttacagaaatgccaagaggtggagcaaacagctagagaacaagccactgataatgctatcttagatcaggtttctaagattgtacaagttgatatacctcaatccttgtttgaggaacaaggaaggcagctttatggagccaacctattagaaatacaggcaaaaatgaaactaaatgagcagcagctggcgactctgtcaagttcaaaggctgtgaacgaatttcttgagcatcagaaggaaaatataacaaatttgataaaacagagtctggcagttggtgatatatataggcgtgaaaatctgcagtttgctactgaggaccttgtcaaagaggttgagaattccattgctgaattcaaacgtcaaaaccaagaatatgatgaggaacgggtgaagggacaggttcaagaaatactagaaggagctaaagtgcttgaatggttgagagaacatgcagaggttcagtatataactaaatgagggatgagcactagccaaaacaaatcaggaaaatgaaattgcatgttcatttgaatgtgttttgtttcagcggatgtaagttgtgagaaaatttcttgattgaattttgaagaaagaatattaagaatagaataatgcattacaagtttgtataaagaaactttgatgataaattaatagtagataactctaacaaaaaacagtattgaaaaacaccaatatatttatcattacaaaac

SEQ ID NO: 7349 - DNA, 673 bp, Glycine max
actgataatgctattttagatcaggatttctcagattgtagaagttgatatacctaaatccttgtttgaggaacaaggaaggcagctttatggagccaacctattagaaatacaggcaaaaatgaaactaaatgagcagcagctggcgactctgtcaagttcgaaggctgtgaacgaatttcttgagcatcagaaggaaaatataacaaatttgataaaacagagtctggcagttggtgatatttataagcgtgaaaatctgcagtttgttactgaggaccttgtcaaagaggttgagaattccattgctgaattcaaacgtcaaaaccaagaatatgatgaggaacgggtgaagggacaggttcaagaaatactagaaggagctaaagtgcttgaatggttgagagaacatgcagaggttcagtatataactaaatgagagatgagcactagccaaaacaaataaggaaaatgaaattgcaggttcatttgaatgagttttgttacagcggatgtaagttgtgagaaaataactattcttgattgaattttgaagaaagaatattaagagtagaataatgcattacaagtttgtatattgagactttgatgataaattaatagtagatattagataacactaacaaaaaacagtattgaaaaacaccaaaaa

SEQ ID NO: 7350 - DNA, 1340 bp, Glycine max
ttcggctgcgagaagacgacagaaggggataaaaggagatccaaagtaaagaacacagatggcatgacaccacgaaaccaaattaaaaactgcgccttctctgtctctgtttgttcttctcactttatattctctctctgtgtatatctcttcactcttattattccttctcttctcaacgacgatggaggacccatcagcagcaacaacgttgttgctgaacagcgaatattcgaggctgttcgtcgaggacacggacttgtacaatcgcattgtgttgggaaccctcttgccgcacttcgtgtggggcccactcccgcacttcctccagacgtggcttcgcaattacctcggcggcgtcctcctctacctcctctccggcctcctgtggtgcttctacatttattattggaagcgcaacgtttatgttcccaaagatgctattccctctcgaagagccatgctcttgcaaatatctgttgctatgaaagccatgccttggtacactttgcttccaactgtttcggagtacctggtagaaactggctggacaaagtgctatcctagattatataatgttggttggcttgcataccttgtgtatttagcaatttatctaagtattgtagagtttggtatttattggatgcacagagaactgcacgacataaaaccgctttacaaatatcttcatgctacccatcacatctacaataaacagaacactctctccccttttgctggtttggcatttcaccctcttgatgggatacttcaggcattacctcatagcctttgtttgttttttatgccaatccattttactacacatttagtcctcatattcattgagggcatttggactgctaatattcatgattgcattcatggaaaattgtggcctgttatgggtgctggttaccacaccattcaccacactacatatcggcacaactatggccactacaccatatggatggattggctatttggaactcttcacaaccccgaggaggacgagggcaaggctatgtgatgaattgcagacttacattggcagtcatttattatcatgtttggattgttgaaatgtgcttacttgcatgtaaagcataaatgtgttagctatatttttctggtgtttcatcacaaggtgatggctctatattagagagacagggttgagggttaaagtggagcttccctgtctctaatcccattgttagtgtatgtgattgaggttattttctttctcaaattgtgtggtagagttgagatagtaatgcagttttttcttttttgaaggtaatgcagttttctctaaaaaaaaaaaaaaaaaa

SEQ ID NO: 7351 - DNA, 1347 bp, Glycine max
agaacacttggtgattggacccggagtctcaaagtcaagttctcagagtgttgccagccaccggacaacggcaagagtggacttctaagagctgaatacttgcaaggagatagaagtccgagtactctccctaaagttctaattgacggtccgtacggagcaccagcccaagactacaagcaatatgaggtggttttgctagtggggctaggaattggagccaccccaatgattagtatacttaaggacatagtgaataacatgaaagccatggaagaggaagaggagaccaacatagaggaaggaacaaatagtgggtttggtaataaatcaccaagagggtcgtccccacacaagaaaaatagctcgagcaacttccgcctgcgagaagacgacagaaggggggtgacaagggagcaagggtcctttgattggttcaaaggggtgatgaatgaggtggctgaagaggatcataagggggtgattgagctccacaactattgcactagtgtctatgaagagggtgatgctcgctcagctcttattgctatgttgcaatctctaaaccatgccaagaatggcgtggacattgtctctggcacgcgtgtaaagtcccactttgctaaacctaattggcgcgctgtctacaagcgcattgcggttagtcatccacgagctcgtgttggggtattttactgtgggccaccagcgctaaccaaagagcttggtcagttagcttcggatttctctcacaacacaaacacgaaatatgatttccacaaggaaaatttctaataagatggagattgttgagggcaagatggtcttccagctttatatcacaccatgaagattattacaccatatccttgttgataataattaatccatgtgtttcaatgtaggaataataattacggatttgtataattgcgaaagctttgctttaaggttaaaatggttgtttgtgggctaccagataccaaaggtgtgattggatggcaacggcatcagttccaaaagtgaatcacgagatgatgtgcaatgcgagtagcagaagattacatacttaaacatttcgtggaggggaataatttttccaaccggaaataggtggcagcacttacattacatgaacctcataagaattagtccaggtgcatcatggactctacaaggttgattgtgtttaaatattaagcgatcgatgttatggaaatgaagacctataaccattgtagcaagtaacattttgcattgtaaaaaaattaccaccttggccttcaaaaaaaaaaaaaatatatatatatatatatatatgcaatgaaggatcaaccgtgctttatc

SEQ ID NO: 7352 - DNA, 809 bp, Glycine max
  misc_feature (6)..(6): n is a, c, g, or t
ccgggnaattcggccgtccggccgcccgggccggccgcgaacaaaagagctggcttgggcttggcgtggttccatccatggcagactacgaaaccagcaccagccacaaccaccactcgaaagaaacagccttccaggccctgaacaccataatccagctccacttcgagaaaaccctggagaagaagcgcgccatcgacctccagaagaaggagcttcacaagctcttccagatattcttcatcttcttgggcctcgtcttcctggcccaggcccagtcccctcgcctccaatgccgccactgctggatccccatcactctcctctccatggcccacctcatcttctacgtctccgtcgcccaaaccctaaggtgcatcaacgccttcaagtaccagcgccgctgccacaagctcactcttggtttggccaccgagaagctcagggagatcaagaccagactcgccggcgccgccaccaacggcgccgactacgactcggtggttgctgacgaggagttcgagattcactaccaggaaccccctgagagctactttggaaagtttaagaggaattgggctctgcattttagcttcttgatcttgatctacgcttttatgatctcttcctctgtcgttcttctttgcttttgatttgtaatttcatgcaaaatgagatgagactcacacttttatatactctattttaattccaaactttcatctcatttcactttctttctgtttttttccactctactgaattctagtgttagttctgaaaaaaaaaaaaaaaaaaaaaaaaaaaaa

SEQ ID NO: 7353 - DNA, 1011 bp, Glycine max
ttttttttttttttttctttgaaacaaaaaatgacatgtgattatagaactacctgcatcataataaatttccgggttcatgcttgaaataaaaataggaaataaagacaagggaatccccaaatgaagccctcaaaccagcaaaggccaaaaaagaaaaaagaaaaacccttaataaaacaaaacaaaatgaaagaaatcaattgctatagttgatgacatagcaggcaacaagatgagaataatgctatctcaagcatagtcttgcttacacagcacaccagcttctgctgctcgacgaggtttgcttttacgcctgcttccattatgccgaaatccatttgactttctcagctcatcaattgattctattttctcctcaattggttctattttctcttgtaaattccgttttctttttcttccatgctttgtggtactcggaattttcatctctttgctagacactacattcataacgttgtcaccactggtagcatcctcttctaatatttcctcaatttcttcttcatcaaagtcttccttatacagtttctgtggcctccctcttcttttttgcttaggaaccttttcttcttcttcacttatggcatcctcctcattgctaatagttaactttttaccttttcctctacttctacccataatctcaaaattctataaaatatttttttttcgtagaaattgaagataatcttaatagatttataataattcgttcaacgtccaattgagctaaacttgctagacaatccgagaaaatatgatcatacaaactagtatatcacaagaataaggataacactattggcatatctgacacaaagctcaaccgatgtggaacctgttaaagcccatcgatggttccacaggagcgcaacagtactgtggctggcttcttacagcaagaggccaaaccaaacagagagagaaagatattgttttgactggatctctattctctccccccttctgtcgtctcctagctga

SEQ ID NO: 7354 - DNA, 1264 bp, Glycine max
  misc_feature (17)..(17): n is a, c, g, or t
  misc_feature (47)..(47): n is a, c, g, or t
  misc_feature (56)..(56): n is a, c, g, or t
  misc_feature (63)..(63): n is a, c, g, or t
  misc_feature (70)..(70): n is a, c, g, or t
  misc_feature (121)..(121): n is a, c, g, or t
  misc_feature (137)..(137): n is a, c, g, or t
  misc_feature (141)..(141): n is a, c, g, or t
ttttttttttttttttnaaaaaatatatttttatttaaaaataaaanatcaaaatngcagcantaaatanaaaaaataaaattatattttagtttttttataatataaaaactcccatgtnctcttatttctctatngttnaaccctaaaccaaaataaaacaactaacacctaaaaaaagtcatttaaacatgaccataatataaacattaaaatgatttgaaccgaaaaatgacatgtcataataaacctacaaccataataataaatttcccgattcattcttgaaataaaaatagaaaataatgacaaggaatccccaaaagaagccctcagaccagcagaggcaaaaaaaaaaaaaactaaataaaatgaaagaaatgaattgccatagatgatgacatagctggcaagatgagaattgagaataatgctatctcaagcatagtcttgcttacactgcacaccggcttctgcagctcgacgaggtttgcttttacgcctgcttccattatgccgaaaaccattacactttgtcaactcatcagtatttgatccgtttacaacaacattaattttctcatcaattggttctattttctcctgtaaatttcgttttctttttctcccatgttttgtagtattcaaatttttcatctctttgctagacactacattcttaacgttgtcaccaccacaggcatcctcttctaatatttcctcaatttcttcttcatcaaagtcatccttaaacagtttttgtggcctccctcttcttttttgcttaggaaccttttcatcttcaccacttattggatcctcctcattgctaatagttaactttttaccctttcctcttcctctacccataatctcaaaatccgagaaaatatttttgttttatcgatcaatatgaagtgaaggttaagatttataataattcatccatcctggtcaagtcaattaaactagacctcctaaacaatccgagaaaatatgatcatacaaactagtatgtcacaagaataattaaggataacactaagccacctgacacaaagctcaaccgatgtggaacttgcaaaggcccattgagtgggatcgatggttccacagaagcgtaatagtgtggctggcttcttacagcaagaggccaaaccaaacagagagagaaagatattgtttgtctattgactggatctctattctctactctatgtatccccttctgtcgtcttctcgcagccgtcggacgcgtgggcga

SEQ ID NO: 7355 - DNA, 1859 bp, Glycine max
gctttcctccatacgaatcaaaggaggagagagagagagagagagagaggagacacagacacaaaggaaacggaaaaagcaacacacaaaaaaaaagaggtctgtgcctcctcttatatgtaatagctagttcagctacgtaggccccccccccaagtaaaaagagaacatggattatgaaaacaacagttggatttgggagggggtaaactactacccgtgtgtgtttggcggtctaatggttacagcagccttgctgggcttgtcaaccagctactttggtgggattggggttccttatttatcgctgccatgttcctggtctaatttggggattttccaccagaaaaaatctgggaagaggcgcattcgggtgtacatggatggctgttttgatctgatgcattatggccatgccaatgcactcaggcaagcaaaggctctaggagatgaattggttgtgggtctagtgagtgatgaggaaatcgtggcaaataaaggaccacctgttttgtccatggaggagaggctggcccttgtcagtggattgaagtgggtggatgaggtcataactgatgctccttatgcaattaccgagcaattcttgaatcgtctctttcatgaatataaaattgattatgtcatacatggtgatgatccttgcttgcttccagacggaactgatgcatatgctgcagcaaagaaagctggtcgttacaagcaaattaaacgtactgaaggagtttccagtacagacatcgtaggaagaatactgtcttctttaagagatcaaaaaaattgtgaagatcataatggcaccgaggtaaaacctcaagaagaaaaccagtcaaaggcttcccacatagcccaattccttccaacttctcgacgtattgtccagttttcaaatggcaagggtcctggaccaaatgcacgtattgtatacattgatggggcatttgatctcttccatgccggccatgttgagatacttaagagggctagggagcttggtgactttcttctagttggtatccactcagatgagacagtgagtgagcatagaggaaatcactatccaattatgcatctgcatgagcgtagccttagtgtgttagcttgccgttatgttgatgaagttattattggttcaccttgggaaattacaaatgacatgatcaccactttcaatatctcagtagttgtgcatggtactgttgctgagaagacattaaattgtgaattagatccatatgaggtccctaagagcatgggaatattccacttgctcgaaagcccaaaagatattactactgccacagtagcccaaaggataatggctaatcatgaagcttatgtgaaacgcaatgctaagaaaactaggagtgagcagagatactacgaagagaaaaaatacgtctctggagactagagtgtatataatgatcttttacattagtttggtactgctcttcaagtttgaccctgtcacagagatgctacctatagtatgaatctagacacgctttgtgaaggacatgtggtgcagggtatgtataacataggagtggtcataactcaggaataccgatgtactttaatgtcctgatgttttacttttgtcatctgaaaggcaaccatgtggtttgctcaccagttttatgccatttggtttttgctatggttttggtgtttttagtgtactccagttccagttagagattccttactctgatagtatatatattgtgactatcagaagttatacgcatcagaatggctttgcctttatttatttgatattctactcagcagaattattttatttggagtgggaaaaaataaaaaaaaaaaaaaaa

SEQ ID NO: 7356 - DNA, 772 bp, Glycine max
ggctcgaggaggtaatcactatccaatgtatgcatctgcatgagcgtagccttagtgtgttagcttgccgttatgttgatgaagttattattggttcaccttgggaaattacaaacgatatgatcaccactttcaatatctcagtagttgtgcatggtactgtttctgagaagtcattaaattgtgaactagatccatatgagatccctaagagcatgggaatattccgcttgctcgaaagcccaaaagatattactactgccacagttgcccaaaggataatggctaatcatgaagcttatgtgaaacgcaatgctaagaaaactaggagtgagcagagatactatgaagagaaaaaatacgtctctggagactagagtgtatataatgatcttttacattagttcggtactgctcttcaagcttgaccctgtcacagagatgccaccactatagtatgaattgaatctatacacactttgtgaaggacattagtacagggtatgtataacataggagtggcgataactcgggaataccgatgtactttaatgtcctgacgttttatttctgttttctgaaaggcaaccatgtggtttgctcaccagttttatgccatttggtttttgctgtggttttgatgtttttagtgtactccaattagagattccttactctgatagtatgtattgtgactatcagaagttatacgcatcagaagggccttgcctttatttatttctattcagcagagttatttgaaaaaaaaaaa

SEQ ID NO: 7357 - DNA, 962 bp, Glycine max
ggtccggaattacccgccgcgaccccggcgccaggccagatcttccatagtaagctgttgagtggaaccatatcgagcacctgagttgacttgttttgtcccttgtccatctccatggccactccacagtcccacttccgttttctcgctttctcactctctatcatccatatctctctcttcctctccacaaccgcaacccaacaaccgctcctcgaagaacaagacactcccatcacgcacttccagcgctacctccgcattaacacagcccacccaacccctgactacacctccgcggtctccttcctcaaagcccaggcccaaagcctgggcctcaaaacccaaaccctcgagttcgtccaaggcaagcccgtcctcctcctcacgtggccgggctcaaacccctccctcccctccctccttctcaactcccacctcgactccgtccccgccgagcccgagaaatggctccacaatcccttctccgcccaccgcaccgcctccggcgccatcttcgcccgcggcgcccaggacgacaaatgtatcgctattcagtacctggaagccatccgcaacctcaaatcccaatccttcactccacaccgcacaatccacatctccctcgtccccgacgaggaaatcggcggcatcgacggggccgccaagttcgtggagtccgaggaattcaacggactcaacgttggattcgcgctcgacgaggggcaggcctcgccgggcgatgaatttagggttttctactccgatagggttccgtggaacgtgaagattagggctaaggggaggcccgggcatgggtcgaggatgtatgatgggagtgcggtggagaatttgatggagagcgtggaggtagtgagtaggttcagggagagccagtttgatgtggtgaaggccgggatagctttgaatggtgaggttgtgtcggtgaatccgttttatgt

SEQ ID NO: 7358 - DNA, 908 bp, Glycine max
aattttcttctaggtcttcttcttttctcatctcacggctcgagataaatagttgctcagatccgtgttactctccccagacccaattgcgtcaaattcacgatgatcaccatcatgatggtcgccgacaccgtcgccgtaaccgccgccaaaggcctcggcgtccttcgggcctatcaatccacctgtaacttttccgtcgccgatcagatctccgccatgattcagacttacgacgccgtcgcgccgccgccggtcaagcctactacctacaggctaagacgccgaacgctcctccggagaaaacaacttaccaaacgcagattatcaggtgacgactccggggacgccgggaacgaggggttcctcttcggtgacggcggagacggtccttttggaggtggaggtgacttcggtggcggcggcgtcggtggtggtggttggaatttcaatagatttgggggtggaaacaattgggatgaaccgtcatcttcggttccggaccctgcgttcgatttcgtgtatcaggtgctgtcgtggattatgctctcgaattgcttgcatttttcgttcaagaggattgttcgaattgttgcagcggggtcgattgtggattccgatagggaaaaggttcccgccagattggttccaatttgctgatttggtacccttttaagccggttcatggatcaaatcatccataattacgcattgcatccctgtttaaattgtgcatttgctgtaaataatgttgtatataataatttatcatttaattgactaattccaaggtaattattttgctgtacttatggtttgtcttagtgaattgtttataatttgatagatagtttggacccattgactcgtttatagctaagttataccccttacatgtttagtggaag

SEQ ID NO: 7359 - DNA, 1627 bp, Glycine max
cgtcaactcaaccaacaaaacaagcgttccgtaccgctgcgtggattcagcctccaaaggcgccactcccatttctctctctcattcttcttcagatgccaaacctaacctaacctcccaaacaaactcaaccttatcatcatcatcgtcgtcgtttaaataaattctgatctccacgcacacgctctgagtcagatcatgctgcgtttgtgctacggccctctggattgctgcttccgacgccgccgtgccgacggactcctctggcacaccgacttgaagccccacgcctccggcgacttctccatcgccgtcgcccaggccaattactgtctcgaggatcagagccaagtcttcacctccccctacgccacctacgtcggcgtctacgacggccacggcggccccgaagcttctcgattcgtcaacaagcgcctcttcccttatttgcacaaattcgccactgagcaaggagggttgtctgtggatgtgataaaaaaggcattcagtgccacagaggaggaattcttgcatttggtgaagctatccttgcccattagtccccagattgcttccgtcggatcctgttgcctttttggtgcaatttctaataatgtgttgtatgttgccaacctcggcgactcgagagctgttcttggcaggagggatacggtgagaaagaacagtccagtggtggcacagcgtttgtcaacagatcataatgtagctgatgaagaggtgagaaaagaagttgaagctctccatcctgatgactcgcacattgtggtttataaccgtggagtttggaggattaagggcattatacaggtgtcaagatctatcggtgacgtgtatttgaagaaacctgatttctaccgagacccggtttttcagcagtttggaaatcctattcctttgaagcgtcctgtaatgacagctgaaccatcaatcattattagggagcttgagtctcaggatttattcttgatatttgcatcagatggcctctgggaacaattaagtgacgaggcagcagttcagatcgttttcaaacatccaagagctggaattgccaagagactggtgagagctgctcttcatgaagctgcaaagaagagagagatgagatacgatgacataaagaaaattgacaaaggaataagacgacacttccatgatgatatcactgtagttgtaatctatcttgatcaccatgcaggctcctctaatggtagatttaagcaaactggtgttgactatacaactgcccctgttgatattttttcccttaatgcggatgaagcagaaaagcgtatgcttggtacagttgcctaaagagtgaagttgcttcaaaggttcatacactgacattatttgaggcgataattatttatagttgaagattaatattgttggtaaatgaagagaattctcgagaaaatatataaattactgcatagatatagtagctgggagttgctgacagattctttctggtgatatgtatatgtatagttgtgaagtctattttttgggtttgatggtatcagttttgtttttctttggaaagaaagaaaataaaattatattgattgggttagtcacgaaaaaaaaaaccaaaaataaa

SEQ ID NO: 7360 - DNA, 849 bp, Glycine max
tgtacggctgcgagaagacgacagatcccgacaacgcatcctaaataagcatcttaattcatagtctcttggtccttccttccttcttctgctcaataagtgtgtgccactctaattaattaccacccccttctagacatagttcttctccctctgttctctattctctacactgtgaaaccaagatgaaggtagcatttgcagctgttctacttatatgccttgtcctcagctcctccttgttcgaggtgtcaatggctggttctgctttctgttcctccaagtgctcgaagaggtgttctagagctgggatgaaggacaggtgcatgaagttctgcgggatttgctgcagcaagtgcaactgtgtgccatctgggacttatgggaacaagcatgagtgcccttgctacagagacatgaagaactccaagggcaaggccaaatgcccttgattatttttttttttcaccatccacacatcaacttcaagcctttgattcagtcactaccgtgcatgtatatctccaccttagagatattccaccatggacccttgctagctgattatgtttactacctttattgttgtgtttgtgtattacataaagagaaaaatttggtcactttagttggatcggatatgcatgatacatgagagtgagaataaatcggggtcttctttgtcctcgtgtgaatttggtctgtcttaattaggctctatggatagttaataaaaatgaattctccttttgtaaaaagagaaaaatcaccttttaatttctgagaaataactttttgttctttaaaaaaaaaaaaaaaaaactcgagactagttctctctctctctcc

SEQ ID NO: 7361 - DNA, 709 bp, Glycine max
cggagaagcggacaacacatcctaaataagcatcataaattcatagtctttcggtccttccttccttcctccgctctagtgtatgccactctggttaattatcatacccccttctaggcatagttcttctccctctgttctctattctacactgtgaaaccaagatgaaggtagcatttgtagctgttctacttatttgccttgtcctaagctcctccttgttcgaggtgtcaatggccggttctgctttctgctcctccaagtgcgcgaagaggtgttctagggctgggatgaaggacaggtgcacgaggttctgcgggatttgctgcagcaagtgtaggtgtgtgccatctgggacttatgggaacaagcacgagtgcccttgctacagagacatgaagaactccaagggcaagcccaaatgcccttgattgttaatttcaccatgcatcaacttcaatctcaaacctttgaatccttcactcttgctagctgattaagttttctacctttattattattgtgtttgtgtatttatataaagagaaaaatttggtcactttagttgaatcgggtatgcatgatatacatgagtgggaataaatcgtggtcttctttgtccacctgtgaatttggtctgtcttaataaaagtgaattctcctgatagtatttgtttggaaaaaaagaaaattcaccttttaatttcga

SEQ ID NO: 7362 - DNA, 1611 bp, Glycine max
  misc_feature (1602)..(1606): n is a, c, g, or t
accggttaggcattcccggctcgacacacgcgtccgggaatgaaaacgagagtgaagcagctaagaggggaagagcgatggaaggtgggtacggaaaccgtggttcctctttctcccaatcacgtcgtggtcgaggtcgcggtcgcggtcaaagatttccttcgaatcaatccaaagtttcaagttttgccgaaaggggcactccttcttctagtagtgccaacagagcttctgcctctgttatcagtaacacgctagaagacgacgcacaaccatcttccaattttgttggaacatgtccttacatgtgcccagaaagagagaggatccagcgtgaaaaactgcgagatttggcaatttttgagaggctacatggaaatcctggaaaatcatccccagctcttgctgtcaagaagttttgcagaactatatccaccaaatatgttcaagcatcagatatgcggcctattactgttttggaagacactttaaattaccttttgagtttgctggaatctaaagagcatttgtttgaagtagttcatgactttgtcttcgatagaacgaggtccatacgccaagatattaccatgcaaaatattgtaaacaagaaagcaatttacatgtatgagggaatggtcaaattccatgttgtatctcattacaagctttggtgttctattgtctgatccaaacactgcatcgttgcatcatctcaatatggaacagctcacaaagacattggcttctttgttcaatctgtacgaagcaaatcaaaattcaaatcatgtgcatgagaatgaagctgagttccattcattatatgtgctgcttcatcttggttcttacagccaaccgatgggggagccactttctttgtggtttcaacgtgtatcaactccagtattgaagtcaaaagaaatgtgttttgctaggagaatcttacgatcatttcgacttggtaattataaggatttcttctgtactgcagcagctcaggcatcatatctgcagttctgcattatgatgccttatatcaatgaagttcgtgtgctggctttatcttgcataaattttggtggatacaagcttcatccatatcctctgttggatctttcaaaactcctgttcataaaggaatcagatttagaatccttttgcaatcattgcggtcttgagactggtacagatgaatctggaaataagctacttcccacaaagcaaactacattcagtcatcccaaaggtgggttccaaagatatagtttcttgggcttgcaagaatatgaaaggtagtttcagagcttttgtagatcctggatggccacacctattttcactactttccctaggtattatcgagatcatacttggtgttggtgatacaatgtgactatgatcgttcacaagtgtctctttgtggtgcttttgaaaacatgggaacaaattgtactatacacaactatttttgcacccttatgccttattgtacattgagtctgtatttggtacgcgacaattgtataactctttaagctatctgtaaaccagtgtatgtaacattattatggtaaggtttctctttacttgcaaaaaaaaaannnnnaaaaa

SEQ ID NO: 7363 - DNA, 1019 bp, Glycine max
tcgagtcagcctcgtgccccccccccccatcagaatccacagtttccgttaacgctctccaatacaaaataaccactcactgaatattcggtcgaagatgtccgccgccgaagaagctaaagttcccgccgtcgaaaagccggtggaggaggtgaaggcgccgaagcttgccaaggagaagaaacctaaggctccgaaggaaaagaagccgaaacaggccaaaactgcttctcatcctccatatctccagatgattaaggacgctttgattgctctgaacgagaaaggaggatcgagtccatatgcgatagcgaagtacatggaggagaagcacaaggcggtgcttcctgcgaatttcaagaagatactaggtctgcaactgaagaaccaagctgcgagagggaaactcgtcaagatcaaggcttcgtacaagttagccgaagccgcgaagaaggtgaaggagagcaccgccaaagcgacgaaggaatcgcgtccgaaacgaaacaaaatcgcaaccgccgttgctccgaagaaaaccgaggcggttaaaaagcccgcgaagaaggtcgggccgaagaaaacgaagaaagtgtcgacgcctgcgaagcccaagcagcccaggtccattaggtctccgaccaagagggcccgtaaagctgccgtcgctgcggcttgatgtttgatgtttttcttgtttagttaaaactctggcatataatatatgtagatatgaaaaggtgtgtgttaaccttgttgcacaatcttgaatatagttgtgtggtttaggatcgtagatagtttagtgttctgcaatgttcgctctaagaagtgatcaattggagatgaattttactgttatcaatctccttctttcaagttgattgttttttttccccggctggttctatcgtcgaattttctggaacgccgaaagggtttgtgatgccatgcgggtgcggttgaatgtttttaattggccggttgttcttttttatttttggtggtttgtgattgggctt

SEQ ID NO: 7364 - DNA, 927 bp, Glycine max
  misc_feature (4)..(4): n is a, c, g, or t
  misc_feature (6)..(6): n is a, c, g, or t
ccgngnatcgcgtcagctacgtaggcccccccaccgtttcggttaacactttccaatacaataatcactaactgaatattcgatcggagatgtctgccgccgccgaagaagctaacgctcccgccgtcgaaaagccggttgaggaggtgaaggcgccgaaccccgcgaaggagaagaaacctaaggctccgaaggaaaagaagccaaaacaggccaaaacagcttcacatcctccatattttcagatgattaaggaggctttgatcgctttgaacgagaaaggaggatcgagtccttatgcgatagcgaagtacatggaggagaagcacaaggcggtgctccctgcgaatttcaagaagattctaggtctgcaactaaagaaccaagctgcgagagggaaactcgtgaagatcaaggcttcgtacaagttaaccgaagccgcgaagaaggagaacaccgccaaagtgacgaaggccaacgctgagaaaaaggaatcgcgtccaaaacgaagcaaaaccgcaaccgccgctgctccgaagaaaaccgaggcggttaaaagggcagcgaagaaggtagggccgaagaagacgaagaaagtgtcgacgcctgcgaagcccaagcagcccaagtccattaggtctccaaccaagagggcccggaaagcagccgttgctgcggcttgatacttgtcttgtttagttaaaactatgacatatatatgtagatatgaaaaggtgtgggtgtgggtgtatgtgtgtgccttgctgcacaatcttgaagaaagttgtgtagtgtaggatggtagatagtttagtgttctgcaatgttcgctctaataagtgatctaatggagatgagttttactgttttaaaaaaaaaaaaaaaaaaatagactcaaaactagtacacgcacgcgtgcgtccgcgt

SEQ ID NO: 7365 - DNA, 2219 bp, Glycine max
tcgagtcagctacgtagggcccccccccccctagaaaatcgaaagatcagaaagtacccccaaaagggaagctattagcagaaaatcaggtaagaaaaggaaaaagacagcagagaatggacgattcaggaaaggaagttatgctaagaaaaatatactttcagatgattccactgaagataaacccaactcacagccaaggaggattcttcgaagtaagaaagccaggcatgttgagagagactgtgctgctttgaaacgggattattctcctccatatcatcatagaaaaccaacaagccaccaaacaaacttcactgaaagtgatgcagtttcggatgattcgcttgatgatgatgatcacatgcagcaaagcagaaatgttaaagttgaaaaggctaaatttatggacaatgatgtggtttcaaatgatacgatggactatgactctgattgccagcagagggaagaacatagcagcaagcaagttgaagatatggagagagatgcaaattcagaagattttttggatgttggttctcttcagctgcaacggaagacttccagagccatgcatgccaaaagcatcaatgaagaagatataatttctgatgaccaaatggagagtccttttcgaaagaggcaaaagagaattcctaaaagcaggcagggcaaataccttactggaaaagttttattatctgacgaccaactagagctgaaaatgcagaagcggcaacggacgaatcctaaaagcaggcaagccaaatacctcaacgaagaggatattgcatcagatgaccaattggaggaccattatcgtagatatcaaaggaatcctaaaggcagacaggccacatgtgtagcaggggaagatgaaatgtctgatgaccatttggagaatcattgtcagaagcagcaaacaaatttctctaggaaaaggcaaaacaaaggtgttgttagagaggttaaaaacgaaatgtgtgatgaccaattggaggaccattttctgaagcagcatagaagatttcctaagagcaggcaaaataaacacactgagaaagaaatcatggatgacttagctgagaataattctcatctgctgcatagaactcctaaaaggaagcaagctaaatgcatggaagaagatgatatgaattcagatgatgaaatggaagatgatcagccgctgaggagagcacttcgaagtaaacaagctaaaccaaagacacttctgaaacaagctaattccttccaagcgaaaaagcaggcatctcggcccataaaacagggctctcggttgcttgtgaaatcaaaggctcctcagcaaataaaacagcctgctcatttgcggaataagcaatctaataacacccaggaatttagtttatatatggaagaggaggaagatggtggacctagcacacgccttaggaagagagccacaaaagctcaggaatctgaaggaaaattgaaaggacaagcaaacaaaaaggaagaaggtgaagaatgctgcagctgcaaaggtttcagttggccatgccaaaatgaaggatggggaagccgaatatacagtgtgatattgatgggtgcactatgagttttgggtcaaaacaggagctgatgcatcataagagaaacatctgccctgtaaaagggtgtgggaagaagtttttttcacacaagtatctggtgcagcatcgtcgagttcatgaggatgagcgccccttgaagtgcccttggaagggatgcaagatgactttcaagtgggcatgggctcgtacagagcacattcgagtccacactggtgcacgaccttatgtatgtgctgagccagattgtggacaaacattcagatttgtttctgatttcagtcgtcataagcgaaagactggtcattcagcaaagaagaattgtcaatagcaagtggaatagatgtttaattgttatttagcatgacattttatgaatttttgaatccattgctcaattgacccggctaggactaggcgctaggatttcgtaacagtttaggatgtccctgcaattgccatttgtagttatctgttaattctgtttgcctttcgggtcttcaacccatttgtttattacaattaaagcaattgcttggatccagaaacatgattctcatcgagttcatatcgcttgcaattgttgttccaacctttatgtctcttgaatcgtgattattttattgc

SEQ ID NO: 7366 - DNA, 2409 bp, Glycine max
gtagaaccaaaggtataccaaagaagggtcaacaggcagaaaaaggttgttgctgggaaatggtgtggcaaagtttggatgtccaatcaggtccatccccttttagcaaaaagagactccgaagatgttgaggatgagaaactcttacttgggtggatattacctgatgagaaattggagagatcagaaattaccctcaaaagtgaaactactagcagaaaatcaggtaagaaaaggaaaatgacagctgagaatggacgacccaagaaaggaagttatgctaagaaaaatgtagttgcagataattccactgaaggtaaacacaactcacagccaaggaggattcttagaaataagaaagctaggtgtgttgaaagagaccatgctgctttgaaaggggattattgtcccccatatcatcggaaatctataagcaagcaagcaaactgctctgaaagtgatgcagtttctgatgattctcttgatgatgatgatcacatgcatcataggaggaatgctattgttgaaaaagacaaatttattgacaatgatgtttcaaacgatacagtggactgtgattctgactggcagcagagggaagaacttagcagcaagaaagttgaagatacagagagagatgcaatttcagaggattctttggatgtgggttctcttcagttgcttaggaagaattccagagccaagcatgccaaaaacataagtcaagaagatataatttctgatgaccaaatggagagtcctttgcaaaagcggcaaaggagaattcctaaaagcaggcagggcaaataccttactggaaaagatataatatctgatgaccaactagagcataaaaagaagaagcagcaacggaagaatcctaaaagcaggcaagccaaatacctcaatgaagaggatattgcatcagatgaccaattggcggccccgtaggccccccccccgagaaagaattctagaggaagacatgccaaatgtgtagcaggggaagatggcatgcctgatgaccaattggaggatcgttgtcagaagcagcaaacaagtttctctaggaaaaggcaaaacaaaggcattgatagagaggttaaaaatgaaatatctgatgaccacttggaggaccattttctgaagcagcaaagaagatttcctaagagcaggcaaaacaaacacactgataaagaagtcatggatgacttagctgagaataattctcatctgctgcatagaactcccaaaaggaagcaagctaaatgcatggaagaagatgatatgaattcagatgatgaaatggaagataatcagccgctgaggagaacacttcgaagtaaacaagctaaaccaaagacacttcaacagatgaaacaagctaattccttccaagcgaaaaagcaggcatctcggcccataaaacagggatctcggatgcttgtgaaatcaaaggctcctcagcaaataaaacagccttctcatttgcggaataagcaatctaataacacccaggaatttagtttagatatggaagaggaggaagaaggtggacctagcacacgccttaggaagagagccacaaaagctcaggaatctgagggaaaattgaaagacaagcaaacaaaaaggatgaaggtgaagaatgctgcagctgcaaaggtttcggttggcgatgccagaatgcaggatggggaagcagaatatcagtgtgatattgatgggtgcactatgagttttgggtcaaaacaggagctgatgcatcataagagaaacatctgccctgtaaaagggtgtgggaagaagtttttttcacacaagtatctggtgcagcatcgtcgagttcatgaggatgagcgccccttgaagtgcccttggaagggatgcaagatgactttcaagtgggcatgggctcgtacagagcacattcgggtccacactggtgcacgaccttatgtatgtgctgagccagattgtggacaaacattcagatttgtttctgatttccgtcgtcataagcgaaagactggtcattcagcaaagaagaattgtcaatagcaagtggaatagatgtttaattgttatttaacatgactttttatgtatttatgaatccattgctcaattgacccggctaggactagggtttagtaacagtttaggatgtccctgcaattagcatttgtagttaactgttaattctgtttgcctttcgggtcttcaacccatttgtttattacaattaaagcaattgcctggatctagaaacacgattctaatccagttcatatcacatgcaaaattgcaaatgttgttccaaagtttgtctcgtggatcgtgattattttattgcaatgcaattccccaaatccccattctatctgctttcaaaaaaaaaaaaaaaaa

SEQ ID NO: 7367 - DNA, 1466 bp, Glycine max
cgagcctcacccgtccccaaaaccctaatcgaggttctctcctcctcactatatattgcttgtgtcgctggagtccatcgcttagaaaccaaaaggctctctcacgcagtcgcagtgagtgaaaaggaaaaccctaattgcggtattctcagtgccttcgagagaaagaaaaaatggcagataatcttgttctccgtggcaccatgcgcgcccacaccgacgttgtgacggcgattgccactcccatcgacaactccgacatgatcgtcaccgcctcacgcgacaaatccatcatcctctggcatcttaccaaggaggacaagacttacggtgtcccccgccgccgcctcaccggccattctcattttgtccaggacgtcgtcctctcttctgacggccagtttgccctatccggctcctgggacggcgagctccgcctctgggaccttgctgctggcacctccgctcgccgctttgtgggccacaccaaggacgtgctctccgtggccttttccattgacaaccgtcagatcgtgtctgcctctcgtgaccgcacgatcaagctgtggaacaccctgggagagtgtaagtacacaatccaagacggcgatgcgcattctgattgggtaagctgcgtccgtttcagccctagcacccttcagcccactattgtttctgcctcgtgggaccgcaccgttaaggtttggaacctgacaaactgcaagttgaggaacacgcttgctggacacaatggttatgtgaacactgttgctgtttcccctgatggctctctgtgtgccagtggtggcaaagatggggttattcttctgtgggatttggctgagggtaagcgtctttactccctcgatgctggttctatcatacatgcgctctgcttcagccccaacaggtactggctttgcgccgccactgaacagagcatcaagatctgggatttggagagcaagagtatcgttgaagatttgaaggttgacctaaagactgaggctgatgccaccaccggtggtggtaaccccaacaagaagaaggttatctactgcacaagtttgaactggagttcggatggaagcactttgtttagtggctataccgatggcgtggtcagagtttggggtattggtcgttattaggttaagctgtttagtgctttcagatgcgaatctgttttgagttttgggacaagttagttactgctttactgtagaattgatttttatgttgaagaccgtggcatgaggccttttatttatttttaaaacgttcgttttggttattacttgttacatggatatcttaacatcttggtttttctccggtcaccaatattatctttacttcggaatatcagatagtctcgatttaaagagtggctctggcgctgttgctgtttctcttttaaggttgacaagacaaatttccccttaaatcagggtgtcatttgtacc

SEQ ID NO: 7368 - DNA, 1599 bp, Glycine max
ccaaaaccctaattgaagttctctcctccacactatattctcgtcgcctcggcagggcccctccctaaaaggctctctcttgcagtcgcagaggaaaaccctagctagtagtctcagttcgtttgagagagaaaaaatggcagagggtctcgttctccgcggaaccatgcgcgcccacaccgacgtcgtgacggcgattgccactcccatcgacaactccgacatgatcgtgacggcgtcgcgcgacaaatccatcattctctggcacctcaccaaggaggacaagacctacggtgtcccccgccgccgcctcaccggacattctcacttcgtccaggacgtcgtcctctcatccgacggtcagttcgccctctccggctcctgggacggcgagctccgcctctgggacctcgcggctggcacctctgcccgccgcttcgttggccacaccaaggacgtgctctccgtggcgttctccatcgacaaccgtcagatcgtgtcggcctctcgtgaccgcacgatcaagctgtggaacaccctgggtgagtgcaagtacacaatccaagatggcgatgcgcattcggattgggtaagttgcgtccgtttcagccctagcactcttcagccaaccattgtttctgcttcatgggacaggaccgttaaggtttggaacctgaccaactgcaagctgaggaacacccttgctggacacaatgggtatgtgaatactgttgctgtttcccctgatggctctctctgtgccagtggtggcaaagatggggttattcttctgtgggatttggctgagggtaagcgtctttactctctcgatgctggctcaatcatccatgcactctgcttcagccccaacaggtactggctctgcgccgccaccgagcagagcatcaagatctgggatttggagagcaagagtatcgttgaggatttgaaggttgacctcaagactgaggctgatgccacctccggtggtggtaacgccaacaagaagaaggttatttattgcacaagtttgaactggagtgcggatggaagcactttgtttagtggctataccgatggtgtggtcagagtttgggctattggacgttattaggttaagctttttagtgttttcagatgcgaatctgtttttgagttttgggacaaagttagttactgctttactgtagaattgatttttatgttgaagaccgtggcactgaggccttttatttatttttaaaacgttcgttttggttatttacttgttacatggatatttcaacatctttgtttttctccggttaccaatattatctttacttcagaatatggttgagatataatctcaattaaaaaaaaaaaaaaataattaaaaaaaaaaaattgaaggttgacatgtcactttttacccgtaagggtgccattcataacttcttttcattttttcctatcaagtatgcgttttagctccgcgttaattaaacgctcaaaatcagtctctctctttttgtctttgattatttaaccttcttggtcaagctctaatttcaagcaacgttgttaataaactgaggtccatcctaatttagtctgtgt

SEQ ID NO: 7369 - DNA, 1535 bp, Glycine max
  misc_feature (3)..(3): n is a, c, g, or t
  misc_feature (5)..(7): n is a, c, g, or t
gangnnntatacggctgcgagaagacgacagaaggggacattcaatcacacacacatgcccctatcttccatagctacctagattattcactccctccctaacaagccacaccgtttcttgctccaatggcagctttggatctcacaataagcatgttggcactcatagttgttgttgtttctcttggcttgtggggtggtgttcaaggtgcgccacaagttccatgctacttcatttttggtgattctttggttgataatgggaacaacaaccagctccaatctttggctagggctgattacttgccttatgggattgacttccctggtggaccttctggaaggttttccaatggaaaaaccactgttgatgcaattgctgaacttttgggattcgatgattacatacctccatatgctgatgctagtggcgatgctatcctcaaaggagtcaattatgcttctgctgctgctggaattagagaggaaactgggcagcaactgggagggcgcattagttttaggggacaagtgcaaaattaccaaaacacagtgtctcaagtggtaaatttactgggaaatgaggactcagctgcaaattacttgagcaagtgcatatactcaattgggttgggtagcaatgattacctcaacaactacttcatgcctcaattctattccagcagcaggcagtactcaacagatgagtatgctgatgttcttattcaagcatatactgaacaactaaaaactttgtataattatggagcaaggaaaatggtgctgtttggaattggccaaataggttgcagcccaaatgaattggcccaaaacagcccagatggtaaaacatgtgtggaaaaaattaacactgcaaaccaaatattcaacaacaaactgaaaggtctcactgaccaattcaacaaccagctgcctgatgcaaaagtcatctacattaactcgtatggcatctttcaagatattataagcaacccttcagcctatggtttcagtgttacaaatgctgggtgctgtggggtaggaaggaacaatggtcaaattacatgtcttccaatgcaaacaccatgccaaaacaggagagagtacttgttttgggatgcttttcatcctactgaagctggcaatgttgttgtggctcagagagcttacagtgctcaatctgcatcagatgcttaccctgttgatatccaacgcttagctcagatctgatctctgaacaatgaacatggtctagagggtagtggctattaagctagtatgccacaaccacatttaatgttcttggaatgtgttacatcttttaaggcataagagtcttaattaagttttctctctttttcttacatattcacatatgctaaatgttcatggtttcacaagtacaggtgtaatttgtggaaaagttttggaagattgcttatttaattatagtgaataatagtagtatgctgttggctgatcgattctccttgtgaatgtttattccaaaatgattaattaagagaacgttcgca

SEQ ID NO: 7370 - DNA, 1285 bp, Glycine max
  misc_feature (1087)..(1087): n is a, c, g, or t
  misc_feature (1095)..(1095): n is a, c, g, or t
  misc_feature (1253)..(1254): n is a, c, g, or t
  misc_feature (1259)..(1260): n is a, c, g, or t
  misc_feature (1266)..(1267): n is a, c, g, or t
  misc_feature (1277)..(1283): n is a, c, g, or t
cgagaagacgacagaaggggataggtggcgtttcaatgcgtgaaaccaaactagcaggatgatagtgcctccattaaacacgaaagtcgcaaagagacagtgatcttctcgttcttgtctgaagaagtcgatcatctcccaccgaagaaacagagcagaactgaactagcattgaccaaaaagaaaaatgtgcgctttgagagcgttgactaggtccgtatgcaacagcagctcctatgttaaaacttccaaaccctatctcattctcaatctcatcacccatcagcaccagacccgtagaaatcttattcttgagtcatccgcttctgaattcgtcaggcttcacaaactcactggccctgattccgggattgtcgaaattagcttggacaggcctcaagccaaaaatgctatagggaaagagatgctgcgaggcctgagtcatgcgtttgagttgattaatcagaaatcttacgctaatgttgctatgatcagtagttcagttcctggggtattttgtgctggggctgatttaaaggagcgcaggaccatgagtcagtcagaaactaagatttttgtgaattatcttcgctccacattctcatctctagaggctgtcaatgtaccaactattgctatgatcaggtcttgaattctaaagatcgattagaaggtttggctgcatttgctgagaagcggaaaccaaggtatgttggtgagtgaaaggagtggtctttcgctgattgggtctagagaggttcatctatcatgtagattagagtcatctagagcctggagtcaagttcctagatgagaaaatctcataactatttgctggggacaatctcttccccttttgagtaaagtcatcttcctgaagctgaaaagtgtctctaatatcaagcaccttgagatggctttgagctttttcttcatcatttatattattgttttaaagattcaaaattttcttttcgatgttttctggcaataaattaatctgtttgggaacttggagtgtaaacttgtggtgattcaatgtaaagaataaagtccatttggataatcaattaacccttgggaaagngggggccnccccccctgtatattacttttcaacagttgatggatggaccagctattggccaacaccaaaatcacactgaggggaagacaatgtgattttgtgtgttggggaaagggaggggggtgatgtttagtttgcttttgctcctaagcctatggttaacatnnaagtnnaaagannaaatggaatnnnnnnncg

SEQ ID NO: 7371 - DNA, 2347 bp, Glycine max
  misc_feature (6)..(9): n is a, c, g, or t
  misc_feature (11)..(13): n is a, c, g, or t
ttaatnnnncnnnatgctttttatatatttaaaaattaaatttaaattttttaatttttagagaacatctcccactttcatataaaattgaacatttttctattttttttacacgtgctactataatcaataatgttatataacgtactatgtggtctcaggttggaccaaaagaagagacaactgtggttgagaaaactgggaagagtgaagacaaagtgaagaagatcatcactattatcatttcaatggctacccaaacccaaacacagtcacatccaaacaccaccactatcgacccaaacagcggcttctgttcggacgcgtgggccgtcccgtccctccgtccaaacgttcctctccctccgccctcccaccccccctccccccccccccccgcccgcccccccccgccccccgccgccaccgccaccgcctcctcatccatcacctccgccatcatcgacgccgccaccgaccgccacctgtcctactccctcctcctccgccaagtcaaatcccttacctcctcccttcaatccctcacacctctctccaaaggccacgtggcactcatcctcaccccttcctcccttcacgtccccgtactctatttttccctcctctccctcggcgtcaccatcgcccccgcgaatccactcagttcccaatccgagttgactcacctggtcaaactcgcgaaacctgtcatcgcgttttccacctcgaacgccgcgaaaaacattccctcctccctcaaattcggcacaatcctcctcgattcccctctcttcctttccatgctcaacaacaacgaatacgtcaacgccgattcacgaactcgccgagtcgaagtgagtcagtctgactcggcggcgattctgttctcctcgggaaccacggggcgcgtgaagggcgtgctccttacgcaccgcaacttcatcgcgctgattggagggttctatcaccttagaatggtggtggatgatgatccgcacccggtcagctacgtaggccccccccccttccacgtgttcgggttctttatgctggttagggccatcgccgtcggagagacgcttgtgttcatgcataggtttgatttcgaagggatgctgaaagctgtggagaggtatagaatcacctacatgccggtgtcgccgccgctcgtggtggcgctggcgaagtcggaactcgtgaagaagtatgatatgagttcgctacggtatttgggcagcggcggcgcgccgctcgggaaggaggtcgccgaggactttagagcccaattccccaacgtggaaattgggcagggctatggtttgactgaaagtggaggaggggcagctagagtgttggggcctgatgagtctaagcgccatggttctgtgggtcgactatcagaaaatatggaggccaagatagtggaccctgttactggagaagcattatctcctggccaaaaaggggagctctggttgcgaggtccaacaatcatgaaaggttatgtaggagatgagaaggccacagctgaaacattggattcagaaggatggctgaagactggtgatctttgttattttgactctgatggtttcctctacattgtagatagactgaaggaattgatcaaatacaaagcttatcaggttccccctgctgaattggaacatatacttcacaccaatcctgaaattgctgatgctgcagtagttccgtatcctgatgaagaggcaggacagattccaattgcctttgtagtaagaaagtctggaagcaacatcactgcagatcaggtcatggagtttgtggcaaagcaggtttcaccatacaagaagatacggcgagtttctttcatcaaatctatcccaaaatctccggctggcaaaattttgagaagagaattagttgattatgctctatcctgtggttcatccaaattgtgatcaagaaaagagcatggagaaaatgtacttggcctcgaaactattgtgacctgttcagatgcaacaaatgcacgatatcgtgtgaagcatctggcctaccatgtggttcatcgccctagtccaccactaagaatgttggtggtttctacccaaaaatcagcaatcattttattcacgcacacctttcagaaatttaatcattttaatcaactacctcggtttccctcattttatttaccaaaataaattatgcacctttaggtttgttcacaaaataatgtgtgcaagaaacattttcattcgttgtaaactatttgttcattttgtatagttgcatttatatattttctttactcttcaaaaaaaaaaataaaactcgaaactagttctctctctctctctcc

SEQ ID NO: 7372 - DNA, 1046 bp, Glycine max
cggtacccaaattagtggctagtgttgagtgcctacgctgaaatttgaggagcaccagaaactggtaagggtgctgcgtccactcattcattactcactatactcatacggggtttctaaatcatatgccaaattagtagacaccctatgaattgttgttctgccatggcgtcccttctcaaatcaccttcctttctctctcctttgaaccaaaagttgaattatgtaagcttttctcccatgaccacaaacctgcaatccaaattttgtcgtgctagtgtaagaaatgggagatggcatgttcctagtttgacaataaaatctcaggcagctgttgaaggggatgtacttgagaaagaatcagtctctatcaatgaagaaagtgattacggggtcgtttgtatgcaccatgttggaattttatgtgaaaacctagaaagatcacttgaattttatcaaaacgttctaggcctcaagattaatgaagcaaggccacatgataagcttccatacaggggtgcttggttgtgggtaggctctgagatgattcatttgatggagcttccaaaccctgaccctttaactggacgagctcaacatggtggtcgagatcgtcacacgtgtattgcgattcgtgatgtttccaagctgaaagcaatctttgataaagcggggatcccttacacacttagtcattctggaagaccagcaatctttgcacgtgatcccgatgcaaatgctctagagtttacacaagtagatggttgatgtttatggatattacttgctaggctacacccctttgtcgctataagtcaccagaatgtagaaataaagttacaaatgattacatgtatgtaaaggctgaagggattgtaactagtaagagccatagtaaagttgtttgctactctgctatgcagtggcactagcagcaatagaatactggcgttcatcttatatatagcacacctgtaaggataaacggtacgtgaatactgagaaataagattgaaagaaattagaatatggcaagtgatcttttc

SEQ ID NO: 7373 - DNA, 744 bp, Glycine max
  misc_feature (719)..(719): n is a, c, g, or t
tcgtccacgcgtgcgcccacgcgtccgcccacgcgtacgttcgactgcgagaagacgacagaaggggactaatgaaatgtacaatggttgttctgatgattctgcttatgggagtgatgagaacagcactgacactgattcttatcctgctccaaaggctcacagcaacaggaacaacctcagtgtccagaaggggaagaagaagaagaaattgaagtcaaagaaaagcaaggcacatgagtgtccaatttgcaacaagattttcaggtcaggccaagccttggggggtcacaaaaggtcccattttgttgggggttctgaggaaaacacacttgtgataaggccaagtgctcctcctgctgctgttccttgcctcattgatctcaatctaccagcaccggttgatgaatagggagaaagaaatgttggtgccaaaatcctggttttttttttttttgcatcattttgaagcatcttctgttgaggtagctgaatgtctctggagttctgaaaatgtcttgtctttatccccatatgatgaaagcaatgacaatgtacagacaagtgggtaattggtttttgttcctaaggccttagatccattatttggtaggggtagtctttctttttcatgtttatgggatataagaacttactagtttctcccctgaatattttctttacttcctttatcaagtacaactatatattcctggaantatgttcttttcatgcagatgtaac

SEQ ID NO: 7374 - DNA, 1596 bp, Glycine max
tacggctgcgagaagacgacagaaggcgactccacaaaattcatgattcatcaacgacacgacacccaaaatgaagctagaagaatcggtgtccaactccaacatcactgccccgctccttccaccggaagatccgagtccgagtccgcaaaatggatcaatctccggagcggtgttcaacataacaaccaccatgatcggtgccggaatcatgtccattccggcgaccatgaaggttttaggcatagttccggggttggtggtgatcgtgttggtggcactgataacagatgtgactgtggagtttatgctaaggtacacaagttccggtaaatcctccacttacgcgggcatgatggccgagtcctttggctccataggatccctcgcagttaagatttgcgtcatcataaccaatttgggggttcttatcatctatttcattattcttggagacgtgctctgtggaaatgagtcgaacggtatcacacacttgggtattctacaagaatggtttggcatcaactggttgacctctcgtgcttttgctcttctttttgttgcactcttcataatgcttccacttgttatgttacgtcgtgttgattcactgaggtatagttctgcaatatcaatcctactagcattggtgtttgttgtaatatgctcatcaatggcggttagtgcattgttgtctggaaaaagtcagacaccgagaatagtgcctgatttctctcaagtcactgtccttgaccttttcaccactataccagtgtttgtcacgggtttcggtttccatgtcaatgttcatcctatcagagcagagcttataaaagttgaacacatgggtttggctgcacggatttcgttgataatttgcgtggctatttactttgctattggtttctttgggtaccttttatttggggactccatcatgccagatgtgctggtgaactttgaccaaaactcccatacaagtactggtcgattactcaatgccattgttcggttaagttatgcactccatcttgcacttgtgttcccaatcatgaactattccctgagggccaacatagatgaactaattttctcaaacaaaaataagcctccccttgcatcagacaccccaagatttgtgtcactcactttgactttgctagccctcacatacttggtcgctgtggccatcccaaacatatggtatttttttcagttcttgggatccacaaccattgtttccacctcattcatcttccctgctgcaattgttctaagggacatgcatgggatatcaaagacaaaagatcaagtgatggcaatagtggtgattgttttggctgtagggacaagcggaattgctatatggacgaatttgaatggttcaggggatgatcaatgattaaccatgatgatgttatataatacccagtcttctcaaacttggtgattttttttagtaattattatcatataaaaaatcaatctatcttttcggttttctttaaaaaaaaaaaaaaaatcgattctccacataccaagtagtacacgtcaaatgacgcataagcccctcaagtgacggtcaaagtatgatca

SEQ ID NO: 7375 - DNA, 836 bp, Glycine max
cccccgcgtccgcccacgcgtccgtacggctgcgagaagacgacagaagggggcagtttcaaattttcttttccttcactttcccgagaaaaaaataacacttttcactttcttcactacgttctcacttcgatatggctcgtacgaagcaaaccgctcgcaagtccaccggtggcaaggcgccacgtaagcagctcgccaccaaggccgctcggaagtccgctccggcgaccggaggagtgaagaagccccaccgcttcaggccgggaaccgtggcgctgagggaaatcagaaagtaccagaagagcaccgagcttctcatcaggaagcttccatttcagaggctcgtgagagaaatcgcgcaggatttcaagaccgatttgcgtttccagagcagcgctgtttccgcgcttcaggaggctgctgaggcttacctcgttgggttgttcgaggacactaacctctgcgcgattcatgctaagagggttaccattatgcccaaggatatccagcttgcacgcaggatcagaggcgagagggcttagaaacaaggttgagaggtttgggtgttaggtgcttagggttagggttctggtcttgaaggatgtgtttgggagtttggttgtaggaatcctctccatctgtgtgtttatgtggaatgtgaaatgtgaatctctttgcttttgtaattatattgtgttactatgaggagttaatgaaaatgctatggttattgaagaaaaaaaataaaaaaatgtgaaaggtcttgaagaacttgatcccggagaaataaaactattctaagagtgacaatcaacatagcagtttgcgcgccg

SEQ ID NO: 7376 - DNA, 1230 bp, Glycine max
tacggctgcccggagtccccgggtcggcgtagttgaaggagcagaagaagaagaagagaaggtggtaccgccttcaattctctttttctctctccatttctcatcctcatcatcttattattcctcttccatctctattctccataacacccaccacaccacttgtgaaaaacctcattaatatcacacactgacatgtatctctgagctccaatccaatacaagaccacaccttgtcgtgtcggacgaaccttggtgtctgttttttttttttttttttcattattttctccgaagagatgaggaagggcagaggtggaggcgcctcggcggcggcggtggatgtgaacggatccattttaaaggagcctcggtaccggggcgtgaggaagagaccgtgggggagattcgccgcggagatcagagacccgttgaagaaagccagggtttggttgggaaccttcgattctgccgaggatgctgctcgtgcctacgacgccgccgctcggactctccgaggtcccaaggccaaaacaaatttcccccctctctcacctttttgctatccacaccccaccaccgatcctttcttctacactggtttccacgatcaacaccaccaccacaacaacaacaaccttaacaaccctcaaagacccacttcaagtggcatgagtagcaccgttgagtccttcagtgggccccgccctcccaccaccaccactaccaccacaaccacaactgcgacgccgtttttgactgctacgcggagatacccgcgcactccccctcttgtccctgaagactgccacagtgactgcgactcttcctcctccgtcgttgacgacggcgacgacaacatcgtttcgtcgtcgtttcgacctcccttgccgtttgatctcaacgcgctgccgtttgatgatgctgccgcggatgatgatctacgccgcaccgcgctttgtctctgatgatgattatcgtgcgatgatgatttttaatttctcatttttttacttgatttttttgttattgctatgcagaagaaatatatatttaaaatgatgatcagatgtaagattatggtaatatgatcttaattctgtgagaggaagattccgtgttggttatattttcttctttttattatttttttaaacatttttatttagaaggaaatattgaatgaaaagaaaaaagagaaagtaattatgatcgaaaagaaaaaaaaaa

SEQ ID NO: 7377 - DNA, 1266 bp, Glycine max
attagattagagtccggcatgcccggctcgaccccgttgcgagatgccggacgcgatcacgctgaagacccattttttgtattatttattaataatttatttttgtgtgtgtagttgaaggagcacaagaagaagaagagaaggtggtaccgccttcaattctctctctccatttctcatcctcatcatcttattatacctcttccatctccataacatccacttgtgaaaaaaacccattaatatatatcacacacacatgtatctctgagctccaatccaatccaagaccacaccttgtcgcgtcggacgaaccttggtgtctgtctttttttttttttttgtttcattagtttctccgaagagatgcggaagggcagaggaggaggagcctcggcggcggcggcggcggcggtgaacggatccgttttaaaggagcctcggtaccggggcgtgcggaagagaccgtgggggagattcgcggcggagatcagagacccgttgaagaaagccagggtttggttgggaaccttcgattctgccgaggatgctgcacgtgcctacgacaccgccgctcggaatctccgaggttccaaggccaaaaccaatttccctctctcacctttttgctatcaacaccccaccacggatcctttcttctacgctggtttccacgaccaccaaaacaacagcaacaacaacaacgacaaccttaacaaccctcaaagaccaacttcaagtggcatgagtagcaccgttgagtccttcagtgggccccgccctcccaccacaaccacaaccaccacgacgccgtttttgaccactacgcggagatacccgcgcactccccctcttgtccccgaagactgccacagtgactgcgactcttcctcctccgtcgttgacgacagcgacgacaacatcgtttcctcgtcgtttcgacctcccttgccgttcgatctcaacgcgctgccgtttgatgatgatgctgccgtcgtggatgatgatctacgctgcaccgcgctttgtctctgatgattatcgtgcgatgatgatttttaatttctcattttttttatctcttcaacttgattttttgttattgctatgagggaaaaaatatattaaaaaaatgatcagatgtaagattatggtaatatgatcttaattctgtcagaggcagattccgtgttgggtatattatctacaaaaaaaaaaaaaaaaaaaaaaaaaaattatttccaaggaaccattgaatgggaagag

SEQ ID NO: 7378 - DNA, 1278 bp, Glycine max
aatgacctaactttttcccacgcgtccgccctcgcgtaataatattggtggtggcagagtagaatagcagatggcgatggtttccatggcattctgtgtcagcactgcgacttttccgaatctaaacaggtgtcgtggagtggcatatgcaagtttgagcaacaaagcaagtactacatctttgggagtgcgagttacagagggagaggggaatttgccgaagcttgttctcacttccccggccggtagtgaggctgagatatacctgtttggaggttgcattacttcttggaaagttcccagtggtaaggacctcctctttgttcgccctgacgctgttttcaatgggaacaaacccataagtggaggtgttccgcattgttttccacagtttggtcctggtccaattcagcagcacgggtttgcacggaatatggattggactgttgtcgattctgaaaacacagaaggaaatcctgttgtaactctggagctgaaggatgctccttatagtcgtgctatgtgggatttcagcttccatgctttattcaaggtcacactaaatgctaaaagtcttgcgactgagctaacagttaaaaatacagacaataaagcattctcatttagtactgccttgcacacttattttcgagcttctgcaagtaacgcatcggtaaaggggttgaaaggttgcaaaactctgaacaaagatccagatcctaaaaatccagtggagggtaaggaagaaagggatgttgtcactttccctggatttgtagattgtgtttatcttgatgcttccagtgagttgcaacttgacaatggtttgggtgatctaatatctatcaagaacacaaattggtcagatgctgtgttgtggaatccttaccttcaaatggaagcatgttacaaagattttgtttgcgttgaaaatgctaagattggaagtgtccagctagagccagaacaaacttggacagctgtgcagcaccttagcatagcttgaactgtaaatgtgtttctacatcagcaattatttttgtcatatttgataccccaacaaatatgtatcttctgtattaataattttctatgccactactgtcgagggaaggatagtgtacaagagttaaacctcattacattcgtaacattatcgtaacaacaataaggaataataattttcttttatattctcaaaaaaaaaaaacaacatttttctcagtttggtttctcccaacaggcagtgaaaaaccattattccatcttcccactttc

SEQ ID NO: 7379 - DNA, 1804 bp, Glycine max
tcgagtcagctacgtaggcccccccccccccaaaaaacaaacctgtatcatcttcttactctttcgtttgtctctcttctttccctttcccctctctttcgagggtttttctttttctttttttcccccttttttatttttccttttttttttttactttctcttgtttttcagttttgcttccatttcctttgaatccccatttcttgttcctctgcaactctaaccctagaattgaagatgcaaccacagaggttaaggcagcatgccatgttgcaaccatctctctaccaccaccccgctctccttactcctcctcagatagagcctatcttgagtggaaatctgccacctggctttgattcgagttcatgccgcagtgtttatgttggcaacattcatccccaggttacagattcccttcttcaagagcttttttcaactgcaggcgcccttgaaggatgtaaacttattaggaaagagaagtcatcctatggctttgtggactactttgatcgcagttctgctgcatttgccattgtaactctcaatgggaggaatatttttgggcagcctattaaggttaactgggcttatgctagcagccagagagaggatacctcaggtcactttaatatttttgtcggtgaccttagtcctgaggttacagatgcgacattgtatgcttgcttctctgtatatcctagttgttctgatgcaagggtaatgtgggatcagaagacaggccgttccaggggatttggatttgtttcttttcggaatcagcaggatgcccaaagtgctataaatgatttgactggaaaatggcttggaagtagacagattcgttgtaattgggcaaccaaaggggccagtgccagtgatgaaaagcagagttcggattcaaaaattgtcgtggagttgatcaatggatcatccgaagaaggccaggaaacaaccaatgatgacactcccgagaagaatcctcaatataccactgtttatgttggcaatcttgctccggaggttacttctgttgatctccatcaacattttcattctcttaatgccggaattattgaagatgttagggtgcaacgagacaaaggttttgggtttgtgagatacagtacccatgctgaagcagctcttgctatacagatgggtaatgcccgaattctatttggcaaacctatcaagtgttcatggggtagcaagcctactcctctgggaactgcctctactcctcttctgccaccttctgcaaatgtgccgggcttttctctggctggtcttgcagcatatgaacgtcaaatggctttgagtaaaatgggtggtgcacacacccttatgcatcaacaaggtcaacatgccctaaagcatgtagacatgggaatgggtgctactgggactggttttgatgcaaggttccagaatgttgcaaccacccaacacctagtgtactatcagtaaaatgtgttggtgtgcaactctctgcgataaacaagggaggattaaagtatgtaagaatggttctacaataccgattatttcttccttccctgtccatctgctatgctaacttcatcctcccatttttttcttctgtgcttgtttatgtaatactacagtttttttagccgttgcatgccttaatggtgtcttctattatttaaccaatttttttatatttcgggaaggggaaataaagtccttggcatttgttcgaaaagatgatcttttaagacagaaaaaaactgaaactagtcattatcattcaaaataaagtatacattcctcgtat

SEQ ID NO: 7380 - DNA, 1753 bp, Glycine max
tccgattcggccgcccaccccccccctcaaaaacaaacctgtatcatcttcttcgtctttcctttgtctctcttctttcccctctctttcgagggtttttctttttcttttttccctttttttatttttcctttattttgtttttttctttctcttgtttttcagttttgcttccatttcctttgaatccccatttattcttcttcttctgcaaccctaaccctagaattgaagatgcagcctcagaggttaaggcagcaagccatgatgcaaccatctctctaccaccaccctgctctacttactcctcctcagatagagcctatcttgagtggaaatctgccacctggctttgattcgagttcatgccgcagtgtttatgtaggcaacattcatccccaggttacagattcccttcttcaagagcttttttcaactgcaggcgcccttgaaggatgcaagcttattaggaaagagaagtcatcctatgggtttgtggactactttgatcgcagttctgctgcatttgctattgtaactctcaatgggaggaatatttttgggcagcctattaaggttaactgggcttatgctagcagccagagagaggatacctcaggtcactttaatatttttgtcggtgaccttagtcctgaggttacagatgccacattgtatgcttgcttctctgtatatcctagttgttctgatgcaagggtaatgtgggatcagaagacaggccgttccaggggatttgggtttgtttcttttcggaatcagcaggatgctcaaagtgctataaatgatttgactggaaaatggcttggaagtagacagattcgttgtaattgggcaaccaaaggggccagtgccagtgatgaaaagcagacttcagattcgagaagtgtcgtggagttgaccaatggatcatctgaagatggccaagaaacaaccaatgatgacactcctgagaagaatcctcaatataccactgtttatgttggcaatcttgctccagaggttacttctgttgatctccatcaacattttcattctcttaatgccggaactattgaagatgttagggtgcaacgagacaaaggttttgggtttgtgagatacagtacccatgctgaagcagctcttgctatacagatgggtaatgctcgaattctatttggcaaacctatcaagtgttcatggggtagcaagcctactcctccagggactgcctcaactcctctcccaccacctacttctgcgaatgtgtcgggattttctcttgctagtcttgcagcttatgaacgccaaatggctttgagtaaaatgggtggtgcacatgcccttatgcatcaacaaggtcaacatgccctaaaacaggtagccatgggaatgggtgctcctggggctggttatgatgcaagattccagaatgttgcgaccacccaacacctaatgtactatcagtaaaatgtgttggtgtgcaactctccgcgataaacaagggaggattaaagtatgtaagaacggttttacaataccgattgtttcttctgtgcttatgtatggttattacatttgtaatactacagttatttagccgttgcatgcatgaatggtgtgtcttctattaatacctttgtgcacagcttgggaggtatctatcaacttagctgtgtaattttgccccaagtgttaaacttatccttaaaaaaaaaaaaaaaaaaaaaaaaaaagcggccgctctagagga

SEQ ID NO: 7381 - DNA, 1124 bp, Glycine max
gcaaaagacataaaatattgtcagacgatataattaaaagttttacatttctatggataaaaaccaaaaagtaccttggtgttaaacccaatcccccaaccaagccagcacaaaggtcactaataatatcaccataaaggttaggcatcactagtacatcgaaaagtgcaggattcttcacaagcatcatgcagcaattgtcaatgacaacttccacacatagttatctcaggatatttctctgcaacctcacggcaacacttgaggaaaaggccatcagtcttttgcataatattggctttgtgtatggcagaaaccctctctcttccatgagccttggcatagtgaaaagcatactcagctacccttaaacttgcttgacgtgtaatgattttgagactttctacaacacctctcacaacctgatgttcaagtccactgtactcgccttccgtattttcacgaattgtaattagattgacattatcatatcgagttttgtagcctggaagactgtagcaaggtcgaacattggcatacaaattgagctcttttctcagagtaagatttaacgaacgatgcccttttccaataggggtggccattggccctttcaagccaaccttatttttccttacagattctaaactttcccatgtcagaaagctctgcgttctagggtcaatttcagttcctacatagtgctcttcccattctattgggacatcagctgcttggaatatctgtttgacggaatcggcgatctcggggccgatgccgtcgccggggaagagagtggcgcggatcggagtggaagcagcggaggagaaggccctagggtttgcaaggaaacgacttccgaaggttcgtctcaggagctgagaagccatgctttttcaccacgcgcactttctcacgcacaacgcaacacaacgcgtaacgaagaacctaaaattaatatttgaaacgagactagagcgcaatgtattgagtagagagtattcagagagaaaagggttaatacttgattccaataggaagcaaatatcggattgttcggttaaatcaccagttgggggggcggcgcgggggcctacgctgctgtagatcaaattaaaagaatt

SEQ ID NO: 7382 - DNA, 1642 bp, Glycine max
ttttttgctctttgtttgatgataaagatgaacaaatgaaacatcatctggtgttttttttatttagcactatattattgacaaagaatactaaaacggactaccaagggttatcaatcaatgtgcattgtgaaagggtgtcctctcaatgccataagactgcactgggcaacgaatatttgaatccctgcccattccttgtctttggttgtaaaatgtcacacaaacatgggtgagttttcctttaagctgaggtaatcccattctttccgattaattggggaaatagatagaaaattgactgaaaatcaaaatcataagcaagaatttcttgctgactccaaccaaaatttaaagatgatcaatgattgcttttgtgaattcagttgtctttgaactgccaccgagatcagctgttcggtacttcccttctgcaatcgtgttgaggatagctttctgaatctgttctgctttgtcgtggaggtccaaatggcgcaacattgtaacaccactcagcagtaaagcagttggattagccaaattctttccagcaatatcaggtgctgaaccatgtacagcctcagcaagtgcaataccgccctcaccaatgttgcagcttggtgttaagcccaatcctccaatcaagccagcacaaaggtcactgataatatcaccataaaggttaggcatcactagtacatcgaaaagtgcaggattcttcacaagcatcatgcagcaattgtcaatgacaacttcctcataagttatctcaggatatttctctgcaacctcacggcaacacttgaggaaaaggccatcagtcttttgcataatattggctttgtgtatggcagaaaccctctctcttccatgagccttggcatagtgaaaagcatactcagctacccttaaacttgcttgacgtgtaatgattttgagactttctactacacctctcacaacctgatgttcaagtccactgtactcgccttccgtattttcacgaattgtgattagattgacattatcataccgagttttgtagcctggaagactgtagcaaggtcgaacattggcatacaaattgagctcttttctcagagtaagatttaatgaacgatgcccttttccaataggggtggccattggtcctttcaagccaaccccattttgccttacagattccaaactttcccatgtcagaaaactttgggttctagggtcaatttcagttcctacatagtgctcttcccattctattgggacatcagctgcttggaatatctgtttgacggattcggcgatctcggggccgatgccgtcgccggggaagagagtggcgcggatcggagtggaagcagcggaggagaaggagaaggccctagggtttgcaaggatgcgacttccgaaggttcgtctcaggagctgagaagccatggttttcaccacgcgcactttctcacgcacaacgcaggcgtaacgaagaaactaaaattattattattacaaacctggaaacgagactagaggcgcgtaatgtattgagtagaagaaggcagaacagaaatatgcgattgttcggttagatcaccagttaaagagtattctcatgtgtaaaatacatcaaattaaatctcgagcc

SEQ ID NO: 7383 - DNA, 970 bp, Glycine max
  misc_feature (956)..(969): n is a, c, g, or t
cttccctgtcagctacgtaggccccccccccttgacgctcaattcattttcttctcctctctctctctcctagggttagggttttctctcttcatcactctctgtgtcgctccgtttcaatggctcagcaagacgctcaaaacggcgggtcggagaatgccgctgctgctgctacggtgtcgtttgtcgctgtgaagccgcagctcctcgtcgaagctcccaaagccaacgacgccattctgttcttcaaggctgcgtttggcgctgaggaagttggccgtacgctcaaccctaagcgcaaagctgagcacgagctccctctcatactctccgcagaactcaaaatcgctggctccaccattctcgtcgccgacctcgttgatgacacttcttcgccagcgaaaacggggggaaacggtgtcgttttgtgcttggagacggaggacgtggatggggcagtagctaaggcggtgagcgctggtgcagttgcggagggcgaagtagcggaaggtgaagtcgcgtgctgcggcgggcgcgtggggaaggttaaggacccgtatggcttcgtttggctcttctgcactccagggaagaagtgtgctgacgtggaggcttaatggcctttgatgttgttctgagtctaattgtttggattatcagttttagttgtagaattgattagggaaaggtcgtacgtgtctagttaagacatttctcttcttcagtctttcagtcttttatatctaagtgggattagtattaatctaatggttacgcgtgtatttctattttgaatattttgaagtgcttctcgtttgtcattagactcattatgaatgacattagttgttgacacattaaaatagtcaaatttatcttctcttttgaaaaaaagaaattaaagggaattctcatttctctacctgtagttgctactaatttctgttttaatatgnnnnnnnnnnnnnna

SEQ ID NO: 7384 - DNA, 906 bp, Glycine max
acaaactaaagctggtccatacgtcttttgtcaaaaagattatctaaagcaataaaggcactgctattgccagcacttgtcaataatgcaccgagtcgagtaatcaccttttttctggatcattcatttgtatctacagcatcatgatgtaaactttgaaaaaaacaaacaaacgatgtcttaatgcaaagtaaaaaatatcatttgtttacttgataatttttaccttgattacttttattcccccgcgtccgagccagcggcctccggcccccggggctaccaactccggcttgttcagtctttcttggaactttgttactctcacacatgtctcgctccgtgcctttggtttcaaccatttttgtcttgcttctgcttctggtggccactgagatgatggggccaacaatggtggcagaagcaagaacttgtgagtctcagagccaccgtttcaaggggccatgtttgagtgacaccaactgtggctctgtttgccgaaccgaacgtttcactggaggacactgccgtggcttccgtcgcagatgcttctgcaccaaacattgttaattttaaaaaattaattaagagtgctttgatagaagatgatagatctatcatctttctactcgtgttgttaattaaccactttgtgtttgagaataagggttacccattctactatgggtttctttgtttgcctcttattttatctagttagagatccttttatgaaacgagtgatcagtgtgaaggaattatgttatctgtgttgttaatttaatattattctagtaaattttattccaacgtgactttttaaaaaaaaaaaaaaaaaaaaagaaaccgaatctattctgttttggttgggtcggcagataaaaggattttattatgctacatcct

SEQ ID NO: 7385 - DNA, 704 bp, Glycine max
tcagctacgtaggccccccccccggggacaagcaatctcaacttccaagttaggtcactcttccagatggcgcgtacaaagcaaactgctcgcaagtccaccggcggcaaggctccccggaagcagctggcgacgaaggccgctcggaagtctgctccggcgaccggcggagtgaagaagccgcacaggttcaggcctggaacagtggccctgagggagatcagaaagtaccagaagagcacggagcttctgatccgaaagcttccgtttcagcgtttggttcgtgaaatcgctcaggatttcaaaacggatctgaggtttcagagcagtgctgtttcggcgctccaggaagctgctgaggcttacttggtgggactctttgaagacaccaatctctgtgccattcacgctaagagggttactattatgcctaaggatattcaactcgccagaagaattagaggggaaagggcttaattttgtgatcccttttggttttagggtttacatgtttttatttagccctttctggtttccgtctctgaatctttcaaggtttagatttattgtaatgatgccattctgattgaagtattgaaattatgcgtattctcttcaagtgaatgtaaacgatttgtatggtctttgtggttgacttgttgactgttggctcagttgattatgcaaattgggtggtgttgtcc

SEQ ID NO: 7386 - DNA, 1475 bp, Glycine max
ctcttttcaattttcaactctctttggtatttaacttccaccccaactctccttagacttgtgcatttcctgttggctcccatagagtgtggccgtcacatcccaggatcattatgagttgtggctgctttggagcctcaactctcaagaggaaaaggaatccttctcgtactcctaatgagattgatggctttccacttgataatgttaagaatttctctgataaagacctgagactggccactgataactataatccaagcaaaaagctaggacgaggaggttttggtactgtttaccagggaactttaaaaaatggacaacaggtggcagtgaagacactttcagctgggtcaaagcagggagttcgtgaatttttaactgaaattaaaactatatcaaatgttaagcatccaaaccttgttgaattggttggttgctgcgttcaagaacctaatcgcatattagtgtatgaatatgtggaaaataacagccttgatcgtgcattactaggcccaagaagttcaaatatcagattagactggagaaaaagatctgctatttgcatgggtactgcaagaggtcttgcatttcttcacgaagaacttgtgccacacattgtgcacagagacatcaaggcaagcaacatactacttgacagagacttcaatccaaaaataggagattttgggttggctaaattgtttccagacgacatcactcacattagcacaaggattgctggaacaactggttacttggcaccagagtatgcaatgggtggccagttaaccatgaaggctgatgtatacagttttggggttcttatacttgaaataatcagtggcaaaagcagtgcaaggacaaactggggagggtccaacaaatttctattggaatgggcttggcaactgtatgaagaggggaaactgttggagcttgtggatccagacatggttgaattccccgagaaagaggtaataaggtacatgaaggttgcatttttctgcacacaagcagcagcaagtagaaggccaatgatgtcccaggttgtggatatgctgtccaagaacatgaggctgaatgaaaagcaactaacagcaccagggttgttccaggattcaggagcttcctctcaaaagaagtcatcctttgaatccactggctatcaatttagctctaacccttccagtattactcagttggccccacggtgaagcataaaccaaactttggatgtgtgaatcgcatagttaatattatagtaggaaaggagaaaaaaaaatagagagaaagaacaaagagggattatcttcttttttattttagatttttctctttttggatcttatttttaagaatgtattataattataaggtgggcttggataagtattttttgaaaaaagtggttttatgatattgcaagggtgtataaacttggtgacactaataaaatttcaaattaatccccc

SEQ ID NO: 7387 - DNA, 1405 bp, Glycine max
cccacgcgtccgcccacgcgtccgcccacgcgtccgaagacgacagaagggggcagcaaattctgtgaagatgaagttcacggtgtcaaatctatcaagctctatgttcctcctcgtgttattcatagctcttgtctctcatacacacggaagcaagatcgaccaccatagaagcaacaaacatgttgccctcttcatttttggcgattctttcttagatgctggcaataacaactacatcaacgcaacaacccttggccaagcaaatttctggccctatggggaaacatacttcaagttcccaacggggagattctctgatggacggttgatatcagatttcatagctgaatacgcaaaccttccattggttccaccatatttacaacctggcaatagcaattactacggtggagtgaattttgcatctagtggtgcgggtgctcttgttgaaacttttgaagggtcggtaatacccttcaaaacacaagcaagaaactacaagaaagtagcagctttgttgaggcacaagttaggcagttctgaaactaaatcattgttatcaagcgctgtctacatgtttagcatcggatccaatgattatcttagcccgttcttgacacattctgatgttcttaactcttactctcattcagaatatgttggtatggttgttggtaacttgacttccattatcaaggaaatatacaagagaggagctaggaaatttgtgttcatgaccttgccacccctgggttgtcttccaggcactagaataattcaattagaaggaaagggtaaatgcttacaagaactttcagcccttgcaagcttacacaatggagttctaaaagtagttctcttacaattggataagcaattaaagggctttaaatttgctctatatgatttcagtgctgatctcactctaatggtgaaccatcccttgaaatatggtttgaaggagggaaaatcagcatgttgtggaagtggaccatttagaggagtgtatagctgcggagggaaaagaggggagaagcaatttgaattatgtgacaaacccaatgaatatttattttgggattcttatcatcttacagaaagtgcttacaaaaaattcgcagatcttatgtggggcttcaccaacaactcttcaaatatagggccttacactattggagatctcttccaactcccatgacttgtttacttggctcattgtttttcttgcaacaaattaagtcaaaatgttgatcattataccttgattgtgttaacaaattgcatgtataaccgcttggtccagtaataattatttacgtaattgatggtacaatacaattataaagcttgtgtaatttaaatgaattgaattttgaagaaaggaaatgtgatgaattgtgcc

SEQ ID NO: 7388 - DNA, 724 bp, Glycine max
  misc_feature (5)..(5): n is a, c, g, or t
  misc_feature (7)..(7): n is a, c, g, or t
ccagngnaattgcgagaagacgacagaaggagcaaaagaaaccaaagaaaacgcgatggttgacgtggactttggaacctcgggctcgccgaagcgccacaaccacaacggcttcatcgtaacaatctcggcgatcttggcgctgttaaaaaagcgcaaagcagcagtgaaggcgagcaaagaggatgaattgaagaagtcgtcgcggccgaagaagcttctcagcaacataagcagcaaagcgcttttcggtcacaagaagaataataagaagcagctgcgaagcgtggaagagacacaacaagcacaagggtggggaaacggcggcgtttggcagaaggagattctcatgggtggcaagtgtgagccgttgaatttctccggtgttatttattacgatgggaatgggaagcagctaagccaaatccctctcaggtcgccacgcgccagccccttgcccggttacctcacgcgccgccaatgaatcatccatcaccaccgccacgagcgatttcagatcacgcgcgtctcttatttttgttttaattttagttttcttgaatttaatttaatttcaagcttctgtttgtttggctggttttctaggttgttgctttcttcgattttattgtttttttcatcggataaatattaattattagtacctatagtttttgttaataaaatattttcgaatttcaaactcctaaaaaaaaaaaaaaaa

SEQ ID NO: 7389 - DNA, 756 bp, Glycine max
tttacggctgcgagaagacgacagaaggggagaaacaaaagaaacaagaaaacaaaacgcgatggttgacgtcgacgttggaacctcggactcgccgaagcgccaccacaacaacggcttcctcgtaacaatatcggcggttctggcgctgctaacaaagcgcagagcagcgaagccgaccaaagaggatgagtggaagaaggaattgaagaagtcgcggccgaagaagcttctcagcaacataagaagcaaagcgcttttcggtcacaaccacaacaacaagaagaagctgcgaagcgtggaagagacacaacaagggtggggaaacggcggcgtttggcagaaggagattctcatgggtggcaagtgcgagccgttggatttctcgggtgtgatttattacgatggaaacgggaagcagctcagcgaaatccctctcaggtcgccacgcgctagccccatgcccggttacctcacgcgccgcctctgaaatctgaatgagtcatcaccaccgccatgccgatcttagattgtgcatgtctctattttttgagtaaatgttagtttattagttttataaatgctgcagattcaaatcccttccgtttgtttagctagtttaatttttaggttgttggaaacaatatttgaagacgtcgttttatagttttaacgtgtctaaggtttattccggcacatgaggtaatatctttttttttattaaaaaagtaattattatgaaaaaaaaaaaaaaaa

SEQ ID NO: 7390 - DNA, 482 bp, Glycine max
accaccgcgcatttggctatcgcatttctcaggtgagcctcaggttccggagcagcgaagcttcaagtgcgcatctgggtaccggcatggctggagagcaggcgttccaccggggaggcgtgcacgggggcggcagcgccatcgggccggactacatgcgggccatccgcggcgacgacgactactacggcgggcacggccagggccacagccagccggcggccgtcaccctcgcgaagggggtggccgcggcggcggcggcggggtcgatgctgctcctgtcggccctgacgctgacgggcacggtgctggcgctgatcgtggcgacgccgctgctggtgctcttcagccccgtgctggtgcccgcggccatcgcggtgacgatgctgacggccgggttcgtgtcgtcgggggcgttcggcgcggcggcggtgggggtgctggcgtggatgtacaagtacctctcgcacgggacgtcctcg

SEQ ID NO: 7391 - DNA, 1313 bp, Glycine max
tacggctgcgagaagacgacagaagggggacaataaaaggagagccaaaccagggacccaaaacattgaggtagaacaactgaagaaccaacaagaggggtattgagattgagattcaagtaatggggaagagcaaggttcttgtggtggggggaactgggtacatagggaggaggatagtgagggcaagcctggcactgggccatgagacctatgtggttcagaggccagagttgagcctccagatagagaagctgcagaggctcctctccttcaagaagcaaggtgctcatctcattgaggcctctttcaatgatcacaagagccttgttgatgctgtgaagcaggttgatgttgtcatcagtgccatctctggtgttcacatcaggagccacagcatcactctgcaactcaaacttgttgaggccatcaaagaagctgggaacgttaagcgtttcttgccttctgaatttggcctagacccagcaaggatggggcatgcattagaaccaggaagggtaacatttgaagacaaaatggctgtaaggaaagcaatagaggaagctaatatccctttcacttacatctccgcaaacctctttgctggatactttgctggcagcctctctcagatggggtcttttgtgccaccaagggacaaggtgcatctctttggagatggcacactcaaagctatttttctggatgaagatgatgttgcaacatatacaatcaaggcaatagatgatccacgaacccttaacaaaacattgtacctaaggcctccagaaaatattatctctcaagcagagcttattggaatttgggagaaacttattggaaaggaactagagaagacatacatacctccagaaggctttcttacaacactgaaagggttggattataaacttcaagtagggattggacacttttatcatatattctacgagggatgtttagcaaattttgaaattggagaggaaggagaagaagcatccaagctttaccctgaagtgaattacacacgcatggacgagtacctaaaaatttatgtgtaaaaggaactcattcagtaggagttcagtgattcaaacaggaacacggtttttagctacaataaccttaatttaaggagatgattttgtgcttataattcgatggggaaactggatttttcggatcttgaaatgtgaacgagtttaactttatcattaatttaagctctgttgtttttgaaagggtacggagactttacttataattcgatattgtcctcatccaagaagacgttgagaaacgagtttattccc

SEQ ID NO: 7392 - DNA, 2064 bp, Glycine max
atttaattaaataaatttccccgcggccgctgggtttgggcggaacgggagagagagggttccttccggtcgctgtaatcggtttggctgagaagggaatcgaaaatcaattgaggaagaaggatgtcggtgacagcgggtgttagtgatactgtgatagcagttagggataagctcagaggtaaaattggccaaactaaagttaagcgttattggcctggtaaagttcctgaatgggctgatgatgagaacgaagatgctgcccccgccgatattagaccctccagggaagctgccctggagaaagcctttcctcgtcaccaagaagatactgctattgtcagaaaagatgatcgtaggctccgccgtttggctcagagccggatagataaccgtgaggaggtccgagctgatcatcgccgcattcgccaggctgaaattgtttccaccattgaagaggaggccaggaggcaggaatggttggagtttgcgggtcaagctccgaacgcccccccccaaagaaggaggctgattaaagagaagttgcttcagagagagcaggaagaggcacttcctcaggaagaggaagaggaggaagaagaagaggaggaggaggaggaatctgagtatgagactgactctgatgaggaatatacgggagtggctatggtgaagcctgtgtttgttcccaagtctgagagagataccattgcggagcgtgagcgtcttgaggctgaggagctggcttttgaggagaaaaggaaaaggagattggaggaaaggaggattgagacgaagcagattgttgttgaggagatccggaaggatgaagaaatccagaaaaacttggaaatggaggccaacattgctgatgtcgatactgatgatgaagtcaatgaggcagatgaatatgaagcttggaaagtgagagagattggtaggatcaagagggatagggaggatcgggaggcaatgttgaaggaaaaggaagagattgagaaggtgagaaacatgacagaggaagagaggagggagtgggaaaggaggaatcctaaacctgctccaccaccaaagcagaaatggagatttatgcagaaatattatcacaaaggtgctttcttccagaatgaatctgatgaccgagctgccaccgttggatctgatggtattttcgctcgtgatttctctgccccaactggggaggataaaatggacaagacaatattgcctaaggttatgcaagttaagcactttggtcgtagtggaagaaccaagtggacccatcttgtcaatgaggatactactgattggaataacccgtggacttacaatgacccacttcgtgcaaagtataatgacaaaatggcagcaatgaatgcacctatagtaaaacctaaaggaagcaagaagttgaaagattgggaatctagggaatctggatgaacttgaagttacaaaactatgcatgaagatatagtcctttcagttatagctcacggattaataccagattagatatcaccttatcctatgtatgcttgtgttctgtcttaatacagaatgtaaagtagttcatcacggctcaagcatgttatggatcttggaaggcagttcgtgcagattgtgataggagttcatcactagtttattcggatattcttccccagttaatgaatcctagctgatttgaagtcctgccagcctagcctaatgtcttcaagcgcttatgactgactttctttgtattttgtcaccattttgactttattactagctggctattaggattttattgagtttgctgcccattgatgcttcaggagccactgttttacaatttaagatcatttatacgtgcaacttcgatactgactggaactcccaagagtgacacttcaattggtgacggtgtactagtatatgtagcataaacttccatgttagggtaatcttttagcttaacaaaggggcatattgaaagttattcatgttcaacccgccgctgcttgtttgtttactggagttaatttgactagtcaatcattcaaaaaaaaaaaaaaaaaa

SEQ ID NO: 7393 - DNA, 1549 bp, Glycine max
tcagctacgtaggccccccccccccgactccttccttatcctcatcccgtcaactacttgcaagtgtagcaacctacctcttctcttctgcttcattcaccaaactttccctttaaaacatttcaccccctaaattctccatcaaagacacaatccactccttaattccccaaaccaaacacgccgttaactaactcaccaaccctccctcctttacccgagagatcgattctctctgtaagtaaatcttgccgttaactttctcggaaagtcggaatttcccggaaaatggaaggaggtcgccggaggataacactttacgatcaaatgaaagccggcaacagcagccgatactcactcgccagcctcatgctgggcgatgtcgttttcaagaaggtggaagcagaagaagcagaagaagcagaagccgaagccgaagcgagctgtgagctgagccgaagccggactctccaagacatcattcgcgaagaaaaacctagcaacagcagcaacaacacgaaggatcgcaactcttggagagccttcacggcgaagcttcggctcaagcgcgccatcggctcggcttggtcctccaccaccactatcactaatcacagcaatgatgatagaaatttacctaatatacccgaaactcgccatgactcggacgagttgactcagcagaacgacatcgttgtggaaggcgccaacgattcggatccgatcgcgcggttcgggtcaccggtggaacacgtggaagccgttggcaactcctccgacggagagaacaaccacgaggcggtggttggagtgtcgctgatggatttgttggaggaagcggagcaggaaatggatttatatagagtgagcgatgatgacgatgatgtggcagaatatgagaagagagaagaagaaaaaggaggtgtggaagaagaaatagggagtgtggtggagtataattgttgcgtgtgcatggtgcggcataaaggcgcggcgtttattccgtgcgggcacacgttctgcagaacgtgttcgagggagatttgggtgagcagagggaactgccctctctgcaacaatttaattttggaaattcttgatattttctgaacctggtaataattttcattaatctttcaatataacctttttaatctctatctatgaatttttctttttctttgggtttggggaagaaactatttctactattagattaggatcatgtggttatgatgaatttgtacgtgacatgtgattatgatttgtgattaacaaaatggaattagtaacgtgtcatgaagattggttagaatcaaatgtaaaggagtggattatggatgattttatttgcacatttactgtgtgtcatatatttggctcacgtgttcatgtgatgagatgctgtatcttccggtggattctagttgtgcttagacgataacgtgttactagtgagagagtggacaagctatggaatgataacttcaaatgtggtttacacgattgtatatatttatctttttatttttaatttggctattgatgg

SEQ ID NO: 7394 - DNA, 1627 bp, Glycine max
  misc_feature (1)..(5): n is a, c, g, or t
  misc_feature (8)..(17): n is a, c, g, or t
nnnnnggnnnnnnnnnntcagctacgtaggccccccccccggtgtgaatgaatgaatgaacacaagtacttaaacacacattactctctcagtttctctctcttcttacttctctctccaaaccttacatgcacaaagttgtgtttgtgttctaatggaacttgcttgcttagactaatcaaccaagttttgcatttccagtaaccaaaactctcttctttttttttccccctttcttctgggttggcaaagtcaacatgcaagaacaagattttttttaggctggttggtggtttgagttccaaaaaaactgactttttgttgaataatttgggtcggtgaaggggtgttatgaagaacgaagagcaggctcgtagtttgtttggaatttcactctctgacagacccagatggcagcaattcctcatttgttcatcagggttcttctttggatatcttgttaacggcatctgtgaggaatatgtgtataacaggctccatttcagctatggttggtacttcacatttgttcaagggtttgtgtacctgtgtctgatttacctccaaggcttcacaagcaagcaaatggtgaatccatggaaaacctatgtgaagctctctgctgtgcttatgggttctcatggcctaacaaaggggtctttggcttttctcaactaccctgcacaaatcatgttcaaatccacaaaggttctgccagtgatgataatgggtgccttcataccgggtctgagaaggaagtatccgctgcatgaatatatatctgcaatacttcttgtagttggtttgatcttgttcacactagcagatgcacagacatctccaaatttcagtatgattggtgttattatgatttctggagcattggtcatggattctttcctgggaaatcttcaagaagcaatatttaccatgaaccctgagaccacacagatggagatgctcttttgctcaactgtggtgggtttgcctttcttaatcccacctatgcttttcacaggagaattattcaaagcatggacttcatgttcacagcatccctatgtgtatggagtgctagtctttgaagcaatggccacattcataggccaagtttctgtcctctcccttattgcgatctttggtgctgccaccacagccatgataacaacggcaagaaaggcagtgacattgctattgtcgtacttgatatttacaaaaccattaacagaacagcatgggagtggactactactcatagctatggggatcacattgaagatgttgcctgataacaaattcactagcaccaagaccaagagggtcttaacctcttctgcaagggacaatggtgcaaaatctacaagtgatgaagagttggggactctgccaaattctggagaaaatgatgaaaggaggcctttggtctagcttaataataatgcgttctcaatgcaatttttatttttgaagtcattattttataaaaaatcatgatttcattttcgttttcatatcatgtgaaaggaaaaaaaggaaataatttgatgttcaattagcattaattgtatacaggattatttttttaatgcaaggccatagatttaaatttaaataaaaaaaaaaaaaa

SEQ ID NO: 7395 - DNA, 827 bp, Glycine max
actcttttattcttattttgttttttaaactttcttaacgcaacaaacacatagccacatcttctctttctcttcccatggcattctgactcatacccaaatcattgattgtttgtctatcgaatcggtgagaaaatggcagtggagctgatggggttcccccaaatgggcgaacagaaggcaattgaagaagcagccgccgaaggcctcaagggcatggaacacctcctctgtctcctctcccatcaaccttcccacctccgcactcaccacaccgacgccaccgtttccaacttcaaaaaactcatctcccttctcaaccgccgcaccggccatgcccgtttccgccgcgcacccctcccttccacttccaactctctcgccccatcccctccaccggctaacccggtcaccttcgccccttcgcagtcacagagtctaaccctcgatttctcaaaacctaacatgttcaacaccaccaacgccaaatccatggacctcgagttctctaaagaaaccttcagcgtctcctccaactcctccttcatgtcctccgctatcaccggcgacggtagcgtctccaatggcaaactaggatcctccctcttcctcactcctccgccagtctccgccggaaaacctcctctctcgtttgctccgatcaagaagaggtgccacgaccaccgcgagcactccgacgacatctccgggaaactctccggctccagcaagtgccactgcatcaagagaaggaagcatcgtgtgaagaaaacggttagagctccggcgattagttccaaggcgccgatattcccgcggatgagtac

SEQ ID NO: 7396 - DNA, 336 bp, Glycine max
ctctcgcccgcgccgccgccgcctccctgccctctttgccgccgccgccgccgccgccgcccgttgtcgcggacgcctcctcctcgccgaagagatgacgaagcgcaccaagaaggctggaatcgttggcaaatatggtaccaggtacggtgccagtctgcgtaagcagatcaagaagatggaggtctcccagcactccaagtacttctgtgagttctgcggcaagtttgccgtgaagaggaaagcagtcggaatctggggatgcaaggactgcgggaaggttaaggccggtggtgcctataccatgaacactgcaagtgcggtcactgtcaggag

SEQ ID NO: 7397 - DNA, 1711 bp, Glycine max
ttttcggaagcggaaattggactgatcctttctctctctctctctctctttctcctcaacgcctcttcctttcaatttaatccaacaataataattattcgcaaaaaaacgttgaacagataccatcatcatcacccacatcatcagaatttcaagctatacagagggaagcgcaattgattctttttgtgtgtttgactttgatcaatcagttggatatcgcatagaggattgtgttgccttgaggggaaactcagtttttgactcactaaaagtaagtagccaaacaatttctcggggtcctgttgaagttgattcctttgataagttaccaacttcactcaataaaaacccattaacaagccaaacagagcgacaaagattgcaattacaaaaggttcaattatcaaatctggtcagtggggatacggaacaccaggaagagtctgccatggctgacgccagtcctagaactgatatttctacagatgttgacactgatgataagaatccacggtttgatagaagtcagtcccttgttgctgtggtttctgactccagtgacagatcaaaggataaatcagatcagaagactctccgaaggcttgctcagaatcgcgaggctgcaagaaaaagtcggttgagaaagaaagcttatgttcaacagctcgaaagtagtcgcttaaagttaacccaactggagcaagagcttcagcgagctaggcagcagggaatctttatatcaaactcaggtgatcaagcacattcaatgagtggaaatggggctatggcatttgatgtagaatatgcaaggtggctggaagagcagaatcgacaaattaatgagctaagagcaggtgtaaattctcatgcaggtgatacagaacttcgcatgattatcgatggtataatggcacattatgatgagatatttaggctgaaggccgatgcagctaaggctgatgtcttccatttgctgtctggaatgtggaagacaccagcagagaggtgttttctatggcttggtggttttcggtcatctgaactcctcaagctcctggtaaatcagttggaacctctgacagagcaacagttagtgggtattaccaacttgcagcaatcttcccaacaggccgaagatgcattgtctcagggcatggaagcattgcaacagtccctttctgagacattatccactggatcacttggctcctctggttcatcaggcaatgtggcaaattacatgggtcaaatggctatggccatgggtaaactagggacacttgaggggttcattaagcaggctgacaatttgcgccagcagactttgcaacaaattcaccgcatattgacaactcggcaatcggctcgtgcactacttgcaatacatgactacttttctaggttgcgtgcccttagctctctttggcttgcccgcccaagagactgatgggtggtaaatagtgtcattaattttcatggatctggcaccagaatcatttgtcgtaggtttttcactcttgcaattttactgtgttgtagttttcatattactgatattagtgtttcagtaagttataattcagaaactgaattggtgacatgacaagggtatgtattttgtttattactactaatgtgataatattgtccattgtaacacagttgaagggatttagattatttttttacaaaatagctgcgatgcgat

SEQ ID NO: 7398 - DNA, 1684 bp, Glycine max
acaggacgtctagaaatgggactgatcctttctctctctctttcttcccaactcaactcaagtcctcttccttgcagtttttcccctcgagaataattattcgcaaaaaaaaaaaaaacacgttgaacagataccatcatcattcatcttcatccccacatcatcagaatttcaagactcagtttttgactcactaagtaagtagccaaacaatttctcgggttcctgttcaagttgattcctttgataagttaccaacttcactcgataaaaacccattaacaaaccaaacagagtgacaaagtttgcaattacaaaaggttcaattatcaaatctggtcagtggtgatacggaacaccaggaagagtctgccatggctgacgccagtcctagaactgatatttctacagatgttgacacggatgataagaatccacggtttgatagaagtcagtcccttgttgctgtggcttctgactccagtgacagatcaaaggataaatcagatcagaagagtctccggaggcttgctcagaatcgcgaggctgcaagaaaaagtcggttgagaaagaaagcttatgttcaacagctcgaaagtagtcgcttaaagttgacccaactggagcaagagcttcagagagctaggcagcagggaatctttatatcaaactcaggtgatcaagcacattcaatgagtggaaatggggctatggcatttgatgtagaatatgcaaggtggctggaagagcagaatcgacaaattaatgagctaagagcaggtgtaaattctcatgcaggtgatacagaacttcgcatgattatcgatggtataatggcacattatgatgagatatttaggctgaaggccaatgcagctaaggctgatgtcttccatttgctgtctggaatgtggaagacaccagcagagaggtgttttctatggcttggtggttttcggtcatctgaactcctcaagctcctggtaaatcagttggaacctctgacggagcaacagttagtgggtatcaccaacttgcagcaatcttcccaacaagcagaagatgctttgtctcagggcatggaagcattgcaacagtccctttctgagacattatccactggatcacttggctcctctggttcatcaggcaatgtggcaaattacatgggtcaaatggctatggccatgggtaaactagggacacttgagggattcattaagcaggctgacaacttgcgccagcagacgttgcatcaaattcaccgcatattgacaactcggcagtcggctcgtgcactacttgcaatacatgactacttttctaggttgcgtgcccttagctctctttggcttgcccgcccaagagactgatgggggtaaatagtgtgtcattaattttcatggatctggcaccagaatcctttggcataggttttttactcttgcaattttactgtgttgtagttttcacattactgatattagtttcagtaagttattatctagaaactgaattggtgacatgacaagggtatgtattttgtttattactactaacgtaataatattgtctattgtaacacagttgaaggaatttagatgattttatacaaaaaaatggttgggatgtgaaaaaaaaaaaaaaaaaatataaaaaaaaagcggccgctctacaggatcca

SEQ ID NO: 7399 - DNA, 1277 bp, Glycine max
cgcacgcgtgcgcggggctccggcccggcactgaagcaagcagaatcctcagataacatgaacataatcaaactgtttaaaacgaaggctgtgaggagaggtttggtggcaggaatggggcttcaaatcttccagcaattcacgggcatcaacactgtcatgtactacagtcccacaattgttcagttagctggttatgcatccaaccagacggcattgctcctctccctcatcacttctgggcttaacgctttcggttcggtcgttagcatctacttcattgacaagactgggagaaagaaacttgctttgcttagtttgtgtggctgtgttgtagccttgacccttttaactttcactttccgccacaccgcaactcattctccaatgattagtgcgcttgagaccgttcatttcaacaacacctgccccggtttcggccacgctgtcaatgctaatcaatgggattgcatgatgtgtctcaaggcagaatgtggctattgtgcatccggtgtctctagcaagagcttaccaggggcatgtttgatttctaatgatgcaacaaagggtatgtgtcaaaaagaacatagagcatggtacacacagggatgtcctagcaaaattgggtggcttgcaatagtgggacttgcactgtacatcatattcttctcaccagggatgggaactgttccatgggttgtcaattctgaaatctatcctctgaggtaccgtggggtatgtggaggaattgcttctacaacttgttgggtttcaaacctcattgtttcccagtccttcttgactttgaccgtggctattgggacagcatggacattcatgttgtttggatttgttgctctcattggcatcttcttcgttctcattttcgtgccagaaaccaagggagttccaatggaagaagttgagcaaatgctggaggaaagagctgtgcacttgaagttttgggagaaggcgagtcctccccagaagggttgattaagtttgaattgagcctgtgtttaaagaataatatttcaccatccgtgatgtgagataattatggcttcttcttaggttaagtagtgaagatgaataagtttagatgttttctagtttttgtttgtagatttttctctttagatttgcttttttattttagttagtgtttggctagtatgtttttatgaaatccgaacggatgaacaaatgaatatattgtttttataaaaaatatatgatgatcataaattatacaatgatgagtgttcagtcaaaaa

SEQ ID NO: 7400 - DNA, 1816 bp, Glycine max
cggctcgagtacggctgcgagaagacgacagaagggggtgagggacatgaaccactcacccacggaggcccccccccggaggagcatattcaaagcccatcttcctgctcttactagaaccttcccaatcaatttcctctaattagggtttatctagggtttaattactcatcccaattccccaaaccccaatcctagtttctccttctcaatacccaaatggttcgctcccatggcgtcaccctcattaatcgccttgctcgtcgatctttctgtcacgccaacgattctgtttatcaagcacttttccaaaggggttataggacattgaactctgggccttgcaatccatctagagttgttggtagctttgcatccaatgctggagatggcgttaatttgaagaaatggttgctgttgggagcggcaaataaatattggggaccgtctagatcaattcatggctcggcatcattggcaagagactattatgatattcttggtgtgagtaagaatgctagttcttctgaaataaagaaagcttactatgggcttgcaaaaaagctccatccagatacaaacaaagatgatcctgaggctgaaaagaagtttcaagaagtttcaatagcatatgaggttttgaaggatgaggaaaggcgtcaacagtatgatcagcttggtcatgatgcttatgtaaaccaacaaagcactggttttggaggcgagggtggcttcaatccttttgagcagatattccgtgatcatgattttgtcaagagcttcttccatgagaatattggtggagaggatgtcaagacttttattgaactatcttttatggaagcagtacaagggtgcaccaaaactttgacatttcaaacggatgtgctttgtaatgcttgtggtggcagtggtgttcctcctggtactaggcctgaaacttgtaagccgtgtaaagggtccagagtgttatttgtacaagctggcatattcagaatggagagtacttgtggtacctgcaaaggaactggaaaaattgtatcggattactgcaagtcttgcaggggtgcaaagattgtcaaaggaatgaagtcggtcaagttggatattatgcctgggatagacagcaacgagaccataaaggtttttagaagtggtggagcagatcctgatggagatcaccctggtgatctttatgttactatcaaggttagagaagaccctgtttttcgcagagaaggatctgatattcatgtagatgctgttttaagtatcactcaggcaattttggggggaactattcaagtccctactcttactggagatgttgtacttaaggttcgcccaggcacccaacctggtcagaaagtggttttgaaaaagaaaggggtcaagactaaaaattcttgcacatttggggatcaatatgttcattttaatgtcaacatcccaacaaacctgacacagagacagcgtgaattaattgaagagtttgccaaggaaggacaagaggaatgtgataaacggagagctgcttcggcttctggttgaaaacttttgcagaatctcctctatttgtttattgtcaagtcatatgctcaactaggtgggaacccacttgttagaagttttgtaggagcattaaagttttttttttctttgccccatccacatatagtgtatgtaatatttttttttttgtcacaagtgatgttaacaatttaaattttaaggtcagtatttagaagacaattcccttgtggttatccatcacgtggaatacatagtcagtgttgtacatattttttcttttaaa

SEQ ID NO: 7401 - DNA, 1375 bp, Glycine max
aaatatttatatgtacgtatatacatacatacacacagagacatggagaacaataatcatcatgccatggctgcaggtgctagtagtgattcaaacactagtgatcacaccaccccaatatcttcttcttgtgttaatgataacaacaacaataagttatacaaaggggtgagaaagcgaaagtgggggaaatgggtttctgaaatcaggcttcccaatagccgtgaacgaatatggctagggtcttatgactctcctgaaaaggcagcacgagccttcgatgctgccctttactgtctacgtggccgccatgccaagttcaatttccccaacacaccttgcaacatggacactgctaccaatgctcctcctaaccaatctcttaccccaccagagattcaagaggttgctgctaagttcgcaaatcaggtgtccccgctactacaaaaacctcaagaacaacctcaacctcaacgtagtagtgatggtggtggcggtggtgctaattcttcatcgtttggatcaaagttgttatgtaaatcagacagcatagcagagagtagtactactagtactactactaattgtacccccaccaccactgcctcgtcatgttctgctactatgtacgaatgtgatggaacggagcaagtggaccgtggggacatgatggattggacattcttgaacgtctttgatttctccaatgaggtggtgcttcctgctgttggatccgactataatgatctctataattctgagctacacaagatgcactcagattcaggtgagttattgtattctactccttttgagggttacgaacaattaattgaagctgatcatcatgatgatgatcctttttctcaccaatcattcctttggaattggaacttttgatcatcatatcatcactcgctactgcatgtgctgctagaatatgatgactactagttaaaattacttgccccagcctaaatatataataaagcatccttgatcttttgtatatatgatatgtatatgggggtggctccaagtatataacaataacaagggcaagacaagacacaggctatgtcagaccatatatatattccttaccataattaagtatatgcctagctatatggctagctagtgacctcggtttttctagtgctatctattccatagattagcacaggctaccaactatatagtatcgatcgatagatgttgtcttactatatgtttccccttggcaataaaatatttgtactttataggttgttttatgtatactggttcaagtatatatttatacctaagtatatatatattgatctgtgacatgtatcccttctcctttccgtatttctctgtaaaattaaat

SEQ ID NO: 7402 - DNA, 984 bp, Glycine max
  misc_feature (46)..(46): n is a, c, g, or t
  misc_feature (915)..(915): n is a, c, g, or t
caaaaaacgacagaagggcaatctgcaatggtttatttgttggcanctgcgaacgagacatggggtgacaaggtttaccgtgagaatcactactacttgcatggttattgggggattttggtggatcgttatgaggagatgattgagaattatcacccggggcttggggatcatacgtggcctctggtgacccattttgtagggtgcaaaccttgtgggaagtttggggattaccctgtggagaggtgcttgaagcagatggatagggcctataactttggtgataaccagattttgcagatgtatgggttcactcataagtcccttgctagccgcaaggtgaagagggtgaggaatgatactagcaaccctcttgaggttaaggatgagcttggattgcttcaccctgctttcaaagctatcaagctcccttcgtcttgataagatcgaggaggttttagattacggaaaattacggacaaatgcggctgatgcagctgcaactatggtggtgttgtggttgtggtgactccagaaaccttgatgttgcagccaaaattgcggtcagcttcgtttttttaaaaccttggtgatgtcggtgtgggctacttttcctaattcacactactactgctacttgatattcattcatatgctgccactattctactatcattgctttgcagttgcgtaagacgatgatgatgatagtgttaaaaattgtaatctttaatttattttgcttttttaagttatagtgatttttttgaaaagaacaaatgctcttcttctctactgtgccttttctaaccctggactctgttggctcattttgtggataaattgattgataaggaattgtataagttcctttctatatttttggatgaatttgttgtccttgctttatcttanttcgtgtttgttaaagggtcgaggaaagaatctcttgttagtaacggtttcttcggcttctgaactatg

SEQ ID NO: 7403 - DNA, 829 bp, Glycine max
cccacgcgtccgtacggctgcgagaagacgacagaagggtacggctgcgagaagacgacagaagggtacggctgcgagaagacgacagaagggtacggctgcgagaagacgacagaagggggacaacataaccctcttctcaataataacggttatgtcattcttgttatcagtacctgtaactttgttgatggagggtgtcaaatttacccctgcttacctgcaatctgctggattaaatgttaacgaagtgtacatcagatcacttcttgctgcactatgtttccatgcatatcagcaagtttcttatatgatactgcagaaggtgtcacctgttacccactctgtaggaaattgtgtgaaaagggttgtgatcatcgtgagctctgtcatcttcttccaaacaccagtatcaccaattaacgcactggggactgctatagctcttgctggtgttttcttgtatttcagggtgaagcgacttaagccaaagacaacttaattttcagtcgtaaaatttttgccagttgcatgacacacttgctagttacatttctgaatttttttttatcataggtcagatataggcattaagggttcttgaccctttattttttcttttaaacagttaggtccccgattttattgtacatgtcttagtggcgcctaatggttctgctataagaaatttttatcaacgtttcaattttgataaagtatgacatccagttacttttatcacactgtcatttgttgtttattaggaatgtacctttgttttgatgaaggagaaatatcatagagaaaagaatgattagaattagggcgg

SEQ ID NO: 7404 - DNA, 1965 bp, Glycine max
ctgttgcgctgtaaaataaaatttccacactcttctcttctcttcacttcaattctttcccaccactttctccccacaccatcatcttcttcttcacttcttcaacataacaaaaaacaacaactcagctaatgactctcacgttccacattgttgggcacccttttcgtagatccaactccaaaaaaataacaactttccttcttttcagttgaaaaaaactacttcatttttcttatttctttttttatattccaagaaaaggtctttcttttttggtttttgttttttgttttttgttttagtttttcagtggcagcaatgacggaggtgcttcatttctcatcctcttcgtcgccagccacttcttcttccgatggcattctccaagaaccaccaccaccttcttctgtgagcgtggtggtggatgggttttctacggtcaccgactgtgacgcgcgcagggtcacggtcaccgacagaacgcaccaagagctttctcttctggcaattcttgtgacccttttgaggaaatcgctgattgcttgcaacaagagcgacgagggacagggcgccatggagattgggtggcccactaacgtgcgccacgtggcgcatgtcaccttcgacaggttcaatggcttcttgggcttgcctcgtgagttcgagcccgaagtctccacaaggcctcccagtgctagtgcaactgtttttggagtttcaacagaatccatgcagttatcgtatgacacgagagggaacagtgtgccaaccatactgctactaatgcaaaggcacttgtatgctctcggagggttgcaggcagaggggattttcagaattaatgcagataatagtcaagaggagtatgttagggatcaattaaataggggattggtcccagaagatgttgatatacattgtttggcaggacaaattaaggcttggtttagggaactgcctactggtgttctggattctttatcaccagagcatgtaatgcaatgccagactgaagaggattgcgctgaactggccagccagctacctcacaccgaagcttcccttttggactgggctattaatctaatggctgatgttgcccaagaggaacacttgaataagatgaatgcacggaacatcgccatggtttttgcaccaaatatgactcatatggcagatcctttgactgcattgatgtatgcagttcaagtgatgaacttcctaaagaatcttatattaaggacactgcgagagagaaaggattgtgtggtagaatcgtctcctggattttgtttagagccttctgatgagaacggggacagcagtcttccggagtcctgccagcaagatgatgatgttgctgctgaaaatgaagaggccggggaaacctttgtttctgagaaaactgaattagaatgttcgcctgagtccctccaaagcaaatattcaactgaaggaggatgtggcagtttgataggctctcctgagaatctggtttgtgaggaggacttgtattgtgagtttccatccaaaggaaacatcgggaagagtaagagtgttcaatcaagtaattccagttctaaaaaggggtcccaaaaaaccagaggcatgctccaacctgtgatccatgcaacagtggctgctgataaaaagggtattagcaatcagccgcatagattcgagatcagagcggatagaagcctggcggtgaaagaagaatcactgtgatggagtgtagtttgattctgattgtgcattgtagttgtaagtttgtttcaaggacaagtttgtgaagtggttcagatttttttcattttcctcagtttgtttaacatgtctgatttctagaatgacactatgataaacactactgaaataacatttcccaaaaaaaaaaaaaaaagttctcaactactcataattattcctgaatgacaggccattcacctgtcaatgttgcaa

SEQ ID NO: 7405 - DNA, 1399 bp, Glycine max
cacgcgtccgtaccgattagcatctatctcactaaccaacttctttctttgttccgttctactttcccttcccaacaacaacaagaagatgccttctgcagaagcttcctccgaaaccatttgtgtcaccggcgctggtggcttcatcgcctcttggatggtcaaactcctcttggaaaaaggctacactgtccgaggaaccctcagaaatccagatgatcccaagaacgggcacttgaaggagtttgaaggagcctccgagaggttaactctgcataaggttgacctccttcatcttgactccgttagatcagttattaacggttgccatggtgtctttcacactgcttctcccgtcaccgataaccccgaagaaatggtggagccagcggtgagtggagctaagaatgtgatcatagctgctgcagaggctaaagttagacgtgtggtgttcacctcatccattggtgccgtctatatggaccccagtaggagcatcgatttggtggttgacgagtcctgttggagtgatttggaatattgcaagaacaccaagaattggtattgctatgggaaggctgtggctgaacaagcagcatgggacacagcaaaagagaatggggtggacttggttgtagtgaacccagttttggttcttggaccattactgcagcccacaatcaatgctagtacaattcacatcctcaagtacctcactggctctgctaagacctatgcaaatgccacacaggcttatgtgcatgttagggatgtggcattggcccacatacttgtttatgagaagccttctgcctctggtagatacctatgtgccgaaagctccctccaccgtggagaattagttgaaattctcgccaagtatttcccggagtacccagttcccaccaagtgttcagatgaaaagaatccgagagcaaaaccctacactttttcaaatcaaaagctgaaagatttgggattggaattcactccagtgagtcagtgtctatatgaaacagtgaagagcctgcaggagaaaggccaccttccagttcctgcaaagcagcaggaagaagattcaactaccgtgaaatcctaaatgagcagctagttgtccactaaggcaagaagctgcagcttgtggcaatctgtgctcatcttatatattataatagagaatcctacattagaagactgctgtatttggattttgttaaaaagacatcaactaaattgttgccgtgtatgaacttataatattaatgaaatttattcccctcgttgagttgaaaaaaaaaaaaaaaaaaaaaaaaaaaaaaactcgagggggggcccggtacccaattcgccctatagtgagtcgtattacgcgcgctcactggccgtcgttttacaacgt

SEQ ID NO: 7406 - DNA, 750 bp, Glycine max
gatgcaaacatctctacctagcattcagcacaatcaacagtccaataatcaacaacaatcaacacagtccgtgcttcagcaacactcccaagttatcaggcaacagcaaccacaacagacttcgatcattcatcaacaacaaacaccgatgactcaacagtcaatattacctcaacaacaacaaaacaacaacaattagttaagagagttgagtaagatcagaatggcagacttgatgaaaagaatcctccaaatgattgaggctgaacaagcaagcaaagggtccaaccatggttcttcaaactcacataacagctatggcagcggaagccagaatggatcaaccatcaacagtggcaatcatcttaacaacggcaacaggtatgacgactcataccactacggtgaacgccctatttataacagtggcactttcaatggtaatggcaacgggtcacatatcaagggtggctttgactcctcaacaaggaactactatggtcgtcgttatgattattaattatctgtatttgatacagtatatgctagctagctgggcaaaatatataatatgctatgctacgttgtactagcaataaataatgttgagctaaagctctaatgggtttatgataaatgtaagtgtgttggggtgttatgtaaaccccaatatagtttccgtccgcaaaaaaaaaaaaatgtttttcactttttttctttaattttcttcgtaggcccgtcactgatcac

SEQ ID NO: 7407 - DNA, 479 bp, Glycine max
ccccggcccggatcggctcgagcggctcgagaaacaacaattgattaagagtgttgagtgagatcagaatggccgacttgatgaaaagaatcctcctaatggaggccgagcaagcaagcaaatggtccaaacatgttacttcaaccatcaacagtggcaatcatcacaacatcggtaacaggtatgaccactcataccactacgatgaacgccctatttataacagaggcactttcaatggtgatggcaatgggtcacatatccagggtgactttgactcctcagaacggaactactatggtcgtcgttatggttattaattatctgtatttgatacatagtatatgctgggcaacatcatatagtatgttatgttgtactacccataaataatgttgagctaaagctctaatggtctataacaaatataaaggttttgggggtgttatctaatccatatatatatatatatatatata

SEQ ID NO: 7408 - DNA, 891 bp, Glycine max
gcctgcagtcatcatttgcacgttacatgtctggtcagggatttgaaacttggattcttgaagtacgaggagctgggttgagtattcagggttcaaattccaaggatattgaacagtctgccaatgcaatgtctgagaagatgaaagctgcttcagaaagtgctattgctaccaatggagcagtggcttcaaacaaagaattgaataacgtctctttttgtgcggtatctgaacctgagatttctgcccctaatggagtagaaactgaaaatgtggcaatccaaggtgatctaactaggttaggtactgtttgggatgaatcaaagttggtggcaagattgaccgagactttaatgtttttgtcagaaagagtctctgggtttctgagtgaaagtcaatcaagggtgatgtttaccaaatttctagatcagatttcaaaacttttggtggattctccattatatgaacaattcaacgaggtaaggggaaagctttcgactttgttcgaaacaaagcaaaacgctggtattactagtcaaataactgatctgagtcaaaaactagtaaatattatcgaggaaggtcagctatctgtttctcctccattatttgatctacaagcccgctttacttctacaatcgaagattttcagaagcaacttgacttgatggtgaagtatgattgggacttcgatcattacatggaagaagatgttccagcagcgatagaatacataatgaaacaaagcatgcctaaagatggaaaattacttgcaattggacactccatgggtggtatcctgctttactccatgctatcacggtttggttttgaaaggaaaagatccaacttggctgcagtagttacactggcatcgtctctggactaca

SEQ ID NO: 7409 - DNA, 2094 bp, Glycine max
gcaccagaaacattatatccaaaagattctctgtatattatacctatgatgatttaagtaataaatttacttataaattataaaacttactttataagtattatagacatgggattttacataattgccatctaatgtcgattaatacgtgagctccttgtttgttttatcctttgatgatattttatcgcatatataacagtggtgctagcttaatcgaaaagtattacaattagtctcagtccccaacgactggttctgttttctctctgctgcttcgattcattcacacaaccatgactagccttactaatggcgatgctggctccctcaacaaggtccccacgatcaagttcaccaagctcttcattaatggagacttcgttgactctctgtcaggaaagacatttgagacaatagatccaagaacaggagatgttatagcgaggataagcgagggagataaagaagacattgacattgctgttaaagcagcacgtcatgcatttgacaacggtccatggcctcgccttcccggctctgagagagcaagaatattgctgaaatgggcagaaataattgaggaaaacgcagaagaacttgcagcactagatgcgattgatgcggggaagttgtaccatatgtgtaggaatgtggaagttccagcagcggcaaacactcttcgttactatgctggtgcagccgataagattcatggagaggtgttgaaaatgtctcgagagttccatgcctatacattacttgaaccacttggtgttgtgggacacattactccctggaatttccccaataccatgttctacatcaaggtcgctccttctttagctgctggctgcaccatggtcctcaagcctgctgagcaaacacccctctctgctttgttttctgctcatcttgctaaattggctggaatcccagatggagtgatcaatgtagtgcctggatttggcccaactgctggtgctgcattaagctcacacatggatgttgataaggtcagctttaccggttcaacacaaacaggccgtgtgataatgcaggctgcagcaaagagtaacttgaaacaagtttcacttgaattaggaggcaagtcacccctcataatttttgatgatgcagatatagacaaagctactgagctagctctactaggcatcctatataacaagggagaagtttgtgttgcaagttcccgtgtgtttgttcaagaagggatctatgatgaatttgagaaaaaactggtggagaaggcaaaagcttgggtcgttggggatccctttgatcctaaagttcaacaaggccctcaggttgacaaggaacaatttgaaaaagttctttcatatattgagcatggaaagaaagaaggagctacccttttgaccgggggtaaaacagtggggaacaagggctactttattgagccgacaattttctccaatataagggaggatatgcttatagcacaggatgaaatatttggcccagtgatggcactgaagaagtttaagaccactgaggaagcaattaagagtgctaacaataccaagtatggcctagcagcaggcatagtgaccaagaatttggatacagcaaacacagtgtcaaggtccattcgggcaggcactatatggatcaactgctattttgcctttggcgatgatgttccctttggaggatataagatgagtggatttggaaaagatcatggattggaagcccttcacaagtacctacaagttaaatctgttgttactcccctttacaattctccctggctttgaatgtctactgcatggatcttggaaaatggtccattctggccatttcctatcaatttgcatctgccatgaggcatggaaattcagttcttgaacagtggtgtctattatattgtcaacaagctggccttttcctacttttcagtcatgctttaatagaaaatgtatggaagaaaaacagtaattttatttttgtttggtttgtaattaaaaggaaatatcaacacaatttaacttattgcttcaacagaatatatgaattgttagaaatctatatttattttttattcatatt

SEQ ID NO: 7410 - DNA, 2353 bp, Glycine max
  misc_feature (2343)..(2343): n is a, c, g, or t
atccactcgattccgctcccatgtccctgcttcccaaaacagagcaaaacgacgtccccgtcgtcgacattgacagcgacgaaaacggcgtcgccgccgtagctcctgcaaaaaacgacgcgtcgtcgcacaagactccgtcgccacaagttgagcttgtgcagcaagaaacccctgcgtcgggttccgctctgtctgcctccgacggcctgtctcgaagcttctggaaagccggggactacgttgttggtccctcctcaaagcccactcccttccaaggtcacttggaacatgctcgggtgcaccccaagtttttgcattctaatgcaacttcccataaatgggcttttggagcaattgctgagcttgtggataatgctgttgacgagattcaaaatggtgcaactttcgtgaagattgataagtttgatgtcaagaaggataattcaccagcattatgttttctagatgatggtggtggaatgaaccctaatgcaattcgaaaatgcatgagcttgggttattcatcaaagaagtcaaagacaacaattggacagtatggcaatggattcaagactagtaccatgagactgggtgctgatgttattgttttcagtcgggcaatgcattcaggccgggcaacgcaaagtgtgggtctactatcctatacctttttgcgtagaactgggcaagatgatgtagttgttccaatgatagattttgacatatctggtcattgggctgagccaattatttatagctcacaggatgaatggtcagccaacttgaaaacaattcttgattggtctcccttcacatcaaaggaggagctcatgcttcagtttgatgatataggatcacatggaaccaaagttgtaatatacaatttgtggttgaatgatgaagggatatatgaattgagttttgatgatgatgctgaggatattatgctgagagatgaggccaaccatggagctgagaaaaatttgaggaaaaaaactgttcagcttcaggctccgttggccccccccccccccttttctttacgggcatatgtttcgatgttgtaccttagaaaattttctaacttctctatcatactaagggggaaacttgtggatcaatttaacattgtggacgatttaatatattcaaaagtaattccatataagcctcagctagccatggcatcaaatgaggctatagtggagacaaagacaaccattggatttataaaggaggctgcagaaattaaggttactggatttaatgtgtaccacaaaaatcgcctaatcaagcccttttggaaagtagttgctgatggttcatcaaaagggcgttgtgttgttggggttcttgaagccaattttatagaaccagcgcatgacaagcaggattttgagagatcagtgctgttcattcggttggaaaacaaactgaaacaaatgacaatggattactggagagaacactgtcacttggttggatatcagccaccaaatttgaaatcacaaaaaaatgtggtaaaagaagcccacattcgaaaatcagctgaacattcaactaatccacagaatcagttgcttgctgatcaacaggatactagcttggtagctgagcatcaaagtgacctgagtcagccaattgtgggtcttgcagtgattggcatgcaaggttcgagtcgtgagcagcttggtacgatgctagaaactccagtgtctgtatctcctgatgaaatctgtgcagaaaacataaaacttttcgagaggtgtgaggagtacagggaaaaggagacagaattgaaacagacggttgtggacttcagctacgtaggccccccccccaagaagaaatgtgatcttctatcttcactcttagagactaagaggaaggcgaagagtgttaagggatgataattacgttatgcaagcatcatatcatcaatgagagacaagttgattacctttcaagtaatgtccgagtgtaaaagcacctgtttttttttttttttggggtactcaggagggctaaacgaccaaactacaaccaaacatgtaggggcaaagttatgcccatagaatctttacaatgtaaatgaatgcacctaccagttagaacacctgttttgtatatgttcgttcacctctgttagaacaactcactctggctggttcggaagaaaaggcatactagactttgcacatatagtagaactgattcaagtaattagaggaaactctctatttaaagttgctattaactgaatctatggaaacttattttttcttttgatgttattaaaagctcttgaatttgtttatcaacctctaaaaagaaaaaaanaaaaaaaaaa

SEQ ID NO: 7411 - DNA, 1806 bp, Glycine max
  misc_feature (1782)..(1783): n is a, c, g, or t
  misc_feature (1785)..(1785): n is a, c, g, or t
gagaagacgacagaagggggaagaaaaaaggaagggtaagtaaattgggaatggtggtggtagtgccaggtgtctgtctgaggagaaaatagaataaaaagctatgaaattttggcacaaggtctgattgtagaattgaagaagatgactggggggggtatcactatgcaatcgacgccgggaagctcaggatacttggatttgtatccagagcggaagatgtcctttttcaaaaatccttacattctcggactggctgctgtcgccggcatcggtggtctcctcttcggctacgacactggtgtgatatcaggggctcttttatacattaaggatgattttgaggaggttagaaacagcaatcttctccaggaaacaatagtcagcatggctattgccggggcaatcgtgggagcagcattgggtggttggattaatgatgcctatggtcgaaagaaggccaccctctttgccgatgttatctttaccgccggagcaataatcatggcttctgctccagatccttatgttctcattttgggacgccttctggttggtttgggtgtgggcatagcttctgtcactgctcccgtttatattgcagaagcatcaccttccgaaataaggggttcattagtcagcacaaatgtcctcatgataaccggtggacagtttctttcctatcttgttaacctcgcttttactggtgttcctggtacttggcgatggatgcttggtgtttctggtgtgcctgctgttgttcagtttgttctcatgctcttcctccctgaatccccaagatggctttttgtcaagaataggaaaaatgaagccgttgatgtgctttctaagatctttgacgttgctcgcttagaagacgaagtcgatttcctcactgctcaatccgagcaagagcgccaaagaaggtcaaatatcaaattctgggatgtttttagatccaaagaaatcagactggcattcctcgtcggtgccggacttctggcttttcagcagttcacgggtattaacacagtcatgtactacagcccgacaattgtccaaatggcagggttccatgctaatgaattggctcttcttctatcccttatagttgccggcatgaatgcagccggaacaattcttggcatttaccttatcgaccatgctggacgaaaaaaattagctctttctagtctgggaggagtaattgtatctttggtcatcttggcctttgcattttataagcaatcatccacgtcaaatgagttgtatggatggcttgcagttgtaggcttagccttgtatattggttttttctcgccaggaatggggcctgtgccatggactctgagttcagagatatatccggaagaatatcgaggtatctgtgggggcatgtcagctactgtgtgttgggtctcaaatttgattgtctcagagacctttctttcaattgcggagggtatagggattggttcaacttttctgattattggtgtcatagctgtggttgcatttgtatttgtgcttgtttatgttccagagaccaaaggattgacctttgatgaagtggaagtaatatggagggagagagcttggggcaagaaccccaacacacaaaaccttcttgagcagggaagtagttcctaattaataaagtgtgagcttgttggcctaaatagatgtatcgtgtgggtacatttcacataagcattttattatgactttatatatcatactgtttgatttggttcgccaaaaaaaaaaaaaaattaaaaaatnntntagcggccgctctagaggatc

SEQ ID NO: 7412 - DNA, 1495 bp, Glycine max
ccacgcgtccgcggacgcgtgggcggacgcgtgggcggacgcgtgggtgtcgatgtcagttccatgttcatagttaggaaaaacggcaaaacttcactgcacaatgctgctaggtatggtgtccatcgtattgtaaaaacacttattgctcgggatccaggaatagtatgcatcaaagataaaaaaggtcaaactgcactgcatatggcggttaaaggacagtgtacttcagttgtggaggagatattactagctgatccttctattttgaatgagcgagataagaagggtaatacagctcttcacatggctacaaggaaatgccgttcacagatagtgggccttttgctaagctattctgctgtggatgttaatgccatcaacaagcagcaggaaacagccttggatttggcagataaactgccatatggagattcagctttggaaataaaggaagcccttgcagaatatggtgctaagcatgccaggtatgttggcaaagaagatgacgcaatggaacttaaaagaactgttagtgatataaagcatgaggtgcagtcacaacttatacaaaatgaaacgacacgacgacgggtttctggtattgccaaggagttgaagaaacttcatagagaagcagttcaaaacaccattaattctgtcacattggttgctgtactttttgcctcaatagcattcttagccatcttcaatttgccgggtcaatatataacggacgaaggaaaagagattgggaaagctaaaatagccgatcatgttagtttccaagtcttctgccttctgaattctacatctcttttcatttctcttgccgttgttgtagttcaaattactttggtagcctgggacacaagggctcaaaagcagattgtgtcggtggttaacaagttgatgtgggctgcatgtgcttgcacttgtggtgcttttctagcaatagcttttgaggttgttggaaagaaaacatggatggctatcaccatcacccttttgggggtacctgttctagttggcactctagcaagcatgtgctactttgtttttcgacaacatttcggcattttccgcagtgattcccagagacgcatcaagagagcaagtggaagcaaatctttctcatggtcttactctgcaaatatatcagatttggatgaatacaattctgacattgagaagatctatgccctgtgagtcaagaatcaagagaaatgtttcaaccttttaactgaaactgttatactactgccaagtgataatgttagctcaccgggatttcatcattcatcttgagtttgcagtttttggtttcaggctgtatgtgattataattaataatcaaaacttgtagatttatgtatatgtaataaaaataatatgaaagggaagtccactacttaagtttgataaaaaaaaaaaaaaagtaaattttcatctgcaccgtgcaagaaaatagagcttcctatcttaaaaaaaaaaa

SEQ ID NO: 7413 - DNA, 1340 bp, Glycine max
gagaagtcacgagaagatggatcagtgtatcctattgctagtatgaatattgatctagaaaatcgtttggaagatttggtttcttttgggaattcatacttgagtgagaacaatgataatataagccagccttttcagcatgacaaagacttgggtaaatgccaagaaccttttgatgtacctgatcatgtgaaagataatgctactgctctttggagaagattcgagcttagcacaacaaaattgtctcatgagttgactgagcaattgcgccttgtaatggagcccactgtggccagcaagcttcaaggggattatagaactggcaaaaggataaatatgaaaaaggtaattccttacatagcaagtgattatagtaaagatagaatatggctgagacgaaccagacccaacaaacgtgattaccaagttgttatagctgttgatgattcacatagtatgtcagagaatggctgtggtgacgttgctattgaggcattggttacagtatgtcgtgctgtttcgcaattggaaatgggcagcttggctgttgctagttttggaacgaagggaaacataaaattattgcacgactttgacaggccctttactggagagtctggtgtcaagatgatctccaatttgacattcaagcaagaaaatactattgcggatgagccagttgttgacctgttgaagtacttgactaacaagctagatactgcagttgcaaaagctcgacttccatctggacataacccccttcagcagctagttttaataattgcagatggtcggtttgttgaaaagaagaaattaaagcagtgtgttagagatgtgtcaactggtaatcgaatggttgctttcttgcttctggataattctcaggagtcaattatggatctcaaggaagcgtctgttgagggtggacagacgaaaattttcaagtacatggattcctttccatttccctactacattgttctgaggaacattgaagcactgcctaggactcttgcaaacttattgagacagtggatggagcttatgcaacattcaactggttgaggacttttatcgtgcaagttccattttgggagagaatctgctccctatttcatatatatagtagacccaattgtacagtgtacagatgcttcttctttgattaagaatatcatgttagctgtgcattccatgaatctttttctataatgaatattttttcacctattttttatgtatacaaaacaatccaacttttatctgtttcatctctctttcactcctcatactttcatttcttttcattcatctcttccaaacacaatgtataaaac

SEQ ID NO: 7414 - DNA, 1075 bp, Glycine max
cccacgcgtccgcccacgcgtccgacggctgcgagaagacgacagaaggggattgttgtcgtttcgttcctcactgtaaccgactcacgcttgttttcgcttcgctactcatcatcctaagaagtaccaggaagaaacaaacaatgtttctcaaagtccagctgcactggaatgtcatcatcgctgctgaaaatctgcaaccggaaggtctgatgcttcatagggcaatcattgtccgccttctgagtgactttgctgtgaagaaggccaccaaagatctgggatactttcttgcagtgaccacactggagaaaataggggaaggaaaggtcagacaacatactggggatgtgctcttccctgtggtttttaatgccatcaccttcaagtttttcaagggtgagatattagagggtgttgtccacaaggttctgaagcatggagttttcatgagatgtggtccaattgagaatgtctatctctcaaatttgaagatgcctgattaccgatatgttcctggcgaaaacgcatgcttcatgaatgacaaaatgtcaaagattggaaaagatgtcacggtccgcttctcggtgataggtacaaagtggatggaagcagaaagggaatttcaggcattggtcagtttggaaggggattatctgggaccaatttcaactccggatatttagctacattttctttgttgccttgtcttctgaaatggatgaaatattttccatatgaagtcagttcttgtaattaatgataactctgtctgccttccttttagaactgtgatttccggcttgtgtacgggatacactagtgaaatctgggaccaatttcaactccggatatttagctacattttctttgttgccttgtcttctgaaatagatgaaatattttccatatgaagtcagttcttgtaattaatgataactctgtctgccttccttttagaactgtgatttctggcttgtgtacgggatacactagtgaaatcaatatgtgcgtatgtgtaatatgcattcttctgttaatggtttagtagaaagcttgactttttaaaaaaaaa

SEQ ID NO: 7415 - DNA, 1473 bp, Glycine max
  misc_feature (1449)..(1451): n is a, c, g, or t
ttcgtttgcgagaagacgacagaagggggatttagaattaaaataaaatagtgagggaattgattgatactatactagtgagaaaagaaagggaagtcctccgcgccgccactcctcccatctctctgctctaaacgacaccgttttagtcttctcctcaagtcatggccacactcaagagcctctgcttcagaggaactgcctttcccgtttgcccctccaatgtcaccaacaatagaaactccaggagctcatattggaggcctgcacaagcagccgtgaagcccaatttccatctcccaatgcgcagttttgagttaaaaaataggacttctccagaggacataaaggctctgagattgataactgccattaaaactccatacctacctgatggtcgatttgatcttgaagcatatgatgacttggtgaatatgcagattggacaaggggccgaaggtattattgttggtgggacaactggtgaaggccaattaatgagctgggaagagcacataatgcttattgctcacacagtcaactgttttggtgggaaaattaaggttattggaaatactggaagcaactccaccagggaagcaattcatgccaccgagcaaggttttgctgttggaatgcatgctgcccttcacataaacccttactatggcaaaacctccttggatggtatgcttgctcactttcaaagtgtgctttccatgggtcccacaataatctacaatgtgcctgcacggactggtcaagacattcccccgcatgtaattcaaaccttagctgaaagtgctaacctggctggtgtcaaggagtgtgtgggaaatgaccggatcaagcagtatacagatgatggaattgttgtgtggagtgggaatgatgatcaatgccatgatgctagatggggttatggggctactggtgtgatatctgttgtaagcaacctggttcctggtttaatgcgagaactcatgtttggcggcgtaaaccctacactaaattctaagcttttgcctctgattgactggcttttccacatgccaaaccccattggtttgaacactgctcttgctcaacttggagttgtcagacccgtttttaggctaccgtttgtacctctccctgtggacaaaaggatagagtttgccaatttggtgaaggaaattggtcgagagcattttgttggaaataaagatgttgaggttcttgatgacgatgactttttcttggttagtcgttattaagttaccatgtaggttcgttgtatcctttcttggggtttgccaaatttaaaatccagatgagagtctattgtagtgaactagttaatgatcatctagtttctttttactggctactttgtagttgcaaactggttcaaatttattctggatttttttcttttggtactaaaaaaaaaaaaaaaaaagcaaaaannnagcggccgctctagaggatcca

SEQ ID NO: 7416 - DNA, 2620 bp, Glycine max
gtcggtgtaggcgtccgaggagccttcaatttcaaaaagtctcaaccaaacaaagcagcagcaacaaaacacaacaacaaaagttggtgttactgtttattgttgttagtgtttgtgttgagtctctcaactctcataagaggtccctctttggagtcccatggttgctctctcttccgcggagttcaaccactgctccaacggcctctttctctctcttcccttcctctctcctcagacccacccttttccacttgttaaggtttctctttgcagcagatcaagtgacttgggagaagggagaaaagtggtcctgagttctgactggttcagattcatggtatcgtgtgccatatggtgtgtgttttctttgtcaaatataacgtcgttaagcttgttcaaagattttgactctgaaatggaaggttttgttgtgtaagtgagaaaaaacaaaggttgacctttgttttattttggtgaagaggctggttctgtgtcttgaactgcaggtttaacaattcaacaagagtattcaacaagagttttgttgaggtaagcaaattgagtagttacttgttatatttcttggtttgttgaggagggagggaattggtatggctgttgccaatagcaacagcagcaatgaaccttgtgcttcatacaattgttacaaagtagcaggcttgactgagaccatattggacataagtcacatctctaatttaaaggatcggtacattctcggcgagcaattgggttggggacagtttggtgtcataaggacatgttctgacaaattgacaggagaggttttggcctgcaaatcaattgctaaagataggttggttacttcggatgatttgaagagtgtcaaacttgagatagagataatggctaggctatccgggcaccccaatgttgtggatctcaaggcggtttatgaagaggaaggttttgttcacctggtgatggagctttgtgctggaggggagctgtttcacagattagagaagcatggatggttttcggaatctgatgctagggttctctttaggcaccttatgcaggtggttttgtattgtcatgaaaacggggttgttcacagagatttgaagcctgaaaacattctcttggcaacaagatcttcctcgtctcctatcaaattggcagattttgggcttgcaacctacatcaagcctggtcagagtttgcatgggttagttgggaggccattctacatagctccagaggtactagctggtgcatataaccaggctgctgatgtgtggagtgctggtgttattctttacattctgttgagtgggatgcctccattttggggaaagactaaatcgcgaatttttgaagccgttaaagctgcctccctgaagtttccatcggaaccttgggatcgcatttctgaatcggctaaggatttgatcaggggaatgctctccacagacccatctcgaaggctcactgcccgagaggttttagatcattactggatggaatgcaaccaaacaaatcctgaacagctaagtgaatgtaaaatccgaaattgtgaagaatggaatgctggtggcagctcattctctgcctctttaatgtccaggagtcaggacatcagttttggtgccagctcacctacttgtgacgctcaatcacctacattcacttgcagatcatcattttcctcttttttggtggaaccagtcactccatgtctagtttctggtgggttttcattcaagagtgcaggcgattcccctgatttggaattttgttctcccgttccctcaatgcttagcttttcattcctcagccccagttctgttgttgagcaaaagagttgtaaattagagtgctcagctaacatggcagatgtaaatgcaattgctggagaaacaaacttgggaaaattgcttatgctacaagattctcctctttgcgttggacgtgaggttaaagaaacggatcgcaagcctgtagaggccaaaagggcaagcggaatgaatggacataaggtattgggaatccacagcaagagaaacaggacaattggactaggtgagtgtgagcaacttgaccttatggtgactgaatcagtcattcgttggtcatcatgcactcaactacctacatctttgagatcatctcttgtctgctaagcggatagaagacttgacttgttaatcggattgcttcatgccgtgcctaaattgcagcatacttgacgcaaattttgctcagctaacgcattgtatatgttttccttatttgcgttgttgttaatgttaactgtcttctggctggtgcaaagttttgtttagttttggtagtggcttaatggtgtgtctgattgagaagtggtactatctaatttctcactttcttgtttttcactttttctcctccttttttccgtctcatgttatttgccttgagtgtgagtaaaagcctgacggcattcattcagcctggattgtaaatgaagttgatcttgatgtatgctccagttgtcttaatctgatgtattccagtcatcttgatgtatcagtatcactatcactattagtgtgtgtttggtttagtataaaaaaaaaaaaaaaaaaaaaaa

SEQ ID NO: 7417 - DNA, 935 bp, Glycine max
  misc_feature (833)..(833): n is a, c, g, or t
  misc_feature (866)..(866): n is a, c, g, or t
  misc_feature (887)..(887): n is a, c, g, or t
  misc_feature (907)..(907): n is a, c, g, or t
ctgcaggtattgaaatgaatgatgaggagcttgctcactttgtggagcatgttgatatcggctacgttggcccccccccccttgaagaatggagagattttcttctactttaccctcatgaagcaactattgaaaacatatatcatcattgggagagggtgtgccttgttgacattggagagcaagctgtcattcccgaaggcatcagcaagcacgtgaaccggagcaaatattttcttgctggtggaatagcaggaggtatttctcgtacagcaactgctcctcttgatcgtctgaaggtggtcttacaagttcaaagcgaacctgcttccatcatgccagcagtaacgaagatatggaagcaagatggtctgttaggatttttccgaggtaatggattgaatgttgtgaaggtatcaccagaaagtgccatcaaattttatgcttttgaaatgctgaaaaaagttattggagaggcccacggcaacaagtcagatattggtacagctgggaggcttgttgcaggtggtacggctggtgcaattgcacaggctgctatctatccaatggatctcattaaaactaggttacagacttgtccctctgaaggtggaaaggttcctaagctgggaacacttacaatgaatatatgggttcaagagggacctcgagctttctacagagggcttgttccatctctgcttggcatgattccttatgctgccattgatctcactgcttatgataccatgaaagatatatccaagagatatattcttcaggatagtgggcctgtattactgcagcaactaggatgtgggacaatttctggngctgttggagctacttgtgtctatccattgcangttattcgaacaagactgcangcacaacctttcaacacttncgatgctttacagggaatgtttgatgcc

SEQ ID NO: 7418 - DNA, 1925 bp, Glycine max
  misc_feature (20)..(20): n is a, c, g, or t
tcgagtcagctacgtagggncccccccccctcccctgcgtccaaaaccctacccttctcagttgcagagccatgtctcactccgacagcagcaagaagaagaagcagcagcagcgtagcaagcacgaaggaggaggaggagaggaagaatcgaaagacgaaggcgggttgatgatcaagccgcagagcttcactcccccaatcgacacctcccaatggcccatcctcctcaaaaactatgagcgtctcaatgtccgcaccggccactacacccccatcccctccggctactcccccttgaagcgccccctcgccgagtacctcaaatacggcgtcctcaacctcgacaagcccgccaacccttcctcccacgaggtcgtcgcctggatcaagcgcctcctccgcgtcgaaaagaccggccactccggcaccctcgaccccaaggtcaccggcaacctcatcgtctgcatcgaccgcgccactcgcctcgtcaagtcccagcagggcgccggcaaggagtacgtctgcatcgcccgcctccactccgacgtccccgacgtctccaaggtcgcccgcgccctcgaaaccctcaccggcgccgtcttccagcgtccccccttgatttccgccgtcaagcgccagctccggattcggaccatctacgaaagtaagctccttgagtatgaccctgataggcacttggttgttttctggatttcctgtgaggctggcacctatgttaggactatgtgtgtgcacttaggcttgcttcttggtgtgggtagccacatgcaggagcttaggagggttaggtccgggatcatgggggagaaggataacatggtcagcatgcatgatgtcatggatgctcagtgggtttatgataattatagggatgagacttatttgaggagggttgttatgcccttggagattctcttgactagctataagaggcttgttgtcaaggattctgctgtcaatgctatttgttatggtgctaagttcatgattcctgggttgcttaggtttgagaatgatattgatgttggggaggaggttgtgcttatgactaccaagggtgaggctattgctcttgggattgctgagatgactactgctgttatggccacttgtgatcatggggttgtggccaagatcaagagggtggtcatggatagggatacttatcccaggaagtggggcttgggcccgagggcgtccatgaagaagaggcttattagtgaagggaagctcgataagcatgggaagcccaatgagaagaccccccaggagtggcttaggaatttggttttgccaactggtggggatagtgtgattgctggcttggctgctgcgccggaacctgaggatgacaagattcagaagaaggagggagatggggaagggaagaagagaaagaagcatgaaagcacagatagccccgttgctgttcctgctaagaaggtgaaagtggatgaagtggaagaggttgaaaagcaagaaaaggtgaaggtgaagaaggtagatgaagagactgtggaggttgaagttgagaagaaggagaagaagaagaaaaagaagaagaataaggagaacagcgaagcagcctcttctgatgaggagaaaactgagaagaagaagaagaagcacaaggataaggttgaagatagttcgccagagttagacaagtctgagaagaaaaagaagaagaagaaagccaaagaagctgctgctgctactgctgaaattagcaatggaaaggaggatgccagtaatgctgataagagtgaaaagaagaagcccaagaaaaagaaaaacaaagatgctgacgaagaatagaggaaggcatatttttgtgtttggttaagtggactcgttatgtattatgcctatttcttgatcatttataatttcgctttgttt

SEQ ID NO: 7419 - DNA, 1356 bp, Glycine max
ccactcgttcgtccacgcgtccgtagcgagaacacgacaccccgggggagtggaagtagtagcaagtacgtcgtatatgtggttgatcttttgctggttgtttgttttgttccttccaattgtcagatctgaatcaccggactcactcttcacactcactcacactgaatggcttctgaaggcgaccatcaccaccaccaccaccaccatcaagatcacgatcatcatcatcatgatcatgatcaccatcatcatcacgatggagagggagagaccaactcatgggtaggtaaggatgggaaggtgtaccatagccacgatggtctggcgccgcattctcacgaacccatttactcccccggctacttcaccagaagagctccaccgcttctcaacagaaacttcaacgaaagagccttcaccgtcggaatcggtggacccgtcggtactggcaaaacagctctcatgttggccctttgtgaactcttgcgcgaaaactacagtctcgcagctgtgacaaatgatatattcactaaagaggatggtgagttcttggtgaagcacaaagcacttcctgaggaaaggatacgcgctgtagaaactgggggttgcccacatgctgctattcgggaggacatcagtattaatcttggaccgctggaggagctttctaacctcttcaaagcagatatacttctttgtgaatctgggggagataacctggctgccaatttcagcagggaattggctgactatattatttacataatagacgtgtctggcggtgataaaattcctcggaaaggtggtcctggaatcacgcaagctgatctccttgtgataaacaagactgaccttgctcctgcaattggggctgatttggcagtcatgcagcgggatgctctgcggatgagagatggagggccatttgtctttgcacaggtgaagcataagattggagtagaagaaattgggaatcttgtcttgcaggcatgggaagcagccacagggaataagcgtcattaacatttctttgaaaaacggtttcctttgtgttgtatattttcttagcatgtttagtaataactccagaaacatgatgttcacgacgtggattcgagttcttatgttgtgtctgttcctgcatgttacagtatcaagttcataaacatgttactacttggacctaatctgtatgtgcgactcatctttttctctgtttttttgttaaactccctgatggtgcacttgtttagaaaggaaaaaatgtactatgaaaatgaaacttattccatgcttgctaagagttagttcaataaaatggtgacacagttggagccaaaaaaaaaaaaaaaa

SEQ ID NO: 7420 - DNA, 1136 bp, Glycine max
tcgagtcagctacgtaggcccccccccgaagaatatctgaaactgaaagcgaagaaagaaacagagttagagaattgaatgtgaatggggaatcagaagcagaagtggacgcaggacgaagaagacgctctcatagccggcgttgaaaagcacggccccggaaagtggaagaacattctcaaggatccccaattcgccccttttctcacttcccgttccaacatcgacctcaaggataaatggcgcaatttgagcgtcagcaacggtgctcaaggctccaaagaaaaatctagggttcccaagcctaaagccttctctgctcctcctgctactaccgccaccaccgccactcctcagaacgcttctcctgctcctcaaagcgcatcgtctgatgctgctgttgcccctgacgcttctcagaatgaccaagatgccaaaaaccctccaaggtataatgcattgatttttgaagctctatcagcactgaaagatagtaatggatccgacatgaatgccattattaaattcatggagcaaaaaaatcatcaggtaaaccaaaattttaaaagggcattaagtacacggttgaggaggcttgttagtcaagggaaacttgaaaaggtaccaaatggttacaaggtgaaaaaggaagcctcctcggggacaaagtcaccttcaccaaaagcaaaggatgtccggcctccacaaccacaacggcaatctccagcttctctctttatgactaatgacacattaaaggaagctgcggatactgcagcctacagagttgctgatgctgaaagtaaatcatatctggctgcagaagcagtaaaggaggcagaaaaaatatcattgctggttgaacatagtgattcaatgttacagctagcaaaagatatatatgaacaatgttcccgtggtgaaattatcctcttggcttaagatggtcgaagtaaggtctataaatagattcgttctgatgttggtttctaaatgtaaaattttgttgatccaatgaaatactatttttacatatttttttgtattttatcagattcctttaacatttttattccttaaaagtgcatggaaagtcatgtttatagtaatatcatcggtccaccaaatctttccgg

SEQ ID NO: 7421 - DNA, 1301 bp, Glycine max
tcagctacgtaggccccccaagagtatctgaaactgaaagcgaagaagtagagaacaaagaaagagagagagaattgaatgtgaatggggaatcagaagcagaagtggacgcaggacgaagaagatgctctcatcgccggcgttgaaaagcacggccccggaaagtggaagaacattctcaaggatccccaattcgcccctttcctcacttcccgttccaacatcgacctcaaggataaatggcgcaatttgagcgtcagcaacggtgctcagggctccaaagaaaaatctagggttcccaagcttaaagccctccctgctcctcctgctcctaccgccactcctcagaacgccgctcctgctctgcaaaacgcagcatctgatgtcactcccccagatgcttctcagaatgaccaagatgccaaaaaccctccaaggtataatgcaatgatttttgaagctctatcagcgctgaaagatagtaatggatctgacatgaatgccatcattaaattcatggagcaaaaaaatcttcaggtaaaccaaaattttagaagggcattaagtacaaagttgaggaggcttgttagtcaagggaaacttgaaaaggtacaaaatggttacaaggtgaaaaaggaagcctcctcggggacaaaatcaccttcaccaaaaccaaaggatgtccggccaccacaaccacaacagcaatccccagcttctgtcttaatgactaatgacacaataaaggaagctgcggatactgcagcctacagagttgctgatgctgaaagtaaatcatatctggctgcagaagcagtaaaggaggctgaaaaaatatcattgctggttgaacatagtgattcaatgttacagctagcaaaagatatatatgaacaatgttcccgtggtgaaattatcctcttggcttaagatggtctaagtaaggtctataaatagattcgtcctgatgttggtttctaaatgtaaaattttgttgatacaatgaaatactattttaacttttattttggttgtattttatcagattcccttaaacatttgtattccttaaaattgcatggaaagtcatgtttatagtaatatcattggtccaccaaatctggccagattttggatccaaaatgtaagcaatagaaactcatttatgttttttttggcgatgtaatacagatcattcatgtcttgattcttgactctagtctagaactcgatccttcgtatccaatttttttaattaaaagtgaaattttcacgtaaaaaaaaaaaaaaaaaaaaaataa

SEQ ID NO: 7422 - DNA, 1065 bp, Glycine max
cggagccttggtgtatgccacgataaataatcggctggtatagctgaattctatgaggaggattacaaaaataagggtgtcaatatcatcccaggaactgttgctgctggattcacttctaattctgatggagaggttaaagaagtcacaccccacgcggccggggtcctggaagctgatattgttgtcgttggtgttggaggaaggcctcaaacagccttagtcaaagggcaggttgaagaggagaagggtggaatcaagaccgatgctttcttcaaaactaatctttccgatgtatatgctgttggtgatgttgctactttccctttgaaattatacggtgaattgagaagagttgaacatgttgatcattctcgcaaatcagctgaacaggctgtgaaggccatcaaggcagctgaggaaggaagaacagttgaggagtatgattaccttccatacttctattcccgttcatttgatctgtcttggcaattctatggcgacaatgtcggcgacacagtactattcggagacaacaatcctgcgtcgtcaaagcctaagtttgggacatactggattaaagatgggaaagttgttggggtctttctggaaggtggaactcctgaagagaaccaggctattgctaaagttgctaaggtccagcctccggttgcagatgtagatcaacttgctaaggaaggcctttcctttgctagtaaaatataatggttttaatagggaaggataaaaatgcttggtggtttgcatagaagattgtatctgatctggctttattttactctgaattatgcattacagaaactttattttgtgtttttcgtttgatgtggttgcacgggatatatatatatatatatattgccgtatctatttcatttctctggccacttgttgggttctgtttacgatttccagacttataaacgcatctatttgcactccaagagtgtaaagctaaaaaaagaaaataaaatatagaaattagatttaaaaaaaaaaaaaaaaaaaaaaaaaaaaaaaaaaaaaaaaaaaaaaaaaaaaaaa

SEQ ID NO: 7423 - DNA, 1568 bp, Glycine max
tttctgacgcgtccgcggacacagaaccgagcttgcagcagcgatttctcatttcatttttcacacttcaacaatggcgaaaaccttcaaatacatcatcctcggtggaggagtttccgctggttatgcggcgagggagtttgccaaacagggcgttaagccaggggagttggctatcatttcgaaagaagcggtagcaccttatgaacgtcctgctctgagcaaggcttacctttttccagagtcccctgctagacttcctgggttccatgtctgtgttggaagtggaggagaaaggttgcttcctgagtggtacacagagaaagggatagagttaattcttagcacagaaatagtaaaggtagaccttgctgcaaaatctctgatcagtgctggaggagaaacattcagttatcagattttgattgttgcaactggctcaacagttataaggctgacagatttcggtgtagaaggagctgatgcgaaaaacatcttttatttgagggaggttgacgatgctgacaaattgtatgaggcaatcaaggcaaagaagaatgggaaagctgtggttgttgggggaggatacattggtctggagcttagtgcagtgttgaaactcaacaatattgatgttaccatggtctacccggagccttggtgtatgccacgactttttacggctggtatagctgaattctatgagggatattacgcaaataagggtgtaaatatcattaaaggaactgttgctgttggattcacttctaattctgatggagaggtaaaagaagtcaaactaaaggatggcagggtcctggaagctgatattgttgttgttggtgttggaggaaggcctcaaacagtcttagtcaaagggcaggttgaagaggagaagggtggaatcaagaccgatgctttcttcaaaactaatctctccgatgtatatgctgttggtgatgttgctactttccctttgaaattatacggtgaattgagaagagttgaacatgttgatcattctcgcaaatcggctgaacaggctgtgaaggccatcaaggcagctgaggaaggaaaaacagttgaggagtatgattaccttccatacttctattcccgttcattcgatctgtcttggcaattctatggcgacaatgtcggcgacacagtgctattcggagacaacaatcctgcgtcttcaaagccaaagtttgggacatactggattaaagacgggaaagttgtcggggtctttctggaaggtggaactcctgaagaaaaccaggctattgctaaagttgctaaggtccagcctccggttgcggatgtaaatcaacttgctaaggaaggcctttcctttgctagtaaaatataatggttttatttgggaaggataaaaatgcttggtggtttgcatagattgtatctgacaggctttattttactctggtttatgcattactgtgttttttcgtttgatatggttgcaagggatattatataatatatatatatgttttgccgtatctattccagagctcaaaaaaaaaaactcgatactagttctc

SEQ ID NO: 7424 - DNA, 1327 bp, Glycine max
ggggtgggccaggtgaataaacacgacgtcgctgtccttgtgagcgggtcccccgcgtctcgcacggaaccaccgtttctctctcacggtgctgccactgtcactcttctctactttctgcttcccagattctctatttttgcgcgtaatcgaatgtggaactttgcatcgaattgcattgctggaactgtgggactaaaaaatgattcaaagcctactcactctgcttcagaatgttctgatgatgagacttctgttataggcagagaggaagggctggaatgcccaatatgctgggaatctttcaatattgttgaaaatgtgccctatgttttatggtgtggccacaccctttgtaaaaattgtatcctcggactgcagtgggctgttgtgaaatttccaacactgcctgttcaacttcccctttttatctcctgcccatggtgcaaccttatgtctttccgtttagtttaccggggaaatcttaaattccctcgcaaaaactactttcttctttggatggttgagagcatgaatggtgatagagggaaatcacattcacctttctgtagcgataatcaacaacactcaattaaagacaatttaaccacgggaagccaagtaagccatggaaaccttcggaggggtcaagtttgccacccagagacatcgagttccaaccaatatcatggtaatactggtaatcacctcaatacagaaagatttcatgtttatcttcggaagtcactgatcttctttgtccagttgacggctaagttcccattggtcattatattccttttaattgtcttatatgcaataccagcaagtgcagccattttggccctgtatgtacttgttacaattctgtttgccctcccatcatttctcattttgtacttctcatatcctagtttggattggcttgtgagggaaattatcacttaagattgtgaactagtgtaggctccaactttgcaaacattaagacaacagcttatatcttctactttgtaattatccgacttctcctttagaagctgtcatttatcttcccatatagggtcgttatcaatatatgtatacttgagtcttgattgtagctcaggtcgaacttggctagttggtggatgaaatgtcagtttttggcattagcttcgatgtcaatcagggcagtgggatagggtaatgataaatgcttgtgccctttcctggtggcaagaatttgtttgattaatgccatgttttattccaattctgattatacttatatttgtaaattgtatataataattgagttgtttgtttgacaaaaaaaaaaaaaaaa

SEQ ID NO: 7425 - DNA, 1764 bp, Glycine max
gctcgagctttggaatggaatgaaacctcttcttccctctctcctaattctctctcactacatccatcctcgtaaaacaaaacaacctcttacctccgttcaagtttcacacgttcttccactatgtcctggttgagacacctctcctccaagttctcctccaccaccatcacaagcacgcgccgcttcacttccctgtcccggttcagtacctcgaccgctccggctcgtcatgcgggcctggggcccactcaggcccatgagaagcccagggtggtggtgctgggctccggctgggccgggtgccgcctcatgaaggggctcgacactgcaatctacgacgtcgtttgcgtgtcccctcgcaaccacatggtcttcacgcctctcttggcctccacgtgtgtgggaactctcgagttcagaaccgtggccgaacccatcgccaggatccaacccgctatctccagagaacccggttcttatttcttcctcgccaattgtactgccattgatgctgataaccatgtggtgcattgtgagtctgtaactgaaggggcacaggcaccagatccttggaggtttacagtctcatacgataagctagtgattgcattaggagcgcaacctaccacttttggaattcacggagtctatgagcatgcaatttttcttcgtgaagtttaccatgcacaggaaattcgtcggaagttgctcctgaacttgatgatgtctgatgttccagggattgaagaagaggaaaaacaaaggctgttacactgtgtggttgtcggaggtggtcccactggagtggaattcagtggtgaacttagtgattttattgtaagagatgtccgtcagagatatgctcatgtgaaggactacatccacgttactttaattgaggccaatgagatattgtcttcctttgatgtccgactcaggcagtatgccaccaatcaattgacaaagtcaggagttcgacttgtccgtggcattgtgaaagatgttgaagagaagaagattatcctaaatgatggtactgaggttccgtatgggttgctggtatggtctactggagttggtccatctgctattattcaatctttggatcttcctaaagctcctggtggaaggattggcattgatgagtggcttcgtgttcctacagtagaggatatattctcaataggtgactgcagtggatttgttgaaagtactggaaaaacaccactaccggctttagcccaagtggcagaaaggcaaggtaaatatttaggaatcttactaaacaaaataggtaaagccaatggaggccgtgcaaacagtgcaaaagatgtagactttggggatcagtttgtttacaagcacatgggaagcatggcatctatagggagttacaaggctctagtggacctcagacagaacaaggagggcaaagggttatccctggcaggttttgtcagttggtttatttggcgctcggcatatctaactcgagtcatcagctggaggaacagattctatgtagctatcaactgggctactactcttgtgtttggccgtgatataagcagaatatgaaaactttttaggtaaataaaactctgcgtgtaatttttatggtaatccatgaaagtgtgagagagtgacatcctgaaagataaaaattcaaatttagtctttgagtgtacaaaaagtgtgacgtaggcaatttaataataaattagtccttaagttttatcactttttatcaaaaaaaaaaaa

SEQ ID NO: 7426 - DNA, 995 bp, Glycine max
acgctacacatacacacgtttctctttatccgtgtctgcttcaaccacaatgctgaacaattcgcacgatataaacccacccttttcatccctttcaccgtctttggatctaacaaacaccaccacccattgatcggtttttgcttcatccaaactcaatgggtgccgacgaagactacgattacttgttcaagctggtcctcatcggagattcgggtgttggcaagtccaacctcttgtcccgattcacccgaaacgagttcagcttggagaccaaatccaccatcggcgtcgaattcgccacgcgaagcgtccccgttgatagcaagctcgtcaaggcacaaatctgggacactgcaggccaagaaagatatcgcgctattacaagtgcatactaccgaggagccgtaggtgctttggttgtgtacgatgtaacccgacacgtgacattcgagaacgtggagagatggttgaaggagcttcgagatcacacagaagcatacgttgtggtcatgctggtgggaaacaaagcagaccttcgacatttgcgtgcagtgtccacagaagaagccacagaatttgcagagaaagagagcatttacttcatggaaacctctgcccttgagtccttgaacgttgacaatgccttcatagaagtgctgactcagatatacaacgttgtgagtaggaagactcttgagactgtggatgatgacccttctacgaaagccttgcccaaaggggagaccatagttattggaaccaaagatgatgatgtctcagctgttaaaaagagtggatgctgttccacatagtttgtttgagagagatatacaaaagagtcttttggttatgcagtgtaacaggatgtttttgtgaactcattgttttattttgtttagttcttttttggttggtgatgtatacgattgattggcctcagctgccctttgtcgtgaacttctggtcataatacaggttttttattcaaaaaa

SEQ ID NO: 7427 - DNA, 985 bp, Glycine max
tcaggattttagtggaatattctgcgccgtgcttactgccccccgggatatcgtgtctgctggagtatttcgtgtctttgggttagaaatagctgagcttccattggtggcgacaactgctgatcatcaaggacagggttattttcagtgcctgttttcttgtattgagacgctacttggatctttaaatgtgaaaaaccttgtcctaccagctgctgatgaagctgaatcaatatggactggtaaatttggctttacaaagctacctcaagatgagataaacaaatataagaaattttatcgcatgatgatatttcaagggacctcagtgttacagaagcctgttgctgaagcactctgaagtactttctagctggagtttgtgtaaagttttttggagggccccgtatgcaatagacttctttttcttggttgttttgatgggtgcagatcacaggcggtttagtatgtacagggatctgccttttttggtgtacagaaaaactgacaaccacctctagctgttatttgttttcttagcaaaggaatgaaagggggatagagttgaaaatagaggaaagctaggacaaggggattttgtgaaactagccaaaattttggttaatgttataattcatttattattgaccaaaaaaaaaaaaaaaaaaaattggttttaacctcctgtttatagtgtagtgattttccttttccttgcattatttatcgtttaattggatgtttttctcggtaattctcgcggttgcttttacgacttacgcaagtgagagatgtacgtattaaactttcgttttgagcactaactggaggagcaaaatattttggtattttggacacattttagatttttattattttggtacaaatttgcatgtcatgaagaaagataatatctatatgatcggcatctataaaagaattaccgggagtttggctaaaaaaaaaaaaaaaaaaagggcggccg

SEQ ID NO: 7428 - DNA, 1320 bp, Glycine max
gagtcattttcattcatctctacttgtagagtgtagactagcaactagaatcgcgcccccttcgtcgtccccccccccatactgaaaacggatggatgagaagtactaagcaacttcttctgcacgagaaattccttcatcgccaaacacaatgaaggaactgggcgtggttgcaatcctgttgtcaatagagttctttgacgtgattgtctacactgtaagcaaagcagccatgaagaagggcatgaatgactttgtgtttgtcatgtactccaatgccttcgcaacttgcctccttcttcccataacttttatcttttataggaaaagagctcttcctccactcacatatttcatagttggccaattatttattaatggcttcttaagttgcagtgttcagatgctcaggttttttggaataggttacggctctcccactttggccactgcaatgtctgatttaatccctgcttttaccttcatacttgccatcgtcttcaggatggaaaaattggattggaaaactaacagtactcgggccaagtccattggcacattggtatcaatcgctggagccttaataattactctgtacaaaggccaagcagtcataaagaatcatccatcaaataaattgttccccaaaaaacatgtttcatctgaacaatttgactgggtattaggggcagtgttgcttgcgggtcatagctttgttctctcattgttgttcatagttcagacatggataatcagaaattaccctacagagcttgtgatagtgctcactcgcagtacattagttgctatgctatctatcccaccttcactgatttcggtaacagatccaaaagctttgagattaggatttgatgtgaatttgatagctattgcattccaagcaatttttggtgtatcccttcgaagtattgttcatatatgggtcatgagcaagaagggccctctctatgttgcaatggttaagtcaattggaatcatctttgcggtcatcatgggaattgcatttcttggtgactctatctatcttggaaggcatacgtttctttcatgtcttaatcatatgaaaaattggagtgtgcttggagcagccattatttgggggaaaagccaagagcaagcaaaggaagagtgtgaagtctatgatgactcggaatcatactcacccgttgtccctcttttgaagaacaagagaatggaggaatagaatcatagcaatcatttaatttctctagcttcaatataaatgtctcatgtaatattttgaaaacaaattgaattaataaaaaaaattagtcctcc

SEQ ID NO: 7429 - DNA, 1475 bp, Glycine max
cccacgcgtccgtggctgcgagaagacgacagaagggggagggagctggagaggatcgggatccgtgattttgattcatctgtacttgtagagcctttttctactgcaaagggatggatgacaagtgctaactaagcactttcttcttcttcttcttcatcccttcatcgccaaacacaatgaaggaattgggcgtggttgcaatcctcttttcaatagagttcttggacgttatcgtctacactgtaagcaaagcagccatgaagaagggcatgaatgactttgtctttgtcatgtactccaatgccttcgcaacttgcctcctccttcccataaccttcttcttttacaggaaaagacctcttcctccactcacatatttcatagttgcccaattgtttattaatggctttttaagttgcagtgttcagatgctcaggttttttggaataggttacagctctcccactttggccactgctatgtctgatttaatccctgcttttaccttcattcttgccatcgtcttcaggatggaaaaattggattggaaaactaacagtactcgggccaagtccattggcacattggtatcaatcactggagccttgataattactctgtacaaaggccaggcaatcataaacaatcacccatctaataaattgttccccaaaaatcttaattcatctgagcaatttgactgggtagtaggggcagtgttgcttgcgggtcatagctttgttctctcactgttgtttatagttcagacatggataatcagaaattaccctgcagagcttgtcatagtggtcactcgcggtatattagttgctatgctatctatcccaccttcgctgatttcagtaacggatccaaaagatttgagattgggatttgatgtgcatttgatagctattgcattgcaagcaattttcggtgtatcccttcgaagtattgttcatatatgggtcatgagcaagaaggggcctctgtatgttgcaatgtttaagccaattggaataatctttgcggtcatcatgggaattgcgtttcttggtgactctatctatcttggaagtgttcttggagcagccatagtggttattggattttatgctgttatttgggggaaaagccaagagcaagcaaaggaagagtgtgaagtctatgactcggaatcatactcgcccgttgtccctcttttgaagaagaagaaaatggaggaatagaatcatagtaatcattttgtttccctagcttcaagataaatgtctcatgtaatattttgaaaacaggttgaattaataaaaaaatttagtcataattctgttgatttgaaaccttagtctaatttgataagatagtaaaaaataatcagcttgaaacatacaaaccagtttatagtgtgatcaataataaataatcaaggcaaggtatgctaagccttttctgtcaaaaaaaaaaaaaaaaaa

SEQ ID NO: 7430 - DNA, 1682 bp, Glycine max
acgagagcaaccttcagcccttttgtccaccaaaacctgatgacattgcaaccatttgctacacaagtggtacaactggaaccccaaaaggtgctatcttgacccatggaaactttattgcaagtgttgctgggtcagctacgtaggcccccccccccccttctgatgtttatatatcctatctccctttggcacacatttatgagcgagcaaaccaggtcatgacagtacattttggcattgcagtgggattctaccagggggatagtatgaaattaatggatgacatagctgctctaagacctactgtcttttgtagtgttcctcggctatataacagaatatatgctggtattactaatgctgttaaaacatctggtggtctgaaggagagactatttaatgctgcctacaatgctaaaaggcaggctttattgcatgggaagaacccatctccaatgtgggacagattagttttcaacaagataaaagaaaagcttggaggacgagttcggtttatggcatcaggtgcctcacctttatcacctgatatcatggaatttttaaagatttgctttggttgtcgagtgactgaaggatacggaatgacagagagtacttgtgttataagctgcatcgatgagggtgacaaacttggtggtcatgttggctctcctaatctagcctgtgagataaaacttgtggatgttccagaaatgaactatacatctgatgatcagcccaatccccgtggtgaaatttgtgtcaggggtcccattgtttttcggggctatcacaaagatgaagcccagacgagagatgtcattgatgaagatggatggctacatactggagatattgggacgtggttacctggtggtcgtctcaaaattattgataggaagaagaatatctttaagttggcacaaggcgagtacattgctcctgagaagattgaaaatgtatacgccaaatgcaaatttgtggcgcagtgctttgtatatggtgatagcctaaattcttctttggtagctgttgtctcggtggatcatgataacttgaaagcatgggctgcttcagaaggaataatgtataatgatttggcacaactttgcaatgattcaaaagtaagggcagctgtcttggctgagatggatgctgctggacgagacgctcagcttagaggttttgaattcgtaaaagctgtcactttagtgctcgaaccatttacgttggaaaatggtctgttgactccgacattcaaggttaagaggcctcaagcgaaggaatattttgcaaaagcaatatctgatatgtacaatgagctctcaagaactgatgtttctcagaaaacgttgtgaaaattgagggtctccaccccatccccatttaccaaccacaacataaaagagagaggtaaacaaagactgtgactcatactcatcgtaagcaacatagcagaagcatccaatgggaacgatcttgcaacttattattttaaaaagcttacggtccgttaagttcaagttcacttatgccatttttataattttttcttctgaatgttactttagtttttaatttaatatattcatttctattattattgtgaatcaatcaatagttcaatagctacccattcaatagcattttgatattttttttttcttaaaaaaaaaaaa

SEQ ID NO: 7431 - DNA, 2397 bp, Glycine max
ctccacaaaaacaaacagaaccacaaagacaggttttgttgctcttctgtggttcttccagagagagagagagagggttgaagaggatgttctgagaggaccgctttatctgaaaaaagatcttggtttgcagaaagtcatctttcagagagagagagagagagagagaaagaggtgtaatagaaaaagagtgttgtcttttgtttgtttgtaactttacattgaattccattatttttttctctctctctcttgtgttactcgctacaagctatatgactataaccgactccatcttttaccgtggaagaaggaaatgaatatcacaagtggaagaagacacagaaggcgctaggagcatagctactttaagagagaacaaggagcaagagaagaaaacaacaaaaacaaaagcttttaggttgttctttctcttgtgtcatggcttcttcaaagaccaccaacccaacaacaactactacacaattggaaccactcccaccacctcaacaacgccatcctcctcctcctcatcatcagttgcaacaacaccaccaccaccaccatcatcatcaacaaattcatgaccatcatcaaatttcttttggaatgatgcaatcctcttcttcattttcctctatccccggaaactacctaagcaaggattccggagcttatgacttgggtgaattggatcaagcctttttcctctaccttgatggacaagcagacccttctagtgttcaagaccaaagacaaaactcatcatcaggaatgaggcctccaactctcaacattttcccctctaagcctatgcatgtagagccatcatcatccaaggccaaggctaacatagagctagtttctccacaaacaagtggatcaaagaggccatcagagccgtcgatggagttggccaaccctcgaaacgaaactgcttctgcccctcagccacccaaacctgtcaagcgagagggcaaccgcaaaggtccaacgtcaagttctgaacatgaaggacctaaaacaccagatcctaagacactcagaagacttgctcagaatagagaggcagctaggaaaagcaggcttaggaaaaaggcatatgttcaacaactagagtcgagtaggattaggctgaatcagctggaacaagagctacaacgtgctagaactcagggcatgttcttgggtggaggcgcacttttgggtggagagcaaggccttcctgtcactatgaatactattagcacggaggctgcaatgtttgacgtagaatatgctagatggcaagaggagcaccaccgcatagtgtgtgagctaagagctgcagtgcaagagcaccttcctgaaaacgagcttagactgtttgtggacaattgtttggcgcattatgatcaagtgatgaacctcaagagcttagtggccaaaacagatgtgttccatcttgtttctggcacgtggaagaccccagctgaacgttgcttcatgtggatcggtggtttcaggccatctgaactcatcaagattattgtgcgtcaaattgagcctctcacggagcaacaaatattgggcatatgtggattgcaacaatctacacaagaagcagaagaggctctctcccaagggctcgaggctcttaatcaatctctctcagacactataacatcagattctcttagttatcctcccaatatggctaactatatgggacagatggctgtagccatgaacaagctctccactcttgaaggtttcgtgagacaggctgataatcagaggcaccaaaccattcaccgtctgcaccagatcctaacaacgcgtcaagcagcaaggtgttttctggccatagctgagtacttccatcgtcttcgagccctcagttctttgtggctggcacgccctcgccaagaataggctcagtactccctagctctagctagctatatatgcatgcccttaacttatatatatagcttcttaatttctctttaattataaattaaatgttatatctctcttcatcactcctctctcccactgcatcatgggctgtatagatacagtgatatatagacagatcattaatatagaatttaatgttaacaactatagctctcccttcctggttcttttctgcaattttttgaaggtttatatataggaagccatttttgtgatagaagaactatgagggagaattaatggagagaggttgggttaatttaataaatatttaaagaaaattggtttaatttgtttggttttttttctttttatcaatacattttgattttgtgggggaaattatgttcctccgaggtaaagagagtaagacaacgtttttagtttcaagaggcaaaatggaagcttgtgtttaactcaatcgtccatttggcc

SEQ ID NO: 7432 - DNA, 1540 bp, Glycine max
ctctgtcactgtctcataacactctttgaaccaccgcaactaaaataacaaccccacttttcttctagccaaagcttccaagtttcgaattttctcatcttttcggaaaaagatcaacaccccagataaaaatagaagaaagccttttctgggttaatttggtaatttggtttttttcatgggtaacataggaagcagcggctccaacagccgctggagacacggcggaggcggtggcagcgggaggcggattcacccgccgcctccgccggtgatgtcgccgccggaggtaacggcgaaccgattcgtgtaccctccggccgccacgccgtatcacaactaccccgggtactacccgccgccgaccaccatgccggcgccgttgccggcgccatacgaccaccaccaccgtccggcggtggacccgatgtgggtgaggtatccgccggcggcaccgccggcaccggcgccgtacgtggagcaccagaaggcggttacgattaagaacgatgtcaacatcaagaaggagacgcttaggattgagcctgatgacgagaatcctggctgttttctcgtgtcgtttacgtttgatgccaccgtttcgggaagcatcaccatacttttctttgcaaaagaaggggaaggttgcaccctaaccccaatgaaggaaaatgttcttccacccgtgactgtaaatttccagcaaggtcttggccagaagtttaaacagccagctggaaccggtattgatttttcaacatttgaggagtctgagttattgaaagtaggggacatggatgtctatcctgttgcaattaaagcagatgcatcctccagcgaccatgatgaatcaaaatcaaatgaaactccatcatccggtagctcaaactctcagataactcaagcagtgtttgagaaggagaaaggagaattccaggtgaaggttgtgaagcagatcttatgggtaaatggaatgaggtatgaactgcaggagatatatggtattggaaattcagtggagagtgatgtggatgggaatgacccaggaaaagagtgtgttatatgcttgtcagagcctcgggacacaactgtccttccatgcctcgccacatgtgtatgtgtagcggttgtgcgaaggttttgaggttccagacaaatagatgtccaatctgcagacaaccagtcgagaggcttttggagatcaaagttggacccgagcttgaggagtgaagatacattgttagtgacacaagcttcctgtacaatccaactgttatagctaatactattcacttactttatcaggtttttccaataatcccaaaaaatagaaattggaatttatgtatgacattatgtttgacatgtacagcaggctggcattgcacctgacttgtattattgtataagccaatgcctccgccatgcttgtttggttttacttctaatttttaagtggctttcccttctgaatcatatttatatgtttctcacttgtcaaaaaaaaaaaaaaaatctttttaaaaaaaaaaaaaaaaga

SEQ ID NO: 7433 - DNA, 1840 bp, Glycine max
tgattctgtcaaggtagaaaagactcattttattgaagccatgtctaccattactcctgctgctcataggggagctattgtgtactctaggcctttgtctctagtagttcaaccatgtcttcagagacatttagagaaagccatgtgtagtatatctgatattttccctccagcttcaattacatcagagttgaccaaactttcgatgctctcctacgggtctgcaattccacttgtgtatcggcctaggcttctgctttgtggtggtgaaggtacagggctggatcatcttggccctgcggttttacatgagctggaaaaatttcccgtacattcattgggacttccatctcttctgtcagatcctagtgcaaagacaccagaggaggcattggtacatatatttggtgaagctagaagaacaacaccatcaattctctacttaccacaatttgatgtttggtgggagactgctcatgaacagctcagggctgttctcctgactttgctagaagaattaccatctgacttgcctatcttactgcttggtacatcctcagttacacttgctgaagttgaggaagtgcccacttccattttccctcatcgctcaatttataaagtgaatatgccatgtgccaaagataggactttgtttttcaatcttttgatagaagctgctatgtcaatattgttggagggaatcaacaagaaatctcaggatgcaggatgcctccctgaacttcccaaggctccaaaattggctagtggtccaaaagtgtctgagctaaaagcaaaggtggaagctgagcaacatgcacttcgtagattgcgaatgtgccttagagatgtttgcaaccggattctgtatgacaaacgatttaatgccttccattatccagtgacagacgaagatgcaccaaattatcgttcaattatacagaacccaatggacatggctaccattctgcagcatgttgataatggtcactatattacaagtgctgcattcctgcaggacatcaatctcattgtttccaatgcgaaggcttacaatggagaggattacaatggtgctaggattgttagtagagcttgtgagctccgtgatgcggtgcatggaatgctctcacagatggatccagcactggttgcatattgcgacaagattgctagccaaggtggccccagttcagttgtctgatgaattaggggattctactttccctgctactcctgttgtgcagctgggtcagagtactagaatgagtgctcgacttcgtcatgtccaaccagaggttaatatggatcagagttatgaagtattgaagcgaactaagaagattgccgaagtgcatgcagaagaaaagtcacaacaagattcggtgccatcaaagtcttccctggagcagcaggcaaatgacacaaattctgaaaggctggaacatgtgtcaattgaaggagatttgcatggaacttttacaaataaccttgctgatggcaacagtcctgatgatgtcacagtgctagacggtgaatttttaggagaagtagagtctgtcaagcagctttttgtgaagcgtagtgaaaattacagcattccacaacttgaaaggctttacacgagaattatgaagggcgtgtttgaaaccaaaaataaaggagtgagtggggatcttaagtcttcggttttgaagtttctgttgaattttgtagaggatgatgcaaatttctaattcctcggtttttccttctcccccaatgatttagaaaaaggaaagatttctactgtaaagtcgggattttttaaatttaaattaaatgtcatttgattgagtac

SEQ ID NO: 7434 - DNA, 2528 bp, Glycine max
cgaattcggcacgaggtcaaccttctattatcttctttgatgaaatagatggacttgcacctgtgaggtctagcaagcaagaacaaattcacaattccattgtgtctactttgcttgctttgatggatggccttgactctcgtgggcaagttgttttaattggagctactaacaggattgatgctattgatggagccttacggcgccctggtagatttgaccgtgagtttaactttcctctgcctggttgtgaggcacgtggtgagatattagacattcacactcgtaagtggaagcatcctcctccaaatgagctgaaaaaggaacttgcagctagttgtgtaggttactgtggtgctgacctgaaggctctttgtactgaagctgccatccgtgcattccgtcaaaaatatccacaggtttatactagtgatgacaaatttgtcattgatgttgattctgtcaaggtagaaaagactcattttattgaagccatgtctaccattactcctgctgctcataggggagctatcgtgcactctaggccattgtctctagtagttcaaccatgtcttcagagacatttagagaaagccatgtgtagtatatctgatattttccctccagcttcaattacatcagagttgaccaaactttcgatgctctcctacgggtctgcaattccacttgtgtatcggcctaggcttctgctttgtggtggtgggggggcggggctgctgggctggatcatcttggccctgcggttttacatgagctggaaaaatttcccgtacattcattaggacttccatctcttctgtcagatcctagtgcaaagacaccagaggaggcattggtacatatatttggtgaatctagaagaacaacaccatcaattctctatttaccacaatttgatgtttggtgggagactgctcatgaacagctccgggctgttctcctgactttgctagaagaattaccatctgacttgcctatcttactgcttggtacatcctcagttgcactttctgaagttgaggaagtgcctacttccattttccctcatcgctcagtttatgaagtgaatatgccatgtgccaaagataggactttgtttttcaatgttttgatagaagctgctatgtcaatattgttggagggaatcaacaagaaatctcaagacaccggatgtctcccagaacttcccaaggcaccgaaattggctagtggtccaaaagtatctgagctaaaagcaaaggtggaagctgagcaacatgcacttcgtagattgcgaatgtgccttagagatgtttgcaaccggattctgtatgacaaacgatttaatgccttccattatccagtgacagatgaagatgcaccaaattatcgttcaattatacagaacccaatggacgtggctaccatcctgcatcatgttgataatggtgactatattacaagtgctgcattcctgcaggacatcaatctcattgtttccaatgcaaaggcttacaatggagaggactacaatggtgctaggattgttagtagagcttgcgagctccgtgatgcggtgcatgggatgctctcacagatggatccagcactggttgcatattgtgaaaagattgctagccaaggtggcccagttcagttgtctgatgaattaggggattctacattccctgctactcctgttgtgctgctgggtcaaagtactagaatgagtgctcgacttcgccatgtccaaccagaagttaatatgaatcagagttacgaagtattgaagcgaactaagaagatcgctgaagtgcatgcagaagacaagtcacaagaagattcggtacccccaaagtcttcccaggagcatcaagccaatgacacaaattctgaaaggctggaaaatgtgtcaattgaaggagatttgcatggaacttgtacaaataaccttgctgatggcaacagtcctgatgatgtcacagtgctagacggtgaatttttaggagaagtagagtctgtcaagcagctttttgtgaagcgtagtgaaaattacagcattccacaacttgaaaggctttacacgagagttatgaagggcgtgtttgaaaccaaaaataaaggagtgagtggggatcttaagtcttcggttttgaagtttttgttgaattttgtagaggatgatgcaaatttctaattactgggtttttcttctcccccaatgatttagaaaaaggaaagatttttactgtaaagtcgggatttttttaatttaaattaaatgtcatttgattgagtacaaaaattccctttcttctcccttcccgagagccacaattgtccaaagcgatgtatagtagtgtgtaaccatttattctgtctctattctgaattatcgtaattataggatattaggattagatgccagcagcatgcttaaacgtcaatggtcagtcagagagatagaactttttttttgttgctgtcaacctatagcaactactattaaaaaaatatgttctctacct

SEQ ID NO: 7435 - DNA, 1565 bp, Glycine max
ctgcagtatatgaactcgccgaagccgcagtttaagaattctccgatgccgcagtatatgccaactccaaagccgcagtttcggaactcgccggcagtgtcgaagttcaacccggcggtcccgcgcgtccgcccgcgcgtccggacgccaatgcatccattcgggaaagtgaacggtgcagggtttgagtacatgacaccgcggaggtcaaacttggcgaacatggggcatgtggtgataacggagtcggagctggggccgtcgccatcggaggtggcggcggcgatcgcgaggaagccggtgatcgacgagggggagaattcaacggtgggagggtggagcttggacgcggagagcgtggaggggctgcagtcgaagctggagaggtggcggacggacttgccgccggtggtcgatcgcggcgaggtctcgagctacccaacgacgagcaccaccaagacgagccggcactcgcggaggcacaccgacggcgggagtactgggagtggcttgttctcatgctttagtaacatatgtggtgttgagtgctacgttggttgcggcggtgaccctaaaggaaagaagaaccgcatccgcagtcgccgcactccctcagcggatgacagttccagtcttctctaactacccacaacaatatgcattgtggagccaacatgggaatatttgtggcaatggactatgctgtaataattttattcattctttgttattccatcatctgtttttgctactccatcttttgtcaattgtaagacatgtcagtttaattcgttgggactccacaatacaacataaggctatacacatatttccttacttatatctctctgttttccttagttgccgatcatatgaatctgatcatgtgagcatttaatgagggctttattacgtacctttgtgattgatgagtttgtttgtttgtttgtttcaaatttgactctataatatgatgtgattcattatgaaggctgtattttgggcttttcgttgttccatcttcctcaatgacaattacgtatatattcgtgtgtgttattgcaaaggtggtttcagttttattaatatgatgatgcgcagtctactgaaagtgcttcaacgagttgtgtagtcttattttcatattgaataatgatgggtagacaccctagagagataataaaagagacgagagaaaattgcttcaatgagttgtagtcttatcttaactttccaatagttgtaattgtaaaaattatgtggattgctgccaagttgtaacacactaataacatgctctacgcttacaagctaactacttgactttaaaatacataattctggttccggcataaaagttctttgagcttttttttattttattatttttccaattaggtagaaactgctttctacccattttagctgatctacaagaactccctgggatcagttacgaaaccagttagtgcagatgctgcagcagtataggcggaagccagatatatctgcccttccatgtgccccatccgaccagggaaatttcgatttgttgttgagacaca

SEQ ID NO: 7436 - DNA, 2079 bp, Glycine max
cttcttcttcgtcgtcgtcgtcgtcgtcattgtcgtttcgtttcatttaacgattttcacaaattacaatttacaacctacgtttcttattttcggatattcatgagttagtataccccagacgtggtttttcgcgtcagctaagaagctggtagttgtaactttcacatccctgacgtgatttcttacttctcaacagagaattgagttgatggggggtaacaattctaaggaggataataacaattggaggcagaattcatctgtgcgttcaagttcctctgcgtcttcttggggttcatatcctgacccccaatcaggttatggtcacgggggttacgcgtatgagccacaacagccttcttatcctacacagcagccgtattatgcccaaccgccgccgccgccgccaaactatggcaatgaacctcagcctcatgctagcggcagagtggccggccacagaaatgagaagcggttagacaggaaatactcgagaatcacagataactacaactccatagatgaggtgactgaggctcttgcacgtgcaggccttgagtcttcaaatcttattcttggtattgatttcactaagagcaatgagtggacaggaaagcattcatttaacagaaaaagtttgcatcacattgggaatggtccaaacccctatgaacaagcaatatcaattattgggaagaccttggctgcatttgatgaggataacttgattccttgttttggatttggggatgcatcaacacatgatcaagatgtctttagtttctatccagatgaacgaatttgcaatggatttgaagaagtgttgagtcggtatagggaaattgttcctattattcgacttgcaggtcctacttcatttgcaccaatcgttgaaatggccatgacaatagttgagcagactggaggccagtaccatgttttggtgatagttgcggacggccaggtaacaagaagtattgacactgagcatgggagactaagtccacaggagcagagcactgtggatgccattgttgaggccagtaaatttcctctttcaatcatattggttggtgttggagatggtccttgggacatgatgaaggagtttgatgacaatatcccagcccgggtctttgataattttcagtttgtgaatttcacagaaattatgtcaaagaatattcctccttctcgaaaagaggcagcatttgcgcttgcagcactgatggaaattccttctcagtataaggcaacaatagagcttaatctcttgggtggtcgaaatgcaaatgctcctcagagagttgctctcccaacaccatcatatggttcagcatctatgggcatttcaaaaccttatggttcagcatcttttggcgcttcaaaaccctatggttcagcatcctttgatgccccaaaaccttatggttcagcatcttttagcagttcaaaaccttctcatgctgctagctttgagcagagtgccccttcttattatgacaacacggaccctgttggcacagctcctcctgccccaagttcctcatatgacaatcagctttgccccatatgtctgaccaattcaaaagacatggccttcggatgtggacatcagacatgttgtgaatgtggacaagatcttcagtcgtgtcccatctgtagaagccccattaacaccagaattaagctttactaggcggcctcttccgttgtgaattaattattttgttgtgtaagctaaaattctttgatttttttaaccttctctggttgtatacaaacgttagatcagctgtgtctattgatgaaaaatggtacaacaaaaaaatatccaaaccaattaaattatttggttttatttggtttggacttgtaaaaaaattcttcaaaccccaaccgaacaaatgtgaacaagaatttgtttggtttgtttcttgggttgtccaaacaaaaagaaaatgttaattcgaccattttagtatccagagtaaattggtgaaagaaaagcaatatttcagcacatgtagtcaactaattcttatcataaataacaaatcctaaagttatacctaa

SEQ ID NO: 7437 - DNA, 518 bp, Glycine max
atccaattccaatcacaagctccaaacaagcacagcaaaccaatccagagtaccatcggctatcaatcagcaggaggaagaaatagctgctcgatcggggaagaatcaagaggctcggcgaagatgcaggcggcgaaggagaaggtgaaggacggggtgagcgcggtgaaggccaagaccaagatcacgcaggccaaggcgtcggagaaggcggaggcggccacggcgaggtcgcacgccgagcgggagctggcgcacgagcgcggcaaggccaaggtcgccgcggccaagatggagctgcaccaggacaaggcgctccaccgggaggaggccatggagcaccgcatccacaagcacggcggccacggccgccaccaccacaagcacggcgtcggcatcgtggccgcgcccccaccggcaactggggcgggagccggggcgtaccaccatcctcccgccgccggtggccactactactaatccctaggcagctcgatcgccagctagatgggcacttg

SEQ ID NO: 7438 - DNA, 2060 bp, Glycine max
acatcctccttctttcatctctctctctctctccccacgcgtccgcccacgcgtccgttttcctttgcctgtgcgtgtgaaagatcgcagcaactccaccaccatcacaacaggaccgtaaccgatttccaaggttgagttatttgctggtctaacttaaccatactgtctattttgactcctgagattgctagtgagtcatggggcatagacatttatatagctcatctccaatatttgagggtgaacctgaccagaactggaatcatatgcatatggatcaacaatatgtgaaccatggtaggagtaccacttcagacaatggttcttttatttatcctttggaaaatatgtccatagatagcatttcttttccatctcattggaacactgccccaaggtcaaacggatatgcatccacaagtctcaacattgaagcaccccctcatcaaacagatgtatcaggcacttctcatgatcattttctgccttcatcaagtgctggaatgttttatgcagtgcctgaaaattatgtacaccagccttctaattctaattatgacagacaagcattttctgctgctgatgggggttttattgatcttacaatgggaaatggacgagggcctcacaagcgaaagagccctggaattcctccagtctgtgaaagaggcagtacaagcagatattccaatgctacaaatgcagctgatcgtcctacatcttcagaattgcagccagagaagcccaatatggattctctatatatgccttgggaccatgttaatatgacacccacatttagaggtagaggcctatctataaggggtgagggtcctttaaggaatgtgaggagccgttctgcacttgatttggaatccaacctggctaggacccatttatcaaatactcatccacacaactcatactctactggtctaccaattgaccattctaacatggtcgatctttcaactcaaacttctggcactttgaccagggattggagcccaatgagtatatgtcctcctcatggaagggtgtcatcatcagatgcaaatgcttttaatcacgaggcaagtcatttccttattggaagcagttctagtaatgctcctgtagatgttggaggttttcataatgaatttggaactagtagaaatcctactgctcctcaaagttttcataataatctgactcaaactgcaagaggagttcacagtaactactctcaaagatccactccaacttttagggcttcttctagcttacgtttgggacgtgtggcaccttctgatgatggattgcatatggtgtccgaaagttactcttctagacagccaaggccattgaccaccgttggctggcagaacaataatagaaatggaaggtcaagaatacctagtgacagatatcggtcattggatgatgagggtttcatgattgttgatcgcacttcactgtatggacctaggaatatgcttgatcgacatagagacatgaggatggacatagacaacatgagttatgaggaactacttgcacttggagagagaataggccatgtgagcacaggattgtctgaggatttgatttccaagtatttgacagaaacaatatactgttcatctgagcaaagtcaagaagaagaagcttgtgcaatctgcctggaagaatacaagaacatggacgatgtcgggacgctgaaagcttgtggacatgattaccatgtgggttgcattaggaagtggttgtctatgaagaaagtatgtcctatatgcaaagcttctgctttgcctgaggataagaagggcaaataaacaatttattcattatactttagtttaacgtatatcatcattctgtacatatatttggatattccttgaagtggagaaaacagacttccatttggatatgttgttgtaatagctaatgctatactctatctatatgtctatgaattcgttctctttggcttcactcttaatttcgtgaagccttgaaattaaattatcgtacttcaatatttgatttaattccacagacccttgaaaaaa

SEQ ID NO: 7439 - DNA, 1512 bp, Glycine max
tcgagtcagctacgtaggccccccccgcgatatcatgttagtgaagagggagagaggatccaaatccaagtacggttgggttggagagaaaatgcgtccctgctgaaaacaccaaaccctaaaacgcgaaaagggttctaagaatttgcgaaggaaagagctagcggagatggagattcactacagtaacagctatttcgagaggcgccccatcctcaagtccaaggctgccgctgtcaaatgggtcaaagaatgggttccccaagatcttgtgacaacaggagggaagtgcatgatcttaaaatgggtaacagaggataccttgaagaccttgaaagaaaaggtaaaagagccttcagtgccagagccagaacctgagccaactactgaagtactttttctttgcagctatgatggctgtggaaagacattcatagatgctggtgcattgaggaaacattctcacatccatggagagaggcagtatgtttgtcactacgatggatgtggaaagaaatttctggatagctcaaagttgaaaagacattttctcattcatacaggggagagggattttgtgtgtcctcatgaaggctgtggtaaggccttctccctggatttcaacttaaggtctcacatgaaaacacattcccaagagaactatcatatctgcccatatccagattgtggaaagagatatgctcatgaatacaagctaaagaatcacattgcatctcatcatgaaaagaatgcatccgtggatgtgacaaagtacactactcccccttcagagaagcaaacaaaaacttctaaaccatctggaggggcatatggttctgcatcatctgaccgtccctatgcatgtccctatgatgggtgcgaaaaggcatacatccatgaatacaagcttagactccatttgaagagggagcatccggggcttatggctgatgaaaatgcagagcatgctcaggctaatgttgacaatgaaatggatgaagcaagtgaccatgatgcctatgttgcgaaacgatcaaatggtaaaattcagaagcagagtaagcctaaaccaaacctcaagttgcctccttccaaaattgcaaaacgcaaactgtccactccctctttaactgtaaataaaaattcttggcccgtgaaagatgaacctttcgatgaagaagatagcgaagaaacagaagaggatcgtgacaatgttgaagatggttggagatatgcaggaggaaacaatgaagatgatgatgaggaaacagaatatgaagactgaatcagttatggcatcctctatgaaacttaccttttccaagaaatatattttctcttctacaaaaaaatttcagttgtctcttttttatttggctgaggaaatgacatcttgtcaaactgtgtgttgctgttacaagcattaggaagaatttatataaataaaatgcgatttaaaatgcaaaaaaaaaaaaaaaaaaaaaaaaaaaaaaaagcggccgctctagagga

SEQ ID NO: 7440 - DNA, 2132 bp, Glycine max
  misc_feature (3)..(5): n is a, c, g, or t
ctnnntccctccttcagtctttactttaattccgtataaataaaactatacagataggaaattttttttttttttttttctttttttttttgaaaaatgatgattagctcgattcaattttcactacggcagtggcagaagttcagtatggtgaattttgaatacgtacttttccatctgcttttcatcctttatacaagagaaatgtagtataatatgacgcagccataaagagcactcaatcattaatacagaagatagttacggagcctgtacacctggtgtctttcttgcctaaagttgcagttcagcttcttcaatcatcaaaaggtgaataacgtgatcatttaaacttcagagccagagggctctgtggacaacgatgagtctgtgccataattccaaaggctcttcaactcacctcttatacatcccaatatgactgtgacacctagtgtgcatggaacaaggtagagaagtgcaggttgtccatttccattcatcagatatagtcccatatatgtcaaaacgaggccaatgccatagccaactaccaaccaaagaaaatatccatttgatgctcccctcctattatctttgtcaaatctatgagcaaaggaaataagcaaaccaggaaacagaatatctccaaatccaatcatgtcataacctccccagggatcaaaaagacgaggaaatctcaaaagcataggaattgcttctccaccagccttgtcacctcgagcaacggcaatcataacactctcgtggaaaatcactggagatatgaatacccaaaaaatgtcatagacaaaggcacaacaaaggagtacagttgcaaccttaatattaggtaatcgagccaactgcaagactgttatcatcaaacagatgccaaggatatcttggccaatccatgaatatgattcctgtcgagtagcagcccagaaaattgcaaatgccacacagaataacaatactgccagtgagaaaatagagatctccccaaatagaggtaagctcactgtcttctgaccacaattttggcattttcttaaagtgaggcttacaatacaattgtgcataccctcaataccaccaatgcagaaaagtacaatcagcacccagacaaaccaagttgacatgaagaagaacaatagcacaagaaaggtagacgctgctatgacaaatatgacagcaccctttgaatcaatgttaacaatttccttgtccaaatcatcttttgctgtttccgcattagaagattccttggggcacaattcgttatagcgttcatcagacttctctggggtagtcagatcggaccatagtgaagcacatacaatagttccaacagacatcaaccacaaaaatgcaactgagaagtccacaagtggccgaggcggagcatataacaaaatttccactttgcttccagatgtgaaagacttgttgagagattgtcctgctgactttgctatcatgactactggaattgaaatattagcttcagtgctattggagcaaaccatctcaaagagatcttgtgcgtcgttgatgaccaacatggcagtagcacctacagactgtgcaaaatcagctttaactgtgaagtcacaacccccacgcacacagagagcaactgagccagataaccttgaagttgaattggaacagcagtctaagggatcagcgaatattgctggagttttcacactgttgtcaggtttctccggcaacacagacccaaatctagcactgacgccattataaatatgcccttcctcaccatccacccagttctccaccttcaccagttggaaggggttattgcaggattccgacttgggagccctgtcgtcgtcgcgtttggcatcgtcggcgcccgcgccaatcacaaacaacaacaccaacaacacaccgagaccacgaaacgccatcgtttgccaccagatcaagatcaagactctttgctgctgcttttataatttattcttttcttctgtctctgtctcgcatggaatcgaatagaacagaggaattcaattcaataatgcaaattttgttactcgctccgcctcttcgctgcctccactctcaactccaattggggggggggcctacgtagctga

SEQ ID NO: 7441 - DNA, 2375 bp, Glycine max
gcccccacacccgatcgaagaaagaagcatcataaagcaatacacttttttcccctcattctaccttccttcaccttcttcttcgttgcggtggtgccctagattttctctatccctttgatcgttcctgaattaccagcccccggccctcgctctagggtttcccatggattccgaggacgatatgcacgacgccaacgatgtggagtccctcgacgacgatttctacagtggcgagaccgaggaccctcccatggattactacagtgactacgacgacaacgccgacgattacttcgacgacgccgacgattctgaccggattgagtctcgccgccccgagcaaaactttaccatattgagggaactggatatccggcaaaggcaggaagacgacatagctagagtagcggcagttctttccataccctcgggtttctgcgagcatcctacttcgtcactacaactggagtgttagtaaggtgcatgatgcttggtttgctgatgaagatcaagtccgaaaaacggctcgtgcgcgggccgagccggctcgccagaattctaatactagagagcttacttgtggcatctgttttgaaatgtatcctcgtgcacgggttgaatctactgcttgtggccacccttactgctattcatgctgggcaggatattttagcacatcaattaatgatggtccgggatgtttggtgctgagatgtcctgatccctcttgtggtgctgctgttggtcaagatatgattaaccttttagcatctgatgaagataaagagaagtatgaccgttaccttctcagatcttatattgaagacaacaagaagaccaagtggtgtcctgctccaggttgtgaatatgcagttacttttgatgctggcagtggaaattatgatgtatcttgcctctgttcatatagcttttgctggaattgcacagaggaggctcaccgtccagttgactgtggcactgtttcaaagtggattttgaaaaatagtgctgaatctgaaaacatgaactggatacttgctaactcaaaaccatgtcccaagtgcaagcgaccaattgaaaaaaaccaagggtgcatgcatatgacatgtactcctccttgtaaatttgagttttgctggctatgccttggtgcatggtcagaccatggtgaaaggactggtggattttatgcttgcaatcgttatgaagcagctaaacaagagggagtgtatgatgaaactgaaagaagaagagaaatggcaaagaattcattggagagatacacacattattatgagcggtgggccagcaaccaatcttcaaggcaaaaagctcttgcagatctacaccagatgcaaactgttcatattgagaagcttagtgatacacagtgccagcctgaatcacagcttaagttcataacagaggcctggttacagatagttgaatgcaggagggtgctgaaatggacatattcatatgggtactatttaccggagcatgaacatgctaaaaaacagttctttgagtacttacaaggtgaggcagaatctggtttggagagacttcatcaatgtgctgaaaaggaactacagctattcctgaatgctgatggcccatctaaagatttcaatgactttcgaaccaaactagctggattgaccagtgtaactagaaactactttgagaatttggtgagggcattagagaatggtttagttgatgtggatagtaatggagctgcttccagcaaagcaacgagctcaaaaaatgctgcagggagcagcaaggggagaggaggaagaggaaaagcgactattcgaactatatccagcagaatgactgatgataatcattggtcttgtgagcactgtacctatgccaatgttaagtctgccaccacatgtcaaatgtgcaatcaacagcgtcgatgaaacttggatccttaattagaaatccatgtcttctgcctaaggccaatgcaccaaaagctgaaatggagtccttactcatagttatatcatatgctggctccttttttaaggctacttactgtgaaagggggctaagtcgcgtaagggttatcctccttgcactcctattgaatacatcccaatttaatgtatataatgtctcatctttaaaatttccgtatggggtttatgcaacaggcttctgtaactgaatatcttatacagcacatgctggagatgaacacaaatgtgcttgtttgtgtcctgatttcttctagtaaatctctatgcagcttctttaaaaaaaaaaaaaaaaaactcagactagttctctcaaaaaccccctctgaaaactggaagcgttcttctaaaaatcgatggattcagcgttttcgtcct

SEQ ID NO: 7442 - DNA, 2560 bp, Glycine max
aattcggctcgagctcttggaacttttctattattttttctctctccattctccattctccattctcctctttgcttactaatagtaatccccccttccatatcatggcatcgatatccatatattttcataatttttctttcaattccccaaaacacattaataaaaggaaatcaaatcaaagcaaagacaacacgcattcttttcttccccaatttccaatccccaattcttctgccctagattttgtccctttttttattgcactccacccacccaccgtgcatcggtcgctggttcctgaatttcccttgtggttaggtttcctcgatggagtcagaggatgatatgcacgacgccaacgacatcgagtccctcgacgacgatttctacagtggcgagaccgaggacgctcctttggactactacagcgacgacgacgccgacgattacttcgacgacgccgagaggatcgagtctcgccgccctgagcaaaattttaccatattgaaggaatccgatatccgactaagacaggaagatgacgtcgctagagtagcaacggttctttccatatcaagggtttctgcaagcttactactccgtcaccacaattggagcgtcagtagagtgcatgatacatggtttgctgatgaagaacgagttcgaaaagcagttggcttgttggagaagccaattgtccagcatcctaatgctagagagcttacttgcggtatctgttttgaaaattatcctcgtgctaggattgaaatggcttcctgtgggcatccctattgtatctcatgctgggaaggctatatcagcacatccattaatgatggtccgggatgtttgatgctgagatgtcctgatcccacttgtggtgctgctattggtcaagatatgattaatcttttagtgtctgatgaagataagcagaaatatgcacgttaccttcttagatcttatattgaagacaataagaagtccaagtggtgtcctgctccaggttgtgaatatgcagttacttttgatgctggtagtgctggaaattatgatgtctcttgcttctgttcatatggcttttgttggaattgcactgaggaggctcatcgcccagtggactgtggcactgtggcaaagtggattttgaagaacagtgctgagtctgaaaacatgaattggatacttgctaactcaaagccatgtcccaagtgtaagcgaccaattgaaaaaaatcaagggtgcatgcacatgacatgcactccgccctgtaaatttgaattttgctggctatgtgttggtgcatggtcagaccatggtgaaaggactggtggtttttatgcttgcaatcgttatgaagcagctaaacaagaaggagtgtatgatgatactgaaagaagaagggaaatggcaaagaattcgctggagagatacacacattattatgagcggtgggccagcaatcaatcttcaaggcaaaaagctcttgcagatctacagcagatgcaaactgttcatattgagaagcttagtgacatacagtgtcagcctgagtctcagcttaagttcataactgaagcctggctacaaataattgagtgtagaagagtgctgaaatggacatatgcatatgggttttatttgccggagcatgagcatgcaaaaaaacagttctttgagtacttacaaggtgaagcagaatctggtctggagagacttcatcaatgtgcggaaaaggaactacagccgttcctaagtgctgatgatccatctagagaattcaatgactttcgtacaaagctagctggattgactagtgtgactagaaactactttgagaatttagtaagggcattagagaatggtctatctgatgtgggaagtaatggagctgccttcagcaaagcaacgagctcaaaaaatgctgctggtagcagtaagggtagagctggaagaggaaagggaacttttcgaactagcttgtccagcaaattgaatgatgatagtcattggtattgtgagcattgtacctatgcaaatgtcaaatctgcctccacatgccagatgtgctatcaacaacgtcgatgaaaacttggttctccatttgaagcacttgtctcctgcccaaggcctctgcaccaaaagctgagatggagacattcctgtatgtttatatatatttatgcactatgcagtctccaattttgtgatgctaaatacaacaggatgaaaggagtaaggcatggaagaaaggttgctctccatgcgctcctattcaatacaaaacccaatttgatgtatatagtgttctatctctttatgtatgaggttttctgctacaggcatttgtaactcaatatcataacacaacagatgttggagaatggagatgaacacaaatgtgcttgtttgtgacaactctttcagttggtctcttggcagcttccaagagggttagtcgtgtataataagctcaggatttgattacattctaaaaaatgacaagggactgcaataaatattactacactgtatcacttgaaaaaaaaaaaaaaaa

SEQ ID NO: 7443 - DNA, 873 bp, Glycine max
cggaattcccgggtcgacccacgcagccgcgcacgcccgcgcaccccttcctcatccactttcactggaatcacaatcctgaaacaaaaacatcttagcatttaacatactactagacaacatgaccaccacattggaaagaggtttctcggaagagcaagaagctctggtggtgaagtcatggaatgtcatgaagaagaattctggagagttgggtctcaagtttttcttgaaaatatttgagattgctccatcagctcagaaattgttctcattcttgagagattcaacggttcctttggagcaaaatcccaagctcaagccccatgccgtgtctgtctttgtaatgacctgtgattcagcagttcagctgcggaaggccgggaaagtcactgtcagagaatcaaacttgaaaaaattaggtgctacccattttagaaccggcgtagcaaacgagcatttcgaggtgacaaagtttgcactgttggagaccataaaagaagctgtaccagaaatgtggtcaccggctatgaagaatgcatggggagaagcttatgatcagctggtcgatgccattaaatctgaaatgaaaccaccctcctcttagactccagtttaagcagttcctttccttccctctcaattctcaaattgttatattaataaaagtgagaaagtttaggcttgtgcttttattttgtgtgaatgtaatatactttgtgtacgtagacttggctattgggagttgctaggttgggaagtgtttcgcattcaacaattctgtagttgaaggtgattaaatgaattatagctatttgtttctttatactaaaaaaaaaaaaaaaaaaggaagcccggggcgggttctcctcg

SEQ ID NO: 7444 - DNA, 2259 bp, Glycine max
  misc_feature (1812)..(1844): n is a, c, g, or t
  misc_feature (2252)..(2252): n is a, c, g, or t
acttgcaattcgttctagttattattagcttataaaaacaataaaaagagaactaattccaactttgcaatattctcgggttttcttcttccttttgcttttttataacatgagggggaaactataaattaaaagcaaatcacaaagaataacaagtagaaaatacaatacatacatattggggacgaccaaaacttgaggaacttgaatgttgatcaatcattctcgcacctacctagtatgcctttaattgagaggagacaactccagggaagcatcgatgtttcctgttgaaatgatgcacctatattgacatttaatgttggagaaacatttgcatacttcactttcataccttgacatacttgtcaacataacccatcacaagtttagtcaactttcgctgtgatgaatcaatatattgacttatcttcgtttgggacttgggtacacggtggcctttcatggctcctgacactttatccacagtctttttcacaatggttttgaaagccaccttactcatattaccttgccgccatgatggtttcaaaacctcctttacaaagtttgcaatggaaactttgaacaatttcatcgatctggaatccttactcttttttcttttcccaggagacttgacctgattaatctcaacctcccctgaagtcagttttgcaacatccacatcatcacttaggctctcattttcaacagcaccaacttctgcatctgctgtttcaccatattcatcaatattttgagaagtggtagaggcaacagccccaacctcctcctgcttgttcttctcatccgagtccaaagacatgtaagaacttttgggccttaggctgatgttggattcacctgtaacttccttcttctgatcaaaatcaatttttttcagagaagaggatgatggttcaatgctgtcaaaaatcgggtcatattggtcaccaccagacctaggtaaaatctgaccaagagctctagctgattttgatgaggaagctgactgtcttaatccaaccacaccatcaccttccccatttacaggagtatggttcaatctagaagaagcataattgttaccatggattatttcatcttcctgtctataaatacttgaactgaatttggaacttagtggtttctcaaaggttgatgcataaggattatagtgagcagatattcttgatcccccaaaagatggaagagaagttgaatgattgctatccagaaaatcagatggatatcttgaaacagtaacagtctccccaggcacacccaaattagcctcggatacagaacattgaaaattatacattggttgttgcttctgtgataatgaatcgatgtgggaagatgtcataagatgtccttctggaggcaacttgccacccagagtaggttgtagtctgttcacatccaacttccaggaaaattgatttgattgaggctgcaggctcccaaatgatggggtacttgaaaattttgaatcctgcataggaagttgattatgaaagtcatctctattgagattagagcctgaaggcaattgactagctgggttcccctgagggagatgctttggagagaaaggttctgtaagcatgaaagctcgtgaatgatcctgcattggagggtatgcttgatcctgaaattcagaattctgagaaccagttggtaacccaggcttcatggaagtctgagaaacaaagtcagttcttgaatgcaattgactctgattgaattcagaagaaatatatgattttccaactcctgagtttaaactggaatcatacaccgctnnnnnnnnnnnnnnnnnnnnnnnnnnnnnnnnnagtggcaaggatgtccaagagcctattaggtggtacattgaagtgagccttctgcatgtgtaatggagctgggtaaggttcaaacttttctctcgtagtggattggaaaggaaagaattgactctgttgcattgcaccttactgccttgaaatttgtggcatatgcacaggattttcaccctggaaatgtgaaacagcagaagctggcaactggtaagtatggaaccggtaattccccagaagaaccactctgtgggaggtaactcttcaaaagcctcagagtgcaatgaaggctgctctgatgtgacacattgcccaacagaactagtggctgactgttgctgagttgatgacaaacatgggtacagttcactaccaggagcttcatttacactagcagaaacattngatcttt

SEQ ID NO: 7445 - DNA, 1430 bp, Glycine max
tctacggccgcctgcagaggcccccccccggaagttgaaggggaaagagagaaaagaactagctagctggagtctgagaactctagcatgtactagtactactcctacattcctccatcttcctttgtactattttttttttaaccataaaagcaagagcacaaagatggtgagagctccttgttgtgaaaagatgggtttgaagaagggtccttgggctcccgaggaagatcaaatcctcacatcttacattgacaaacatggtcatggcaattggcgtgccctcccaaagcaagcaggcttgttaaggtgtgggaaaagctgtagactccgctggattaactatttgaggcctgatattaaaagagggaatttcacaattgaagaagaagaaactatcattaagctgcatgacatgctggggaacaggtggtcagcaattgcagccaaattgccaggaagaactgacaatgagattaaaaatgtttggcacaccaatttgaagaagaggctgctgaaatcagaccagtccaagtccaaaccaagttccaaaagagccattaagccaaaaatcgaacgttctgattcaaattccagcatcataactcaatcagaacctgacaattttaatttcagagaaatggacacaataacatcatcagcatgcactacttctagtagtgatttttcatcggtcacggttggtgacagcaaaaatatcaagagtgaagacacagagtctacggaaacaatgcctgtgattgatgagagcttttggtcagaagctgcaattgatgatgaaacccccaccatgtcatcatctcagtctttgacaatctcaaatgagatgcgacttcaatacccttttgctaactatgaggaaactttccagcagggtcatcatgcttatgattcaaactttgatgatggcatggatttctggtatgacatatttaccaggaccaatgattcaatagaattgctagagttctgaagttttcatgtgacacgttgaacgagggcattattgaatttggcagatagagtagtttaaatggcatggtataacttgaatttgaccgttacaacaaaagggtacgataatttctggtgtggggacagcattatcaccagctgcaagatctagaggcataatccattgacaaagaaactagccagggtaatgcgaaaggctaatgaatgatatgtaatgtacacatgtaatcaagtagtgaaacactgactttctttctttttagtggaaaacagcaatgctctaacatttttgtattttacaaattagagtttaattaggctagagttacttgattgtaatatcaataaatgatgtattatgtgaattattcaaaaaaatttatgcccttgtccagcactcttttctaaaaaagaaaaaaaaaaaaaaaaagaaa

SEQ ID NO: 7446 - DNA, 1395 bp, Glycine max
tccggctgcgacgtggcgcccccccccggaagttgaagcggggaagagaaaaagaactagctagcttgctagagtgtgagaactctagcatatactagtactactacattccttcatcttcctttttatttttcaccataaaaaaacaagagcacaaagatggtgagagctccttgttgtgaaaagatgggtttgaagaagggtccttgggctaccgaggaagatcaaattctcacatcttacatccaaaaacatggccatggcaattggcgtgccctcccaaagcaagcaggccttctaaggtgtgggaaaagctgcagactccgctggattaactatttgaggcctgatatcaagagagggaatttcacaattgaagaagaagaaactatcattaagctgcatgagatgttggggaacaggtggtcagcaattgcagccaaattgccaggaagaactgacaatgagataaaaaatgtttggcacaccaatttgaagaagaggctgctgaaatcagaccagtccaagccaagttccaaaagagccactaagccaaatattaaacgttctgattccaattccagcatcataactcaatcagaacctgctcatcttagattcagagaaatggacacaacatcaacagcatgcaatacttctagtagtgatttttcatcagtcacggttggtgacagcaaaaatattatcaagagtgaagacatagagtctatggaaacaatgcctgtgatagatgagagcttttggtcagaagctgcaattgatgatgaaacccccaccatgtcatcacaatctttgatcacaatctcaaatgacatgccacttcaatacccttttgctaactatgaggaaactttccaacagagtcatgcttatgattcaaactttgatgatggcatggatttctggtatgacatattcaccaggaccaatgattcaatagaattgtcagagttctgaatttttcatgtgacacgttgaatgagggtattattaaatttggcagatagagtagtttaaatgaaatggtatagcttgaatttgaccgttacaactaaagggtacgataatttctggtgtggggacagcattatcaccagctgcaagatctagaggcatccattgacaaagaaaccagccagagtaatgcgaaaaggctaatgatatgtaatgtacacatgtaatctactagtgaaatcactgactttctttcttttagttgaagacagcgatgctctaacatttttgtattttagaaaattatagtttaattaggctagagttacttgattgtaatatcaataaatgatgtattaaggatgtgatttattcaaaaaatttatgccaaaaaaaaaaaaaaaaaactcgagactagtt

SEQ ID NO: 7447 - DNA, 1298 bp, Glycine max
tcagctacgtaggccccccccccccctaatacaaaccttcattttctcattctcagctataaataatcacaaaacccttccaaacccttttcctctttcacctcgccttcagcttccacaatcctatcgcacatctttctcagttctacgatggagttttggggtgccgaggttaaggttggagagtctgttaaggtagacccagccgaatttgaggcatgcatacacctttctcaggctgctcttggtgaggcaaagaaagataagcctgaaccggtggttctctacatgaaagttggtgaacagaaatttgtcttgggaaccctttccagggagaaaatccctcaaatatctctggaattggttttggaaaaggagtttgagctttcccacagttcaaagagtgccagtgttcatttctgtggatacaaggcatattacgatgccgataatagtgacgaggatgaatttactgatagcgatgaggatgatgaggatgttccattgattaacacagagaatggaaaacctgaaacaaaagctgaagacttgaaggtacctgaatctaaaaaagctgttgccaaggctagtggatcagcaaaacaagtcaaggttgttgaaccaaaaaaagataacgaggaggactctgatgatgattctgatgatgatgattttggatcttctgatgaagagatggaggatgctgatagtgacagtgatgatgagagtggtgatgaagatgatgatgaagagacccctcccaagaaggtggatctgggaaagaagagacccaatgagtctgcatcaaaaactccagtttcttccaagaaagccaaaaatgctactcctgaaaagactgatggtaagaaaggtggacatacagcaactcctcaccctgcaaagaaaggcggaaagactcccaacagcgaagccaaagccaagactcccaacagtgaagccaaagccaagactcctaagtctggtggactctcttgcaaaacctgcagcaagtctttcaccaatgaaagtggtctgcaacaacataacaaggcaaagcatggtggtcagtgatatttttgctgttggttatgactcattcatgtattatttttggcttatgtaatagagtgagtttcctaaggacgttaggcatctgtccttgtttttcggcccagtaaaccgtggtattgtggtagtgttgaaggtgaatgcatgtttgataagtttttgtttgaaattttaatgggaacttcaattattgtctataattattgcgtttagattgaaaaaaaaaaaaa

SEQ ID NO: 7448 - DNA, 840 bp, Glycine max
  misc_feature (3)..(8): n is a, c, g, or t
  misc_feature (717)..(718): n is a, c, g, or t
  misc_feature (720)..(720): n is a, c, g, or t
  misc_feature (732)..(732): n is a, c, g, or t
  misc_feature (738)..(738): n is a, c, g, or t
  misc_feature (747)..(747): n is a, c, g, or t
  misc_feature (751)..(751): n is a, c, g, or t
  misc_feature (753)..(753): n is a, c, g, or t
  misc_feature (757)..(758): n is a, c, g, or t
  misc_feature (761)..(762): n is a, c, g, or t
  misc_feature (769)..(769): n is a, c, g, or t
  misc_feature (772)..(772): n is a, c, g, or t
  misc_feature (777)..(777): n is a, c, g, or t
  misc_feature (779)..(781): n is a, c, g, or t
  misc_feature (792)..(792): n is a, c, g, or t
  misc_feature (803)..(803): n is a, c, g, or t
  misc_feature (808)..(808): n is a, c, g, or t
  misc_feature (818)..(818): n is a, c, g, or t
  misc_feature (823)..(823): n is a, c, g, or t
  misc_feature (826)..(827): n is a, c, g, or t
  misc_feature (832)..(833): n is a, c, g, or t
  misc_feature (836)..(836): n is a, c, g, or t
  misc_feature (838)..(838): n is a, c, g, or t
ggnnnnnnttgcgatcgggtaccgggccccccctcgagtcagctcgttggcccccccccaaaaaaaccctagttggcgcggcacaacccacccaaaatacaaaccttcatttttctcattcacggctataaataatctcaaaaacccttccaaaccctcacttcgccttccgcttccggcgccatatcgcgtatctttctctgttctattcctacgatggagttttggggtgccgaggttaaggttggtgagtctgttaaggtagatccagccgaattcgaggcatgcatacacctttctcaggctgctcttggtgaggcaaagaaagacaaatcaaatgaaccagttgttctctacttgaaagttggtcaacagaaatttgtcttgggaaccctttccagggagaaaattcctcaaatacctctggaattggttttggaaaaggagtttgagctttcccacaactcaaagaatgccagtgttcatttctgtggatacaaggcattttatgatgctggcgatgatagcgaggaggatgaatttactgatagcgaagaggatgttccattgcttaaagcagagaatggaaaacctgaaacaaaagctgaagagttgaaggtacctgaatctaaaaaagctgttgccaaaactgtgcaagctatgcacagcaacaagtcagatgttgaccgaaaagcatgagagctctgatgtgatttnnanatagatttggantctatnaaaatgagngctntntgcnngtnntaaatgngcnaaaanannnaaaaccctctnaattaaaggcnactgnaaaaaccatnttgtnaanncctcnngangnag

SEQ ID NO: 7449 - DNA, 1427 bp, Glycine max
  misc_feature (68)..(68): n is a, c, g, or t
gttttccgtccacgctttgacaaatcgccattccctatatattccttctcatccctccttctcaaacngtttttgttttccctcttcacacccacaaaactcataactcaccaacacacaatcaaagaggaaaaaaaaagaagcttcaaaatttcaatgcaatttgctgagaaaatgcaacccttgaaaatggggttccgtgagtacatcgaagctttggaggaagaaaggaaaaaaatccaagttttccctaaagagcttcctttgtcattagagcttgtcacacaagcaattgaggcgtgtagacagcaattgtgtggaacggttgcggagtacaatttgaatgcccaatcggagtgttcggagcagacatcaacggatggacctgtttttgaggagttcattattcctataaagaaaaaggcatctcaagcatctgttgaagaagatgatgatgaagaacattctcataaacacacaaaaaccaccactgataaaaagaaatcagattggctcagatccgtccagttgtggaatcccaatccacctcctaccaaagaggatgttgtgcctaggaaaactaatgttgtggaagtgaaagaaaaacggtgggggagcttttcaaccattccaaagagaggaaaaaagtggtgtttcaaaggctaataataataatgaagcatcggcaattggtaaagcgccctcttcaccaccagtgcctgctacaagttatacagggccagtgagagtagacagcaaaaaagaggagaaaggagacgctcagagaaagcaacgcaggtgctggtcacaagaattgcacaagagattcttgcatgcacttcaacaacttgggggtgcagattctggcacgcccaaacaaatcagggaattaatgaaggttgatggcctcaccaatgatgaagtcaaaagtcatttacagaaatttcgtcttcacactagaagaagccccataatccacaacagtgcaagttcacaagcaggctctttatttcttgtggggaacatttttgtgcagccaccagaatatgctacctcatcagcatctggaggggaattgaccacagctacccctgctgctccaactggaatatatgcacctgtggctgcacaccttccagctggcacccacagatcaccaattatgaagcattcacattcaccttctgaggaaaagaataatcatagtgttcattcaaactcaccggcctcatcatcctccacacacaccatcacaacttcaccacctgcctaattgattttgatcaatatgttgtaaaaaaaattgtaaacatattgtagttcaaagaaagcctatgtgatattgtttgttatcctctttataattagtgtatgtttagattaatttattttaagaaaataatcttcttttttttctgtattttact

SEQ ID NO: 7450 - DNA, 1819 bp, Glycine max
tcagcttcggcgcccctttggttaagtcttcaagtctactagggtttgcctcagggacagcccgtggaggtgttccatcagcacgcattgctatatacaaagtatgttggatcaaaataggttgtcctcaagctgaaacccttgcagcatttgatgaagcaattgctgatggagttgatataatttccatttcaaccggacttactagtatagtgtacattccgtattcccaaagcgcatttgatataggaagtttccatgcaatgaagagaggtatattaacgtcaaaatcagccgataattcgggtccagggttatcctctatcacaacttattcgccatggatactctctgtggcagctagcactattggcagaaagttccttactaaggtgcaattgggcaacggcatggtttttgagggggtttcaattaacacttttgatctcaaaaacaaaatgtttccactggtttatgctggagatgtacctaacactgctgatggatataatagttccacatccaggttttgctacgttaactctgtggataaacatttggtgaaaggaaagatcgttctgtgtgacggaaacgcgagtcctaaaaaagttggggatttgtctggggcagctgggatgcttcttggagccactgatgtaaaagatgctccattcacttatgcactgcccacagctttcattagtttaaggaactttaaactaatacattcttacatggtttcattgagaaattcgacggccacaatatttaggagtgacgaagacaacgatgattcacaaacccctttcatagtttcattttcatctagaggtccaaatccacttacaccaaacactctcaagcctgatctcgcagccccgggagttaatattctagctgcatggtctccagtctatacaatttcagaatttaaaggtgacaaaagagcagttcaatacaacatagaatctggcacttcaatggcttgtcctcatgtatcagctgcagctgcatatgtcaaatcatttcatcccaattggtctcctgctatgatcaagtctgcactaatgaccactgccacaccaatgagtcctactcttaatcctgatgctgaattcgcatatggcgcgggtctaattaatcctcttaaggcggcaaatcctggtttagtgtatgatattagcgaagcggattatgtcaagttcttgtgtggagagggctatacagatgaaatgcttcgagttctcactaaagatcatagtagatgcagcaaacatgctaaaaaggaagctgtatatgaccttaatctcccatcattagctctttatgtaaacgtctcatctttcagtcgtattttccatagaacagttacaaatgtgggattggcaacgtctagttataaagccaaagtggtatctccatctttgatagatattcaagtgaaaccaaatgttctgtccttcacatcaattgggcagaagaagtcattctccgtcataattgaagggaatgtcaatccggatatactgtctgcttctctggtttgggatgatggaacttttcaagttagaagccccattgtagtgtatggtgatacataatttagtgtcattaattttttctttctaaagtcaaaatctagattatatgtttcatgaagattagtcgggactagagataaataatagtccgagaccatataataaattgaattaagatttatcttaattagttaaacagactgggtaaactattataaaatccctatcaatatctttaattcctactaataaaaaaatcatattataaattcttctta

SEQ ID NO: 7451 - DNA, 533 bp, Glycine max
ctccctcgtcttatatctagggttcagggttcttgcggcggcggcgcgacttccttccccctcttgcgaaggtctagggtttggccgagtagaggagagaggctttccccctcgtccagccgggagccgccatgagccgatcggggcagccgccggatctgaagaagtacatggacaagaagctccaaatcaagctgaacgcgaaccgcgttgtcattggcacgcttcgtggatttgatcagttcatgaatttggtggtggacaacactgtggaggtcaatggagatgagaagaccgacatagggatggtggttctgagaggaaatagtgttgtgatgattgaagcccttgaaccaattgccaggtctcagtgatattttggcttacctgcttctggtttagtacttaatagtgtttggtcaaaaccgatgcttatggaatcaggcattttgtgtcctaatatttgtaatgtgtgagatttagcacttgttgtatggtttggagttcggactgtcttcagagatgcttgccat

SEQ ID NO: 7452 - DNA, 881 bp, Glycine max
  misc_feature (6)..(6): n is a, c, g, or t
  misc_feature (9)..(9): n is a, c, g, or t
gaaccnggnaattcggccttacgggcggggatactaactactagctactctcttggtcatatcacatatttatataaccatcttcatactcattgccaccttgtgatcacaatattttatttatgttcactacactcttatcatcataactagaaaattaaacagaaaagcagaagcacttttttcatcatggaagcctattctggttcttattcctcatcatccaactcttcatacttgacccaaaacaaccgtgaggactcaaaagggtatcacatgaaacaacaaatttaccctcttcaaaatcacagttcttcgtggctccgttccgtgagaaagacaccagcaaagccgtggaagaagcaccatgtggcaccgatgccaccaacaccagtgaaagtgtacaaagtggatgctataaactttcgtgaagttgttcagcaactcacaggtgcacccaagcacaagcctcagcagcttctccaaatcaacatcgcacgtgctgaatcttctgatgctccccttgatgtgccaccaaagcaaaaccaatcaagtggagacacgtgcaataaatggtaccaggagtttctcttgggaatgaattctccggggactaataataataataatgatggagcaatgacaccgggttttctaggaatgaatttgctctcaccaaattcttatagtaattatttctgtttctttcctcctttgagcccaagtggtgtcacaagtttggaaccggggaaggttctctaggtctaggccttttacaagattctagctatatgctatattgatatgtattttctgttctattatctactttctttctttttcgtttgttactggttattacagttgaattatccatcttt

SEQ ID NO: 7453 - DNA, 1711 bp, Glycine max
aacgagcaatgttcactgcgaagaaaatatcaaaataatactactagccatttacaaaggcagcagctgcaggaggtgcgtgcatcgagcggagccatgatctcgcaattcttcgttctgtcacagcgtggcgataacatcgtttttcgagattatcgtggtgaagtgcagaagggaagtgcggagatatttttccgcaaagtaaagttttgggaagatgggggactgcaggaggcaccacctgtctttaatgtggatggagtaaattactttcatgtgaaagttgttggcttattgtttgttgcaactacaagggttaatacatcaccttcttttgtcttggagcttttacaaagaattgctcgagttattaaggattaccttgggattctcaatgaagactcattacggaaaaactttgtgcttgtgtacgagttacttgatgaagttattgattttggttatgttcaaacaacatctactgaattgttgaagtcctatgttttcaatgagccgcttgtaattgatgctgcacgtctgccacctcttggacctgctgcaatttttacgcaaggaacaaaaagaatgccagggatagctgtcacaaaatctgttgttgctacagagcctgggggtagaaagagggaagagatttttgtagacataattgagaaaatcagcatcactttcagctccagtggatatatactgacttctgagattgatggcaccatacaaatgaagagctatctttctggcaatcctgaaattcgattagcacttaatgatgacctctccattggaagaagccagggatcagctttcggttataggagctcatctggctcaggaacagttatattagatgactgtaatttccatgaatctgttcgtcttgatagttttgatatagacagaactctatccctggtaccaccagatggtgaatttccagtcatgaactatcgtttgacacaggaatttaggcctccttttcgtattaatgctttgattgaagaagcagggtcacttaaggcagaagtaattcttaaagtaagtgctgagtttgcctcaagtgtaacagcaaacactatcaaagtgcagatgccactaccaaaatgtacctccagggttagttttgagctggaacctggagctgttggacaaacaactgattttaaggaagcaaataagaggctagaatggagtttaagaaagattgtcgggggatcagagcacactctacgagcgaaactaaccttttctcaggaatctcccgttaatgtaacgaaagaatcagggcctgttagcatgacatttactataccaatgcataatgtttcacggcttcaggtaaagtatttgcagatagcaaagaaatctgcaactcatgagccataccggtgggttagatatgttacacaggcaaattcctacgtcgctcgtatatgatgctgttaagaaaactgtggcctccccctcccccctttgtttttcatttttattttcctcccacaattgctctttacagtttacagacatgctttgattttttactttattctttatttgtaaattacattctaagtcgagtatagatgccgtttgtagtttgccttatttatcattcattacacaataacaagctggtcataaaacctggatgaaatacatcagttttttcttcttaaaaaaaaaaaaaaaaaacctc

SEQ ID NO: 7454 - DNA, 1726 bp, Glycine max
aaaaaattagagacgttgttcaagattaggttgccctgtctgttctctcacacactcactctccttctctctcctattgcggctagggtttgggtttttcactttcagcctctccattccttcaaccttcttcttctctttgatctctgatggagacgttccgtgtttagtagcaagggttagttgaggccttgtgtttggaaacgtacggtgtcgttttggagttgggaaaacaaataattctgagagatggcaaccacgaacccttttgatttgttgggtgacgacgctgaggacccttctcagctcatcgccgccgagcaactcaaggcggcggctgctgctgcggctgccaccgccgctcccaagaaggcgccggctcagcagatcaagccggctcagctccctagcaagcctcttcctccggctcaggctgtgagggatgccagaaatgagtctgttcgtggaggccgtggaggtggacgaggtgggggacgtggatttggacgtggtcgtgggtttagtcgtgactcttccaatgacgagaactcattccctaccagcggagctccttataatcaggtttcttttgaaggagatgctgggaagtcttctgaaagacgcggttatggtggaccacgaggtccttaccgtggtggtggtggtcgtcgtggaggtttcagcaatggtgaaactggtgaagctgaagaaggacgacctcgaagagcatttgatcgtcgcagtgggactggacgaggaaatgaattcaaacgtgaaggttcaggacgtggtaactggggagcccaaactgatgaacttgctcaggtaactgatgaggttgcgaatgaaactgaaaagaatttgggtgatgagaagcctgcagttgaagaagatgtagctgatggtaacaaggacagccctactaatgaaactgaagaaaaagagcctgaagataaggagatgactctggaggaatatgaaaaagtgttggaagagagaaggaaggccttccaagcactcaagactgaagagagaaaggtggacactaaagagtttgaatccatgcaggccttatcaagcaagaaagacaatcatgacatattcattaaactgggatctgataaagataagcgaaaagaggcttttgagaaggaagaaaaatccaagaagtctgtgagcatcaccgagtttctgaagcctgctgagggggaagcatactataacccaggacgtggtaggggccgtggccgtggttcacgaggcggaggcggttaccatggaagtgccaccaacaatgcacctgctccatccattgaagatcccgggcatttcccaaccttgagtgccaagtgaggccttcccagaacccttttgacatatctctgtcctattttcaattttgggttctcttatttgaacttaagcaggaaaggaactatggtaattggatttcctggattagaaggttcatttaattttatgccttaaaagtgtaaatttaggttgttcttcatacggtcatgtatcccttgaagcctgttcctccttgtgctttatttttaccgcgtttgatattttgggggaatatggtcggggtaagacataaatgttgttgagttcccttttcttcatagatagacatctcagttttgcttcaaaaaaagatttctcaaccccaattctagtctctatcaagaataacttacaataaatattagtggaaacc

SEQ ID NO: 7455 - DNA, 1749 bp, Glycine max
acatacatacattccttcctaggtcctgaataaattagagaagttgttcaagattaggttgtcgtgtctgtctattatattctctcactctcttactctttcactctacttctctctcctattgcggctagggtttaggtttttctttcaccgtctccgttccttcaatcttcttattctctttcatctctgatggagacgttgcgggtttagttctaaggggtggttctggccttgggtttttggaacgtacggtgtcgttttggggttgggaaaacaaattctgagagatggcaaccacgaacccttttgatttgttgggtgacgacgctgaggacccttctcagctcatcgccgccgagcaactcaaggcggcggctgcggcctcggcggccaccgcggctcccaagaaggcgccggctcagcagaacaagccggctcagctccctaccaagccgcctcctccggctcaggctgtgagggatgccagaaacgagccagttcgtggaggccgtggaggtggacgaggtgggggacgtggatttggacgtggtcgtgggtttagtcgtgactcctcgaatgatgagaactcattccctaccagcagagctccttataatcagggtccttttgaagaaggagatgctgggaagtcttctgaaagacgcagttatggtggaccacgagttccttaccgtggtggtcgtcgtggaggtttcagcaatggtgaaactggtgaaggtgaagacggacgacctcgaagagcatttgatcgtcgcagtgggactggacgaggaaatgaattcaaacgtgaaggttcaggacgaggtaactggggaacccaaactgatgaacttgctcaggtaactgatgaggttgtgaatgaaacggaaaagaatttgggtgatgagaagcctgcagttgaagaagatgtagctgatggaaacaaggacagccctactaatgaaaccgaagaaaaagagcctgaagataaggaaatgactctggaggaatatgaaaaagtgttggaagagagaaggaaggccttccaagcactcaagactgaagagagaaaggtggacactaaagagtttgaatccatgcaggccttatcaagcaagaaagataatcatgacatattcattaaactgggatctgataaagataagcgaaaagaggcttttgagaaggaagaaaaatccaagaagtccgtgagcatcactgagtttctgaagcctgctgagggggaagcatactataacccagggcgtggtaggggtcgtggccgtggttcacgaggtggaggcggaggcggaggtgtttaccgtggaagttccaccaacaatgcacctgctccatccattgaagatcctgggcatttcccaaacttgggtgccaagtgaggccttgctagaacccttttgtcatatccctgtcctattttcaattttgggttctcttatttgaacttaatcaggaaaagaactatggtaattggatttcctggattggaaggttcatttaattttatgccttgaaagtgtaaatttatgttgttgttcttcatacggtcctgtacccttgaagcctgttcccccttgtgctttacttttactgcgtttgatattttgggggagtatggtgtgggtaagacataaatgatgttgttgagttccctttttctttatagatagacatctcagttttgcatcaaaaaaaaaaaaaaaaaagcttatcgataccgtcgac

SEQ ID NO: 7456 - DNA, 674 bp, Glycine max
  misc_feature (593)..(593): n is a, c, g, or t
ctacgtaggccctcatccactcacactctagctcccaattaaaagcaatatagtttgtttaattgttgcttcatttctattgtgtgaatggcatttgggaagttcattatgaatataggggtagtggcaatggttctgggtttatggattcgggttggatttgcacaacaagtaccttgctactttatttttggagactctttggtggataatgggaacaacaaccagcttaactcactggctaaggctaattatctcccttatgggattgacttcgctggtggcccaactggaaggttttccaatggaaaaaccactgttgatgtagtcgctgagcttttgggattcaacggttacattcgtccatatgcaagggctagaggccgagatatacttagtggagtcaattatgcttctgcagctgccggaattagagaagaaactggacagcaactgggaggccgaatcagttttagagggcaggtgcaaaattaccaaagaacagtgtcccagatggtaaatttactgggagatgagaacacaactgcaaattacctgagcaagtgcatttattcaattggaatgggtagcantgattaccctaacaactatttcatgcctctaatctattccagcagcagggcattcacaccacagcagtatgctgacgtgct

SEQ ID NO: 7457 - DNA, 1439 bp, Glycine max
gtctaatgggacaccttcaagtaactgagttcaacctcaatggtttcagccaccgaggccccccccccagatcaaaagttcagattttgatagagcagctcaaggctaaagatgcttctttagagaagcttgaggcatgtaatgttgagagtgctaaggaaaagtctgaggtgttggcattgagggaaaaggtgaaattgcttgaagaagaacaaaaagattttgagcttcggataaataatgtgatggcagagaatgaagcatgtcacgagcacctaattgaaatggaaaattttgttgagtctttgaaagaaagcattgacatagcagaaaatcgggctgagagcgcagaagcgaaggttacacagttaactgagaccaacttggaacttactgaagaggtgaattttcttaaagggagtgccagtactgcagagaaaaaggttggttcacttgagaagcaactaagggaattagatatccaactacaaaatgcaaaggcgtcttctgaagcaagtcaagaacagcagaacatgttatacacagctatatgggatatggaaatattgattgaagagctaaaatcaaaggttgcaaaagctgaaactaataaagaaagtgctgcagagcaatgctttgtgctgtctgaaactaacttggaacttaataaagaattggatctccttaggtccagaacagtaagcttgaaaacatctttggatcaagctagcaatacaagatcatcaagggcaaaagaaattgattgtaaagctaagcttatcatggatatggtaatgcaactagcctctgaaagagagcgcatcaataaccagttacatgctttaaaacaggaaaataaacatttggtagaaaagttaaagaatactaaaattgatgcctctttagatgcatccaacaatggactaaataacagaaatgaagatcaagcttccaacaatgactcgagcaatgataactctgctaaatcatcagatgaagaaggaatagatcactttaataagacatttcaggcaggtggatgaagaaggtgcaagctccgtaactcgagtaacatcatctatttcagcagataagcctgcaaattggagaaacttgacatttctttcagtagcaatgtttgtcccactgatttctgtgctagccttctggtggtttgacaaaggaaacatttttctttccaaaagcttttgattgctaagttatgacctagcatatagaaaaatttgctgtttgtgcagttgtgcttccctcaagtccttagcttatgtattgttattgtatattcatgtgatcttaggtggttgtaagctaatattataattgaattggaggtgtgtttctatcatgagtgctgaacaaatgtagagttttgtgtttgataaaggtgcaaatgatgaagatatatgcttaagatgtgc

SEQ ID NO: 7458 - DNA, 1974 bp, Glycine max
agcgcacccatttattaccaacacttcaccatcattttcctccgcctcactctcttctcaacaagtaaattctgtcttcctttttcttctttctttccatacaaaacagaagcatgagttctgctaccacagtattgtaggtagagaacagaaaccaccttgtttcggaattctgttgcaaaattaagaaggaagaaacatactccattaatgggtggtgttagatggggtcgtccagagtcatcttcatccatgaaactcttcttgctcatggtgcctctggtactggttgcagggcttgtttctgtattgggtcctaacccctctagttggctttttagtgcaaacgcacctgtgttatatttggagggctctgttacttcctcttcctcaactagtagtggtgctgtgactgtgaccaatccttccgaggtgaagcagagagaagggttagtggtggtggccgtggagaatcgtggtggagagaaagttatctccgatgacactgacttcaatcactcttctacacctccattttctgttcaggccatacaaacacctcaacaacctaacaaggatgagcaaaatgtttcgcaactttgggccaacgtgactggtgtgaatgagtcttatcttccaccagagaggccgaagctacaaagaaaattcagcatcttagatagaaccgaagctggtctaagacaagctagagctgcaattagagaagcaagaaacgggaatcaaacacaagatatagactatgttccagttggaccaatgtataacaatgctaatgcatttcacaggagttacttggaaatggagaaacagttcaaagtattcgtctacgaagaaggggaacctccggttttccacaacggaccttgcaaaagcatatactccatggagggaaatttcatccatgctattgagatgaatgaccaattccgaacaagggatcctgagaaagcacatgtgtttttcttaccttttagtgtagcaatgctggtgcaatttgtctatgtacgtgactctcatgattttggccccataaaaaaaactgtcacggactatgtcaatgtcattggcggaagatatccctattggaaccgaagccttggagctgatcacttttatcttgcttgccatgattgggggccagagacatcacgttctattcctaacttgaacgagaattcgatccgtgtgttgtgcaatgctaacacctcagagggattcaagccttcaaaggatgtctctttcccagaaattaatctccaaaccggttcaataaacggtttcattggtgggccatctgcatctggacgtccacttttggccttctttgctggtgggcttcacggcccaattaggcccgttcttcttgaacactgggaaaacagggacgaagacattcaggttcacaagtaccttccgaagggtgtgtcatactatgagatgctgaggaagagcaggttctgtctttgtcctagtgggtacgaggtagcaagtccgagagtggtggaggcaatctacacagggtgtgtgccagtgctcatttcagatcattatgtccctccatttaatgatgttttgaattggaaatccttttccgttgaggtttcggttaaggatattcccagattgaaggagattctgttgagtatttctccaaggcactatataagaatgcagaggagagtaggactcgttaggaggcactttgaggtacactctcctcccaaaagatacgatgtcttccatatgatccttcattctgtgtggcttagaaggttgaactttagagtccaccatgatcaataataactcgtagattattaccgcgattaacgtatttatttctgatttgtttggcaatgtaagatggtgtgaatgtgtgattctttttccgtcctgtaaaaaaaaattgtcagaagtaaaaataaaattatgtttttccaaaaaaaaaaaaaa

SEQ ID NO: 7459 - DNA, 1914 bp, Glycine max
tattatatcaaaggatgatcgtgaaaattgtcactctcaattttgaacataggaagcccgagtcattcaatttaatatgacatttgaagtgagaatgttcttgctgccatacattttgacaaaaactatcagtttgaaaagatagtagtgaatacagatgcttgaccaaagctcacaccaaattgttcccatatttgcccatgagcaaaatttggttacaataaacaagttatcccagttatcactcgtgccagacaaatgtgtggaacaagtagtaagagcataaaacagttctttgagcagcataggaattatgaacaaaagcatttcctggaagattttcatgttgaagcactgagagcacgttctatttcctccaatgatcgaccctttgtttcaacaacattaccagctatgtacaaaacagcaagaacacagacagccgagaatcccaagtacacggagctgataccaaacttgtttacaacactcaagaagtagaggccgatgacgaagttggagatccaatgtgtgcctaatgacaaagaaactgcttttgctctaattctagaagcaaatatctccggtagaagaagggcaggcacaggaccagcaccaagagagaaggataggacatagagaacagtcccaagaacagcaagggtgccagagtatggagcaagaaccttccatgtaaaagacagagaaagaagcaacatagaagcagcctgggtgagacataaagaaaaggctgtcaattatacaaatgaaaacacacgatgttttgttacaaagcttacaataagtcgaataagttataacacaccagaaatgaactgagccgatgggatgaagatttagtttgaattataaacaaaatcaattgagttgtttaagcaagtaagaagagtaagaacagatccattacctaccaacctaattatgcttctaacacgtaagcatgaaatgaaatcaagcatcataatacttgaaaattacctttccttccttcaagaatggaataaagttcaatcccttgtttagacttttctcaaaaatatattgcattgcctcatttttatctttcccattttaaaatatggcacagtaatatctacaaacccttccattctctagtactagctacacaagtgcatgaactcttccaaatcaccgtgtctgactagcattagaatctccagactcccccttgctcgtgccgatcccgctcgagtcagcatgccatgtcttaccaattactggctagagtagaaatgatatttgcaaattgcaatcaatcaccaatacactgataaaaaaactgaacatacgatacaaaagtatgtggaggataaggaagagaatattcatgcacaaaaaaagtaaatcggcatattcaagtaggatgaatacatctgtttctctgcagaagcatttctattttctagtataatgtgagtactgataaagtcagtattagttgtattcatgttttgccatgtagacctttcaagtatcatgaccgagttgaaggctgaaagcagacagtttctaaattatcaaaatgcttgtgtccaaaattatatttaaagtccaaagatatatttagacacataaaccaaccatgcattaggtcactacattagtgtaaggtatacttattttgctctggacaattttagccaggcaaggcataaggcccacaaaaattaatatttgacaattaaacttgtgatttttcagggatgtcattagtccatcatgtaatatctaacattttatgctttaggtctagcaagatgtgtgccgaaaacatctattaccatcccactaaagcttgtgataaggagacttttccttccttgtttgtccattaaggaggaagcaatacaagttccaaaaacatttgatgcg

SEQ ID NO: 7460 - DNA, 1209 bp, Glycine max
  misc_feature (1076)..(1076): n is a, c, g, or t
  misc_feature (1142)..(1142): n is a, c, g, or t
  misc_feature (1150)..(1150): n is a, c, g, or t
  misc_feature (1153)..(1153): n is a, c, g, or t
  misc_feature (1165)..(1165): n is a, c, g, or t
  misc_feature (1173)..(1173): n is a, c, g, or t
  misc_feature (1181)..(1181): n is a, c, g, or t
aaactccggctcggggtgtctatgcaaagttctggaatcaacccctaaggtccccccactccttcaaaaatcctctcttttatcctacaacactctaatcatcgtcatcaaccacctcctccatcctcccccagtaacaacacaacataacattcagagaaaaacaaaactatcatacccacatggatttgcaatgaaagtgagagagtccaattatgcgaacgctttgtgatgcttgtgagagcgccgcggctatagttttctgcgccgctgatgaggctgcactttgtcgtgcctgtgatgagaaggttcacatgtgcaacaagctagctagtaggcatgtgagggttggtcttgctagtccaagtgatgtaccacggtgtgacatatgtgagaatgcacctgctttcttctattgcgagacagatggaagttccctttgtttgcagtgtgatatgattgttcatgttggaggtaaaagaacgcatggaagatatcttctgttcaggcaaagagttgagtttccaggagataaatctagtcatgctgaaaatccggcttcacaaccattggaaccaggtgaggctaaaagaggacaaaatccacttcccaaactaaaaatgggagagaagcaacaaaatcacaagatgcctatggttccaacgccaggacctgatgctgatgggcatgccaagatggaaagtaaaatgattgatttgaacatgaagcctaatagaatacatgaacaagcatcaaataatcagccataaatggcgcaactaggcaatgcagttctgacaggatcctaaaccaaaaatctaccaatggcaaaagcttcgttttgttctcgtgcatgctagtcacaaggatgacatactctattaatatcctatatattctggcaaatgaggcaccagaatcctttgaggagtttgttcgcctacgtaggaacttaatttggtagttcaacacatcatattctgttctgcaaagcattgttaactgtatatctatgacccctttcaatgaattgtgtgttgacttttatttctggtttcagttttgtatgccattgngtcccctataaaattcagggggaaaagagttatttgaattttttaaaaataaaatgcgacaattgnacattttnatntttaaggtatanaattatanattatagnatttgtagattgaaaaaaaaaaaaaaaa

SEQ ID NO: 7461 - DNA, 1313 bp, Glycine max
  misc_feature (110)..(110): n is a, c, g, or t
atgtataagataaaaataacgaccacatctagagtaaaaaagtagagtatcaagtgtcctaaggaacaaaaattgtaagaacagcattagaattaagatcacaagcattngtgaagtattttatgttgcaggactaagtgcacgttctatttcttccaacgatcgacctttggtttccacaacgttacgagctatgtacacaacagtgagaagacagacaatggagaagcccaagtacactatgctgataccaaacttgttaactacactcaagaaatagagcccgatcctcgtgccgaattcggcacgaggagagaactagtctcgacttttttttttttttttttgtggaaaatttttgtaatatttgaactcagaagtcagaataatgttactcaacattgctatgagattttatgcaaatttctcaaaaagaattatcgattgtatagaaaggtgatggtgatagggacataaaaatcaagactgatcacgtacaaaggacagccttattttactcctcatccacttcaagccccggtatatattccaaactaacgtcaaatatgactggactgcttggagccacccttggtcttccaggagcagaagtaaggccttttgggaatgccagtgatccgggtatgtacagtcgacgcttcccccctactttcatgctcagaataccttcatcaagtccttgtatcacctgaccagaaccaacacgaaaaatgtaaggctgacctttctccagtgaactatcaaatatttgtccagagggaaccattgcaacgtaattagcagccacctgaaatccgattggtggactaggaccttgcccaactttaatatccttgtattgcaaacctgatccagtagttaccgtaggcacattttcaagctctttctcacaagtgtcatcacacagtttaggcttttcttctgggggcaaaccagctccatttgcatccaatgaacccataaagagaccacccgagactcctaaagccaacccaagaaagtctctacgtgaattggcattaaacatagcagtggtgcattcccttgtctctgaggacttgactttaacaactaatcttcgaagtttatccaccaaaatgctttgaggagtaaaagagggacttctaccacaagtagaaccaagtgggagaagcagagaggaggccatggtaggcatatccaaggatgtcatgcgatgatgtccgcaaaatggataaactgaatcttctcaaacatggcttggagctggagcaagtgtttgtggggggggggggcctacgtagctgactcga

SEQ ID NO: 7462 - DNA, 1317 bp, Glycine max
atcagaagcaattccagcactacgggacacagaagttgaataataaactacgcctttattccagccaactgctggaacaagaaaagtgctgccccaacactgacaactttccaatatcgactactaaacagatcaagccaccctgcttcaggttctgatgaaccttgacttgctgttgttaagtcattcataactgcagcaactctttcttgtccatagagtgttttaatagccttttcagcttcagagattttgccttgctgaacaagccagcgtggactttctggagaaattgccattcctagtgctaacagcacagatggaactattgcaatgccaaacattgaccgccaccatatagggtttcctgccagaggcagcccagccaccagtgccagaagaatcccaatgcatataaaaagttgattaacagatcctagcgcaccacgaatttcagttggtgaaatctcagatatgtatagtggtactatagcagatgtaacaccaatgcctataccagcaagtaagcgaccaatgatcattggctgaacactctgggctgtagcaccaagaaatgctccaattgctagagggattgaggctaattgaaaagtcctagttcttccaaattggtcagccaatgatccaccagtaaatgaaccaacagtggcaccagcaagtaatgtgctgacaatccagccttgtagaacagtattttcagtgattccaagatccttagcaaggtattcaagggcaccatttaccaccccgagatgataaccaaataaaatggctccgaggcaagcaacaccaacatatggtagaacatttccagaagatttgccctgaggagtagctggaacaacatcttcaatgtttccatcagaagccataaccctcactgatctgggcttaacggagggcccgaaaatgccaccaaaaccaattctagcactagttagttcagtttccatagtgacagaaccaagccttaacccgcaaagatcagtattattctttgtcatgcacactcttctgggtctcagaacactcccatttctgaactctccaaaacccaccaacccccttcgctcttgaaccccaaaagtggctccttcaacaccaaaagttgatgcctgcatgctttctcgtaaaagggtgacaaagaaatttggaaagggtgaggaaatttgtgtacttctgagtgttgacgttcacactttagaacatgcaattttttttatcgggatttgtgttttctgatggaaggaaggggcttcgaaaggatcgctactaagtgaaccaaacgacaaagat

SEQ ID NO: 7463 - DNA, 1127 bp, Glycine max
aattcggctcgagaacaatcttagaaataaacctacatatccaaccctcatataaatacgccattaccctacaaccatatattatacacatagctagacatggtgaaaccagccatggctagtgttgattcttcttccttttcttcttgtaaaaatgattcattttcctctaactacagcattgatacttgcaagatgtacaaaggggtaaggaagagaaaatggggcaaatgggtgtccgaaattcggcttcccaacagccgtgagcgcatatggttggggtcctatgacacccaagtgaaggcggccagagcatttgatgtggcactttattgcctacgtggcaaaagtgcgagtttcaactttcctgacacacctcgacacttggaaattaatatggtgttaccatgtgacatacaacaacaacctctctcccatccggagattcaagagatagcctcgaagtttgcgaacaacgaccacgtccctttggaggaggagagtgcttttcaagaacaagaacaagacccctcgatggagtcacaaagtgacgagtctaaatctgccaatacaataacggagatgagcaacttccctaatatttatgatggtggaactcatactaatgtacaagtggatcaattacaaggggattgggacagcatggattggacattttttaacatgttggatgacttgaatggctcggattttggcctctatttggggccagacaagttgcacccgggtgagtttttgtgtcccactcaagctccaatgctttttcatgaggatgaaattgaaggtgatgatgatcatgatgctttttctaaccattccttactttggagttggaacttttgattcacctgcaaattaacttagataccctctactttgcataagtttcaactagtaaataattactagcaagcaagcctctctattatgtttttttgtagccatttatacatggctgtttctcaattataatagttaggctatgactagagtttatgtcaaatggaccataaagacaaaaagaaaaaagaccatataccatgccataaataatattatagaaagtggcccggtttttattgccatctttctgttttttttttaaa

SEQ ID NO: 7464 - DNA, 1821 bp, Glycine max
ggtgcttttgttgtcggaattttttttccaaatgatggaccgtttgccagtgctctagtgccgcgcgtccgggatctagtgtctggtctatttcttcctctttattttgtttcaagtggattgaagactaatgtagccaccatcaagggggcgcaatcatggggtcttctggcttttgttatatttacagcttcgtttgggaagattcttgggactctttttgtttcacttttctgtaaagttccttttaatgaagctttggtgttggggttcttgatgaattgcaagggcttggttgaattaatagtcctcaacatcggtaaagatagaaaggttttgaatgatcagacctttgccattatggttcttatggctgtctttactaccttcatcaccactcctctcgtgactgctgtgtataagcctgcaagaaagggaaaaataacaaattacaaatatagaacaattggaaggaaaaatgcaaatagccaactgaggattcttgcctgcttccatggtgcaagaaatattccatcgatgataaatttgattgaggcttcaagaggaatacagaagcgtgatgcactttgtgtgtatgcaatgcaccttaaagaattctctgagaggtcctcatcaatgttaatggtacacaaggcaagaagaaatgggttgccattctggaacaaaggccatcatgcagattctaaccatgttattgtggcatttgaggcttacaggcaactaagccaagtgtctattcggccaatgattgcaatctcatctatgaacaacatacatgaagacatttgtgcaaccgctgagaggaagggtgccgcagtcattattcttccatttcataagcatcaaagattggatggttcactaaatatcaccagaaatgattttcgatgggttaacaaaagggtactagagcatgcaccatgctcagttggaatctttgttgatcgtgggcttggtggtacatcccatgtctccgcaagtaatgtttcttatcgtgttacagtgcttttctttggtggtggtgatgatcatgaagcccttgcttatggagctcgtatggctgagcaccctggcatcagattgctggttattcgctttgtaggggaaccaatgaatggagagattgtaagagttgatgtgggtgactccactagcaccaaattaatctcacaggatgaggaattcctcgatgaaattaagacgaaaatagccaatgatgactccatcatctatgaagagaaagtagtaaaagatggtgcagaaacagttgctattatccgtgagttgaatagctgcaatctgtttcttgtgggttcaaggccagctagtgaagttgccagtgctatgaaaagaagtgaatgccctgaactaggacctgttggtggtttgttggcatcacaagattaccccacaacagcatctgttttggtgatgcaacagtatcaaaatggggcaccaataaattttactatctcagactcagaaatggaggaacacgtacctgatcgggattcggaatctgcttaacggttctctaggatcgcaccaacctgtttgggaatttctcaactcgatgcagctttgctttatagttgtactttatacttcagaattttattttccttagaattggaattgatttagaattataatttttttgataggactctgagttgtgcaaagatttatggtgtaaaattaggattctagcatcaattccaattctattttttggttgtaaaatctataatagtaataaagggatatcccactgtattctccacttttcaaaaaaaaaaa

SEQ ID NO: 7465 - DNA, 1045 bp, Glycine max
aaccttgattgaagtgatgtggtgtggacatgttggtaattgcagaaaggagatggcatgaaagaaaaagggtttccaatacgcgtctctaccaggtccatattcccaatctcctttcattaccaacctcacaacacaaacttctttctcttcttacaattacaaatcccttcatctctctctctctattctcatttcaatccccttcttcaacccctctctctctctccaaaacgccaaaccaaaaaatggctcagaaggccgagaaaaacgacaccgactttaaggtccccgaaaccatcatcaccccctgcaccaccaccaccgccacctcgattaccgaaccttctagattcttcgacgcaaccacccccgccacgtcatcgcgctcccccaagcgatccctccccctcgacgacgaatctcagacggaccaaacggcgtcgtcggagcccaaacgcgtcgtgagccgctgctcctgctgtcggcggcgcgtggggctcactggattccggtgccgctgtggcgacctcttctgcgccgagcaccgctactccgaccgccacgactgctcctacgactacaaggccgcagggagagaggccatagcgagagaaaaccccgtcgtgaaggccgcgaagatcgtcaaggtctgaaaaccctaaatcggagaacaaaaatctcccaagagatcgaacaaatcgctgagaagaagaaggggataacacgaaacgacgtcgtttccacgcgatcgcggttcggtgattgattgattaattaattaattaattactcgcgtcgcgtcttttctccgagacgcgactcggcgcgtgggtggaaatctgggaatttgtataatttctaaatttttatgcctttttttgtttaatttgggttggaaatttataaattattatcgtggttgttatgtgaatcagtggaatgaatggtttttcgttgcctaaaaaatactgtactggtcgcccttttcttaatttttaattttagtttgttttcttaaatttttttttttaaagagacaaaa

SEQ ID NO: 7466 - DNA, 1714 bp, Glycine max
cccacgcgtccggctgcgagaagacgacagaagggggtagttctaacttctaagcccttgcccagtgctcatcgaggcttaaaccctttcggcggcagcgaaaaaagtctccccgcccccaaacccaaacaatgaggaagaaaaaacaagggttcagaagacccgttgtcataaaaaagccgaagcaaccgcaagagcaacccagcgttgatcctattacgggaaagaaaatccccaaaagtttcgtgttttcgcgaggcaagttgccggctcctctcaaacagcttcagatggacctcagaaagttgatgcttccatacactgctctcagccttagggaaaagaaacggaataatctgagggactttctgaatgttgctggacctatgggtgtcacgcatttcttcatattgtcaaaaactgctacttcatcttacttgagggttgcaactacccctcaagggcccactcttacgtttaagatacatgaatactcattggccgctgacattgctcgatctcaattgcatcctcgatgccctaaggatctgtttaaaagttctgctctgattgtgctttctggatttgtgagtggagatccaccactgcagcttacaactaacatgtttcagaatatttttccaacaattgatgtcaaaactgttaagctctccacttgccaaagaattgtgttgcttaattacaacaaagacactaagctcattgattttcggcattattccataagattacaacctgtaggcgtttcacgcagaataagaaaacttgtgcagagccatcaggttcctgatctaaggaatcttcaagacgtgagtgattttgtcacaaaagctggctatggatctgaaagtgaagctgatgaagaagcagcaacagttactttgtccagtgatattggtagagttaatcgtgcttctacaaaaagtgctgtcaaactgcaagaggttggacccaggatgactcttcaactagttaaaattgagaagggactgtgttcgggtgaagttctcttcagcgaatatggaaaagctggtggcaaaggaaaaagtgatgatgagatgcagggtgaagaagattcagatggtgatgaagatgaagaagatcaagatggagatcatccagaggatagtgaagacaaagatcaagatcttgattagtcacagtgttttcacgtggtggtgtagtattcaagttgtgtagtagatccataacactgcagaactgataggtgccactggaaaattttcttatcaagcattccagtgttgtggtacaattcatttgcttttgttaaaatacagatctagagcaatcaaacgttgttcattttgattaccaattttttaactttgcttttaaatcatatattccttttaaatcaaaatatatataaatatcctacttatataatttattttaaaaaaaattataacatttttaacctgcgtaacaagtgggtcaatatctaatttgtttcaatgctgctaataaaaaagaattttatgcttatcccaagtccaacacaatttggtaaacttttcatattagacgaattaacgatggaaacaataattaaggtatgtgtaaagtcctcttttttttggggtacaatatgtaaagtcctctaccaacacggctaatgaaaaaaattaataaaggaataagcatggctattgtgaagggatgtgctgta

SEQ ID NO: 7467 - DNA, 756 bp, Glycine max
tcagctacgtaggcccccccccccccacatgattattttgaggtatgcattatatatttcatatcatgaatcacaagtaccaaatccagaaaactacacatatttccttgatgctgataaggaacattgtcattaaagttgttgctcttgctagctttctggtagagtaaagattggtgatccttctgatttctattgcatatatcctgtagaagtctttgcttcctcaacaactctcataagtcataagttcatttattttctttctttccttcttctcccttgatcattgcttagtccccttgggtcattttcctctgattttaaattctccaattgcctacatcttttgtcaatgaacttttgttctttgcacatacttctctcacaactctttcctctctcttagtagctacttatcttactcttccctattaggaaaagctggtggcaaaggaaaaagtgatgatgagatgcagggtgaagaagatgaagaagatcaagatggagagcatccagaggatagtgaagactaagatcaagaacttgattagtcagtgttttcacgtagtgtagtattcaagttttgtagtatccataacactgcagaactgttaggtgccactggaaatttttcatatcaagcattccagtgttggggtatgcaagtcatttgtttttgttaaaatacatagatctagagcaatcaaatgttgttcattttgataaaaaaaaaagaaaaaaaaaaaaaaaaaa

SEQ ID NO: 7468 - DNA, 803 bp, Glycine max
  misc_feature (44)..(44): n is a, c, g, or t
ttgtaattggataatactaattaaataatactgtaaaattattngtcaatacataaacattaaactattttttaactatatatatatatatatatatatatatatatatatatatatatatatattgtttttttggtgggtttgggagaagctaaagattaagtaaggttgagggaagactgaagagtgatgtgaaaataaagtacataataacattgattactgatgtaacaagcactaaatttgattatagttgctcatttacagggcaccaatgttcttgagaccaaggacaaccccaaccccaatgatgtggccaacagatccacaggccaaggtgtcagcaagggtgaagccagcagggtcaccagtctgcaagcctgagtccctcacctccagctttagccctgcagtggctttcctgtttgctgatggagccaatccaaaccttccagcaaacagcatcagggttgtagaagccaccataatcagattagtggatgaaccaatgtagtcacatcgagctcccaaagcacccttccccttgggcctcataggttgttggacagcaaccaagttcttcacaggggcagctgagaattgaggtctaagaccactgaattgggggagagtggtcatgatcacagtggttgttgccatttgttaaaactcaaaaaaaaaaaaaaaaaaaaagaggaaatgataatatgttctgctgtctctaagcactctcctttttctttggttgctaacggttatgatgtaacatgcaatatgcgtatctaatggcagccacatttttc

SEQ ID NO: 7469 - DNA, 1492 bp, Glycine max
taataaaaatgaaaagtttaaataatgatagtgtattatgtaaaatttgagaagtaattataaatcatgatggcaaaaataattgtaaaagcaaagatagctatgtgaaatggtatgaagacagctagcagctattaattgggaatgaagttcttgacatatcagtacgaaatgcacagcatgatcaagcacatcttttccttagacatggaaagggaatcctccaatcacaaggaaggttattaaggaaaatgaggtttatgccatcttccttgtcatcaaattctcatcggctgctgactgcccttgttgactcaaggcataagaaggcttttaaggttaaaaactgcattactgacattgatcctgagcgggaaaaagaagaaaaagagaaggctgaaagtcaaaatatccgtgctaatgtgcttcttaaccgaaagcgtgagaaggtgaatcggaagtatactccagctgtggagaggaggcgtcaactttctcctgggtttttagaggatgctttggatgaggaggatgaagcagactattatgataatcatcgttctcagcgccgctttgaggatgatttggaagtggaagcccgagcagagaaacgaattatgaatgctaaaaagtcacggggacctaaagatatccctcgtaagtcttccttcccacctgctaaatcctctcggaacccaatgggttacccagatgatgagagagaggagtctgagtatgaaactgaggaggaggaagatgagaggcctccttcacgtaagagggatgaggatactgagccagagtatgaggatgaggaagaagaggaagaacactatgaagaagccgaacaagttaatgatgcatcagatgatggggaagaggaggaaccaaagcagaagagcaaggagtttagaggcagtgccaaaaggaagggatttgaatctgatgatgactcttctccaaggaaaataaccacccatcggcggatggcggttgtgtatgatagtgatgaggactgaacttccttaagccagattttcatgggaaatcctcctttttattcagaattgtaaggaaggatgtgcgtagggtgcagcaaaggctgagatggctcattcttttttttcctctccttatatttcatccgtatatacatgaagcagcgcctggcacactaatgtagtgtttattctcaggtcacaatatatgtttttgactgtcttattaatggtcataaaaaactatcagtgtaaataagtttgttttctgtattttccgatcataaattttcgtccaagggcaggtaatggttgacaagtggggaacttcttcacggtccatccctttttactttctgaaagaatgatgtcgttactttgcaactttatatgatagtaacattttagatttctttagctaagaataataattaaaaaaacctacaaatttcaggttttaataggagaccagaaaccgatgttttgccgtgttt

SEQ ID NO: 7470 - DNA, 1024 bp, Glycine max
ctcgagccgattttgtatcactatgacacggttgtgttcttgtaggtactatttgaaagatgcagtccttgaagggggtattccatttaacaaagcatatggaatgacagcctttgaataccatggaacggatccaaggtttaacaaggttttcaacaaggggatggctgatcactctaccattacaatgaagaaaattcttgagacctacacaggctttgagggacttaaatccctggttgatgttggtggaggaactggagctgtagtcaacatgattgtctcaaagtatcccactattaagggcattaattttgatttgccccatgtcattgaagatgccccatcttatccaggagtggaacatgttggtggagatatgtttgtcagtgttccaaaagctgatgctatttttatgaagtggatttgccacgattggagtgatgagcactgcttgaagtttttgaagaactgctatgaggcactaccagataatgggaaagtgattgtggcggaatgcattcttccggtggctccagactctagcttggccacaaagggtgtggttcacatcgatgtgatcatgttggctcacaatccaggtgggaaagagagaacagagaaagagtttgaggctctggccaaaggctctggattccaaggtttccaagtcctgtgctgtgctttcaatacctacgtcatggaatttctcaaaaaggtttaagttctttggcgtggattcatatcaagttgcatttggattttgactttgagactctgcttggggtgctacttacgaatgttttcccggaaaaacgtaaatttcttctaatgctttatgaaaagaataacgaacaagttcaatgtataccgcctttataaaataataacaagtttcatattgtggttctggttcaaaaaaaaaactaaataagcgttctcggcggtgccaacccttataggagaaatttgttgttgtttttcccaaaaaaaaaaaaaaaaaaaaaaaaaaagtagatcgcga

SEQ ID NO: 7471 - DNA, 1410 bp, Glycine max
tccgcgtcggcggcgccccccccgcccacacagctcacagttccaatctaaaatcaaccatgggttcagcagctgagactcagattactccaacccatgtatctgatgaagaggcaaacctttttgccatgcaactagccagtgcctctgtactccctatggttctcaaatcagctcttgagcttgatctgttggaaatcatagccaaggctggccctggtgttcatctttcccccactgacatttcttctcagcttccaacacagaaccctgatgcacccgttatgttggaccgcattttgcggctcttggcttgctacaatatcctttctttttctctccgtactctccctgatggcaaggttgagaggctctatggtctcgcccccgttgctaagtacctggtcaagaccgaagatggtgtctccattgctgctcttaacctcatgaaccaggacaaagtcctcatggaaagctggtactatttgaaagatgctgtccttgaagggggtattccatttaacaaagcatatggaatgacagcctttgaataccatggaacagatccaaggtttaacaaggttttcaacaaggggatggctgatcactccacaatcacaatgaagaaaattcttgagacctacactggctttgagggtcttaaatctctggttgatgttggtggaggaactggagccgtagtcaacatgattgtctcaaagtatcccactatcaagggcattaattttgatttgccccatgtcattggagatgccccatcttatccaggagtggagcatgtcggtggagatatgtttgtcagtgttccagaagctgatgctatttttatgaagtggatttgccacgattggagtgatgagcactgcttgaagtttttgaagaactgctatgaggcacttccagacaatgggaaggtaattgtggcagaatgcattcttccagtggctccagactctagcttggccacaaaaggtgtggttcacatcgatgtgatcatgttggcacataatccaggtgggaaagagagaacagagaaagagtttgaggctctggccaaagggtctggattccaaggtttccgagtcctgtgctgtgctttcaatacctacgtcatggagtttctcaaaaaggtttaagttctttggcgtggattcataagttgcatttgagttttgactttgagactctgcatgtggtgctacttacaaaagctttcccggaaaaatgtaaatttctcttaattcattaggaaaagaataataaacaagttcaatgtatactgccttttatataataacaagtttcatactgtggtttatacataaaaaaaaaaaaaaaaaaaaaaaaaaaaaaaaaaaaaaaaaaaaaaaaaaaaaaaaaaaaaaaaaa

SEQ ID NO: 7472 - DNA, 1902 bp, Glycine max
  misc_feature (143)..(164): n is a, c, g, or t
ttctgatttccctttcaattctcaaactaatgttagccccaatgttcctagggttggttctggtgtgaatccaaacactactgggttccctgcttcagctagcaatctctcaccagtttcactccctcagggtgtgtttctgnnnnnnnnnnnnnnnnnnnnnnatccaccaatagagcctctggatgagaagctacaagttctcaatcctcagttcattttgaaccaaaatcaatctcagtttatgccaaacgcgggtttggttttgcctttgacatatggccaactgcaagaaaatcatcagcttctccctcagcctccggcgaaacgcctgaattgtggcccaaattatcaggttccaaagacaccctttttggactctggccaagagctgttacttcggaggcagcaacagcagctccaactgcttcctcaccatctgctgcaggcgccatccatggcggcgccaccaaagcagaaaatggtgaactccggcagcgaagacttggcgacccatcagcttcaacaggctataactgaacagcttttcaaagctgcagagctgatcgatgccggtaatctggaactcgcgcatgggatattggcgcggctcaatcaccaactttctcccattgggaagccttttcagagggctgctttttatttcaaagaggccttgcaattacttctccatccaaatgccaacaacagttctttcaccttctcacccactggccttttgctcaagattggtgcttacaagtcattctcagaaatctcaccagttctgcagttcgccaatttcacttgtaaccaagcactgcttgaagctgtggaagggtttgatcgcattcacataatagattttgatattgggcttggtggacagtggtcttctttcatgcaagagttagcactcaggaatggcagtgcacctgaactcaagatcactgcatttgtgtcaccctcccaccatgatgaaattgagctcagtttctctcaggagagtttgaagcaatatgctggggagttacacatgtcctttgagcttgagattctgagccttgaatctttaaattctgcttcctggccccagccacttcgtgactgtgaagctgtagtggttaacatgcctattggctctttctcaaattacccatcatatctacctttggtccttcgctttgtgaagcagctcatgccaaaaattgtggttacattggatagaagttgtgatcgaactgatgcaccatttcctcagcatctgatttttgcacttcagtcttattcagggctgcttgagtcacttgatgcggttaatgttcacccagatgtccttcagatgattgagaagtattatcttcagccatcaatggagaagcttgtcttgggtcgacatggtttgcaggaaagagcacttccttggaaaaaccttctcttgtcatctgggttttcaccattgacctttagtaactttacagaatcccaggcagagtgtttggtgcagaggactcctagtaaggggttccatgttgagaagaggcagtcttcccttgttctttgctggcaaaggaaggatctcatctcagtttcaacttggagatgctaagcagagccattttgcacctttgaactaccaatttaattttaaattctaaagtgctacataacttacagcttctattgatctttcttgcttgaatttgccttgtctatggttctatgctaattgtctgtttttaggatttattattttcagttaaggaagggaagtgaacatattaattagcaactgaatgacgatttatgagcgtgatatgcagtgtattattataaataggggcattctatatatgcattttgtcctgttttaattgcctaaaaaaaaaaaaaaaaaaaaaa

SEQ ID NO: 7473 - DNA, 3065 bp, Glycine max
gtcgaaaccgtggctataccctgctccaacctatcgaactatagaaaccttctgggtcaccgatgaagacgcacccggccctcgctgtggccacaccctcaccgccgttgccgccaccaagactcaaggcccccgcttgatcctattcggcggcgcaaccgccattgaaggaggatcttcctctgcccccggcattcggttagcgggagtcactaataccgtccattcctatgacgttcaaagtagaaaatggactagtatcaaacccgccggagagccgccgtctcctcgggctgctcatgctgctgctgcagttggtaccatggttgtttttcagggtgggataggtccagcggggcattctaccgatgatctctatgtgcttgacttgaccaatgataaatacaaatggcatagggtcgttgtacaagggcaaggacccgggcctcgctatggccatgtaatggacctggttgctcagagatatctagtaactgtcagcggaaatgacgggaaaagagttgtatctgatgcttgggcttttgatactgctcaaaaaccttatgtgtggcagaagctgaacccagaaggtgacagaccttctgcaagaatgtatgcaactgctagtgcccgctcagatggaatgtttttgctctgtggtggaagagactcttctggagctccactagcagatgcctatggactgctcatgcataggaatggccagtgggaatggacccttgcacctggagtttccccttcaccaaggtatcaacatgctgcggtttttgtcggtgcacgattacatgttacaggtggtgttctcaggggtggacggtccgtggaaggtgaagcatccattgcagtattggacactgctgctggggtttggttagatagaaacggcattgtgtcctcctcacgctcaaacaaaggtcatgattatgacccttctttggagcttatgcgtcgttgtcgtcatgcagctgcagctgttggtgttcatatatttatctatggtggtttaagaggagatatactactagatgatttcctagtggctgaaaattcgccattgcagcctgacattaattctcctgagagagcttcacctgttacaagctccaaacaaaatcaatctaacttaaattataatgtaacaacaccaaatttggatggtggaccagatattccttcatctggtggctcaggcatggacaaaaattccttggagaaactgagggaagcatcagctgctgaagctgaggcagcgagtgctgtctggcaagctgtgcaggctatatcaagtaatcctgctgaagaaacatctgtgtcagatgacaactcacaagctgtggaaacagtttcagatggaagtgatacagagggagatgtccgccttcatcctagagctgttgtagttgcgaaggaggctttaggtaacctaggtgcggcgcggggacaattatcgctagatcaatttgaaaatgaaagtagacgcatgattcccgtaaataatgatttgccatatcctacgaaaaagttcaccaggcagaaatctcctcagggtttacataaaaagataatttcaactttgcttaggcctcgcaactggaaagctcctgcaaacaggcggttcttcttggattcttatgaagtgggtgaactttgctatgctgctgagcaaatatttatgcatgaaccgaccgtacttcagctgaaagctcctgtcaaagtatttggtgatcttcatggtcagtttggtgatttgatgcggctatttgatgaatatggatttccttctactgcaggagacatcacctatattgactacctgtttttgggagattatgtcgatcgaggacagcacagcttggaaaccattaccttgctacttgctcttaagatcgaatatcccgagaatgttcacttgatacgtggaaaccacgaagctgctgacataaatgcactatttggttttcgtattgagtgcattgaaagaatgggtgaaaatgatgggatatgggcatggacacgattcaatcaactttttaactatcttccattagctgctcttattgaaaagaaaattatctgtatgcatggtggcattggaagatcgatcaattcagtagaacagatagagaagcttgaaaggcccataacaatggatacaggatctattactttaatggaccctttatggtctgatcccacagagaatgatagtgtagagggtttgagaccaaatgctagaggcccagggcttgttacttttgggcctgatcgtgtcacagaattttgtaagaaaaatagctcgcggccccgtgccggggcccgcgcgtgggtcatggatggctttgaacgatttgcccagggacaattaatcacccttttctctgcaactaactattgtggaactgcaaacaatgcgggagctatactggtagttggtaggggtttggttgtagttccaaaattaattcatcccataccacctccccttcagtctcctgagacatctcctgagcgtgttatggatgaaacatggatgcaggagcttaatattcagaggccaccaactcctactcggggtcgacctcagccggaccttgatcgtggctcactagcatatatatgatttgattcacgacttgaataaatactgcatattcgggatttttcatcatcgcttgatatcctgccaaccaaaagttctgtttctaaacctgtcattgttggcagaatacatattttgtactagattcttctttagttgcagaaaagcaaactctcattagcatgcaaatagcttgagagagtgcattattttatgttagccaattagcgaatggcttgtggagattggttttactaggcacgggacatggataaagtggaagagatgctagtggcttctccccctcaacatggggatggataacttagtcagggaataccgatgtttggtatatatattgtatcatagagaaatatatatatatatatatattttttcctttatataaatgttcataacatttagatcccagcccactattaaa

SEQ ID NO: 7474 - DNA, 1337 bp, Glycine max
gaattcccgggtcgacccacgcgtccgtacggctgcgagagacgacagaaggggagaattagatatacatattttatatatttgcttaggatattgtcctaaaacttacttgcttggaccccagtagttgagttgaggaagtgatggaagcagtttacaggttgaaacctcttttggatgtggttagagttgggaacgctaccacttctgagatgcgtcttgaatcaacggctaattgttacctgcagctagaagctcctcaacctcaagagaataataatgtaaccgactcatcatcagatatgtcggatcggataatcaagatccagatcgccaatcaccctctttatccagatttactctctgcatatattgaatgccaaaaggttggagcaccgccagaactggcatgccttcttgaagaaataggccgagaaagccaccgcatgaatgctcgccgtgagataggggagggccctgaacttgaccacttcatggaaacattctgccaagttcttcatagatacaaggaggagttgtccaggcccttcaacgaagcgactttgtttttgggtgacatggaatcacaactcagcaacctttgtaatgaaacactaacaaagtcatcggataacaacaaccgctccgacgaggtagctagtggggcatcagaagaggaattaagttgtggggagatggaagcatttgaagataatgtatcttcagtaacttgtccaagtgatcaaaggcttaaagagatgctccttcgcaaatacagtggccattttagcggtttgagaaaggaatttctgaaacgaagaaaaaagggtaagctaccaaaggatgcaaggatggcactcatgggctggtggaacacccatcatagatggccttatcctacggaggaggagaaagtgaagttatcagaaattactggtctggatcaaaagcagatcaataattggttcatcaatcagagaaaacggcattggaaacctaccgaggacatgcgatttgccgtcatggacggattaagaggcggcggtggcggcggcataggagggcctatgttgttttagctctggaagtgctcctcaacgatctgaacttgtacccttcgtaattgcaggagcaatgtatgtgcattgcattcctgttacacgtgatatatatactaaattttagagactgaactgttgtttagctaatatacttgtcaaagttgtagttatagtagtgtaatgcgccattgttatgcagtattcctgaatctttgattatattataacaatgtcgtgctgaagaaaaatagaaaaaaaaaaaaaaaaagcggccgc

SEQ ID NO: 7475 - DNA, 2815 bp, Glycine max
gcgcacgaagctcggaattcggctcgggattgggtcacagtttgttgaccagctcaaacctaattcatctagaagtagaagtgtatacgagaacagagtgacgccaacgcaagaggcaggggcaggttctccaccacaccattctctctacgtgcaagtcaaaaccggcattcgcacgagtcacaaacttcaccgaacttccgtataaattctcttctcttccgtgattattactgaaagaggaatagaatagtcagcgatggcacagaagagattcatcatcgaggtcgagaaggcgaaggaggcgagcgaaggaaggccttcgagaggacctgtctatcgtagcctcttcgccaaggatggattccctgctcctatccaaggtctcaatagttgctgggacgtttttcgattgtctgttgagaaatatccatcaaatccaatgcttggtcgccgggaaattgtggatgggaagccgggcaagtacaagtggctaacatacaaagaagtatatgaccaggtgatgaaagttgggaattctatccgcagctgtggttatggagaaggtgtaaaatgtggtatttacggtgctaattctgcagaatggattatgagcatgcaggcttgcaatgctcatggactttattgtgttcctttatatgataccttgggtgctggggctatagagtttattatatgccatgcagaggtctcaattgcatttgcagaagaaaagaaaatacctgagctattgaagacatttccaaatgcaacaaagtatctcaagacaattgtaagcttcggaaaggttacccctgaacaaaagcaagaagttgaaaattctgggttggaaatatattcatgggatgaattcttacaagtgggtcaaaatcagagttttgatcttcctattaagaaaaggagtgacatctgtacaataatgtatactagtggaactactggtgaccccaagggagtgttgatatcaaatgagagtattattactctcttagctggggttaagcgactgttggagagtgtaaatgaacaattgactgagaaggatgtatacatatcataccttccacttgcacatatatttgatagggtcattgaggagacattcatatggcatggtgcttcaataggtttctggcgtggggatgtcaaattgttaattgaagatgttggcgaactaaaaccaactattttctgtgctgttccccgtgtgcttgatagagtgtactcaggtttgacgcagaagatttcttctgggggcttcttgaagaagacattattcaactttgcttattcatataagcttaataacatgaagaaagggcttagacatggagaagcatctccacttcttgataaaattgtgtttgacaaggtaaagcaaggtttagggggtagagtacgtcttattttgtctggagcagcacctttatctgcacatgtggaaggttacttacgggtggtgacttgtgctcatgtcctacagggatatggtctgactgaaacctgtgcgggaacctttgtctcattaccaaatgaaatagaaatgcttggaacagtgggccctcctgtaccaaatgtggatgtttgcctggaatctgttcctgaaatgggatacgatgccctagcaagtacaccaagaggagaaatttgtgtaaagggaaaaaccttgtttgcagggtactacaaacgtgaagacctcactaaagaggttctgattgatgaatggttccatacaggggatattggagagtggcaacctaatggaagcatgaaaattattgatcggaagaagaatatatttaagctttcacaaggagaatatgttgctgtcgaaaacctggagaatatttacggtcaagtttcttctattgaatctatatgggtttatggaaacagttttgaggccttccttgtggctgttgttaaccccagtaagcaagcacttgaacattgggcccaagaaaatggtatatccatggacttcaattctctctgtgaagatgctcgagcaaaaagttacataattgaagagctctcaaagattgcgaaggaaaagaaggtgttttttttttacttagtttactttgcttatcattattctaatttgttatatttggagtatatgtctgtagcttgataaaatttctcctcaatctaaagttgctttctccaacaatcaagattcttttaattcacatacaatatacttttcaaataaacaataactttttttggcaataatattaacatgaaatattttgtctggtcttgcactggttttaaatgatcttatcctatatgtaaacgtttttgtacaagtgcatttcctgaagctttgtgggatgatgatgtatttggcagttgaaaggttttgagtttataaaagcagttcaccttgactcaattccatttgacatggaacgtgaccttatcactccaacatacaagaagaagaggccacagttgcttaaatactatcagaatgccattgacaacatgtataagagtggaagtaaacccagtgcctgagacctgatttgggagataatttattttctgtatgtgatggtgtttgtctccgttcaattgtttccttttggtgactgtatatacgctgagtagttatatatggatacgtcatttattttgattttttttttcacgtcatattatctattctaccggacttatctaagtaagttgtctttcttctctttttctatctctaggtgtattacagtatccatgaatcatttttacatatataattattcagaaaaaaaaaaaaaaaaaa

SEQ ID NO: 7476 - DNA, 1825 bp, Glycine max
atacaccaagaggagaaatttgtgtaaagggatcagcctcgttggcccccccccacaaacgtgaagacctcactaaagaggttctgattgatgaatggttccatacaggggatattggagagtggcaacctaatggaagcatgaaaattattgatcggaagaagaatatatttaagctttcacaaggagaatatgttgctgtcgaaaacctggagaatatttacggtcaagtttcttctattgaatctatatgggtttatggaaacagttttgaggccttccttgtggctgttgttaaccccagtaagcaagcacttgaacattgggcccaagaaaatggtatatccatggacttcaattctctctgtgaagatgctcgagcaaaaagttacataattgaagagctctcaaagattgcgaaggaaaagaagttgaaaggttttgagtttataaaagcagttcaccttgactcaattccatttgacatggaacgtgaccttatcactccaacatacaagaagaagaggccacagttgcttaaatactatcagaatgccattgacaacatgtataagagtggaagtaaacccagtgcctgagacctgatttgggagataatttattttctgtatgtgatggtgtttgtctccgttcaattgtttccttttggtgactgtatatacgctgagtagttatatatggatacgtcatttattttgattttttttttcacgtcatattatctattctaccggacttatctaagtaagttgtctttcttctctttttctatctctaggtgtattacagtatccatgaatcatttttacatatataattattcagaaatggctgatgttcaactgcagacatgaaatataaaactatttttaaacttacagcactccttttttttttttttttgaaaaatactgtttgcaactgtgtagcttatgcttgcaactgtttttcctcccatttgtcgatactatatgtcactttaaataagttttggaataaaatcttatgagaggaaataaataaaagaaagcaaaatatttttttttttcacatcacttcaaatcaaattacctactttgtttttttttaaaagtacttttcttttagcttttctcaaacccctacaaatttataatgtatattttgtaaatttagaatcaaacacttctagttgaaaatttgtcaaaaggtaaactgaattgaacctataaatgtcctgtgtaacaggaatccgttgaagttcaaagaagaatttgcacgaggttgcaattctcaacaccaaccgttcgttgctattgaaatgtttgcaaatagacacgttttattccaaaggaaacatggaaccaagacttcaatgtgatggcttattgaagaacagttaggagaattgataaaaatttaaacatatgaagcctaatatttctcaatataattttagaaagtatgcttaattgtaaaatccgtttccttgtttttgttaattttaccaaattgatccttcctttttttctcatctactatttgagtcctcctatattttaaagttcattatcttagtcctcagagttgattttaaccgttgattaaataaatagatatctatagttataaatttttgtttgtagtccccattaatcaaatcaaaaactcatttctataagaacaactaatcatagcaatcaattatatccttttaaaattgttagattaagtacataataatactttttctctataaaaaaagataaaattagttccatttaggaactcctgaataaaatatgaatacattagattaggctgc

SEQ ID NO: 7477 - DNA, 1505 bp, Glycine max
tcgatcagctacgtaggcccccccccccccaaaaaaatttcaactttcaattcgagcagcagctttggaaaacccaaccagccaacagattttggttagattgtgtagacttaggagtgaatagtttgatatatgcatggaaggaagagaagggataagttctggggttacagtgataggagcagaagctccatcagcctatcacatggcaccaaggagtgaagctccaagccaggttcctccacctgttcctgaagcaacagctggagctattggtgtctcaccagcgagtgtgggattggatggaacagcagctaagaagaaaaggggtagaccaaggaaatatgggccagatgggttgaactctatggcattgtcacccattccaatctcatcttcagctccatttgctaatgaattctcgtccgggaagcagcgggggaaaccgcgagcgatggagtacaagctgccgaagaaagttggagtggatctttttggtgattctgttggtacaaactttatgccccatatcattacggtcaatactggcgaggacattacaatgaaggttatatctttttcccaacaaggaccccgtgctatatgcatcctatctgctagtggtgtaatttcaaatgttacacttcgtcagcctgattcttctgggggaaccttgacctatgagggccgttttgagatactttcattatctggatcattcatgcctactgacaaccaaggaacaagaagcagatcaggtgggatgagtgtttcattgtcaagtccagatggtcgcattgtaggtggtggagttgctggtctccttgtagctgctggtcctgtgcaggtggtggtgggaagctttttgccaaacaacccgcaagataagaaaccaaagaagccaaagtctgattatgcaccagctaatgtcaccccttccattgcagtgtcttctgcgccaccccctactaatggtgaaaaggaggatgtcatgggtggacacctactgcacaacaactcaggaacaacccttaactcgaacttttctcctccctcggcctttcgtcgagaaaactgggttaacatgcactccatggccgactcgatgaagttggttactgacattaacatatctcttcctgatagttaagttgatgatcaacctggagtctcgctgacaacattcatgactgaactctttgtttattgtttccagtgttgttgttctatatcgcctactttccactcttttcaaaccttattatgatcttttgtcgatgacaccgtaggaccaagtagctagtggtgtaagttgcagctaggtttctacaattttctttgcctaccagagcatctgattccttggctgattaggtagatgctgcaatgtgcagtgttatgattaggctaattcggatgtaatcacaactgaatttgttcgagcttttgtctcaacctagccatttattattatgtcaaaaaaaaaaaaaaaaaatgttctttat

SEQ ID NO: 7478 - DNA, 1528 bp, Glycine max
  misc_feature (1523)..(1523): n is a, c, g, or t
aaaaaattttcaactttcaagtttcaattcaagcagctttggaaaacccaaccagccaacagatgttggtttgattgtgtggacttaggagtgaatagtttgatatatgcgcatggaaggaagagaaggcttcagttctggggttacagtgataggggcagaagctccatcagcctatcatatggcaccaaggagtgaagctccaagtcaggttcctcctcctgttcctgaagcaacagctggagctattggtgtctcacctgtgagtgtgggattggatggaacagcagctaagaagaaaaggggtagaccaaggaaatacgggccagatgggttgaactctatggcattgtcacccatgccaatctcatcttcagctccatttgctaataacttctcatccgggaagcgggggaaatcgcgggggatggagtacaagctgctgaagaaagtcggagtggatctttttggtgactctgttggtacaaactttatgccccatatcattacagtcaatactggtgaggacattacaatgaaggttatatctttttcccaacaaggaccccgtgcaatatgcatcctatctgctagtggtgtaatttcaaatgttacacttcgccagcctgattcttctgggggaaccttaacctatgagggccgttttgagatactttcattgtctggatcattcatgcctactgacaaccaaggatcaagaagcaggtcgggtgggatgagcgtttcattgtcaagtccagatggtcgtgttgtaggtggtggagttgctggtctccttgtagctgccggtcctgtgcaggtggtggtgggaagctttttgccaaacaaccagcaagatcagaaaccaaagaagccaaagtctgactatgcaccagctaatgtcactccttccattacggtgtcttctgcaccaccccctactaatggtgaaaaggaggatgtcattggtggacacctactacacaacaactcaggcacaacccttaactcaaaccttactcctccctcggcctttcgacgcgaaaactgggttaacatgcactccttgacagactcgatgaagtcggctactgacattaacatatctcttcctgatagttgatgatcaacctgcagtctccctgtcaacattcatgattgaactctttgtttaatggttccagtgttgttctatatggcgtagtttccactctttttcaaacctattatgatctttttttgcctatgactgtagggcgaagtagctgactagtggtgtaagttgcagctaggtttctataattttctttgcctaccagagcatctgattcctcggctgattaggtagatgctgcaatgtgcagtgttattatgagtaggctaatttggatgtaatcacaactgaatttgttggatcttttgtctcaacctagccatttattattatgtcacgagtatagacttgttattttctctatggaaaaaaaagaaaaaacactcaaaaaagtcccccatataaatanaaagg

SEQ ID NO: 7479 - DNA, 1610 bp, Glycine max
cctaaacctccttaagaccaggaccaggaccagcccttcctttccgaacacgaatcccattcattcactaactcatcaatcaaattcaatcatccatcaacacatataaaaatcatttttccctttctccaatttctaatctattactattatttttcccggaaaattttcctattttccatgaatgttctggctctagggcgcttcctcacttcccccttatataagtcttcccctctcactccctccccaatccaattcacacccatttttcttcatcccccaaagtttcaatctttgtattcaattcaccctttctctctctccatggccacttgtgttgatgccccaacccctctttctcggaagcctaacgggtcccaatccgatgatcattccttcaattacatgaaattctgccgaccctctttctctgatcgcgttccctgcatgcccatttgcaagaatcgcgacaccgccttcacacgtgtggaggagtttgacacacgtgtggagaatcatgttgaggttgacgttgtagagggtgttgatctttggttgaagattcaagaggaagcaaggttagatgttgatcaagaaccaatcttatccagctactatttcagttccattttgtctcacaaatccttggagagtgccttggccaaccacctctccacaaatttgagcagcttgagccttccaagcagcaccctttatgaccttttcatgggtgtttttgccgatgataatgacatcataggtgctgtcaaagatgatttgatagctgttaaggagagggaccctgcttgcataagttatgtgcattgcttgttgaatttcaagggtttcttggcatgccaggctcataggattgctcacaaattgtggctccaagggaggaaggtcttggcgctgttgattcagaatagggtgtctgaggtttttgctgtggatattcaccctggtgccaaaattggacgtgggattttgctggatcatgcaacaggacttgttgtgggggagactgcagttattgggaataatgtgtcaattttgcataatgtgacattgggagggactggtaaggcaagtggggatagacaccctaagattggtgatggggtgttgataggtgcagggacttgtattttggggaacattaagattggtgatggagctaagattggtgcttgttctgttgtgttgaaggaagtgccaccaaggactactgctgttgggaaccctgctaggttggttggagggaaggataaccctattaaattggataagatgcctagttttaccatggaccatacttcatggtctgattatgttatatagaagctaattaattgtctaacatgttttagagtttgtgtttaggtgggaattgttttggttgagggggcttggttgttgtgcaagagagaatctaagttctcctgctgacaacagggcgtcctttgaatcatcgtgttagatttttaaagaatagttagatgtagtactttgttgttgtaaggggccatgatgacaaccctttgtgtaaaatttatgaatatggatatttcagcttgttatggttaaaaaaaaaaaaaaagggcggg

SEQ ID NO: 7480 - DNA, 926 bp, Glycine max
ttcctttccaaacacaaatcacattcattcactcatcaatcgaattcccaatcgtccaccatcacaaataaaaatcattttccctttctaatttattaccaatattattttttcccggaaaattttcctattttccatgaatgttctggctctagggcgcttcctcacttcccccttatataagacttcccctctcactccctccccaatccaattcacacccatttttcttcatcccccaaagtttcaatctttgtattcaattcaccctttctctctctccatggccacttgtgttgatgccccaacccctctttctcggaagcctaacgggtcccaatccgatgatcattccttcaattacatgaaattctgccgacccactttctctgatcgcgttccctgcatacccatttgcaagaatcgtgacactgccttcacacgcgtggaggagtttgacacatgtgtggaggataatgatgatattgaggttgaggttgtggagggtgttgatctttggttgaagattcaagaggaggcaaggttagatgttgatcaagaaccaattttatccagctactatttcagttccattttgtctcacaaatctttggagagtgccttggccaaccacctctccacaaatttgagcagcttgagccttccaagcagcaccctttttgaccttttcatgggtgttttggttgatgatggagatgatgacatcgtaggtgctgtgaaggatgatttgatagctgttaaggagagggaccctgcttgcataagttatgtgcattgcttgctgaatttcaagggttttttggcatgtcaggctcataggattgctcacaaattgtggcttcaagggaggaaggtcctggcgctgttgattcagaatagggtgtctgaagtttttgctgtggata

SEQ ID NO: 7481 - DNA, 1306 bp, Glycine max
ggccaaacaaaccaagcagcattataatagaaagaggacacaaagtgaaagagaagggagctatagccataaggagaaaaactttcaaagaggtgaaagcaaaagagttcttcttttccttttttatatatacttgggtgctaagctgtgtgagttcattgacaagcctgaaatggcaactatgctgacaaaggagcatggtctgaacctcaaggagaccgagctttgcctcggtttgcctggtgggggaggcggcggcggcggcggcggcggcggcggcggtggtgaggtggaaactccaagggccactgggaagagagggttctctgagactgttgatctgaaacttaatcttcattccaaggaagatctgaatgagaatctgaagaatgtctcaaaggagaagaccctccttaaggatcctgccaagccaccggctaaggctcaagtggttggttggccaccagtgaggtcatacaggaagaacatgatggcagtacaaaaggttagcactgaggatgtggcagagaagacaacaagcagcactgctaatcctggggcatttgtcaaggtttccatggatggagcaccttacctgcgcaaggtggacctcacaatgtacaaaagctacaaagagttatctgatgccttggccaaaatgttcagctccttcaccatgggtaactatggggcccaaggaatgatagacttcatgaatgagagcaagttgatggatcttcttaacagctctgagtatgtgccaagctatgaagataaggatggtgactggatgctcgtgggtgatgtcccatgggagatgtttgttgagtcatgcaagcgtctgcgaataatgaagggatcagaagcgattgggcttgcgccaagagcaatggaaaaatgcaaaagcagaagctgaagcgggcctaatacaatgttcaatgaaatcccgtaccaaagtggacctatatatatatatatatatatgaagcacttcagcgagactatggagcggagtgttgttagcttgaatgtgtctggtgttttttgttttgttcgtatatagattcaacttttaattttaaggagccgatcgatggggcatttgtaatggacaagaagcaataaacttaacctatatagtctggcttgtttattatgtgatccttccatgctgtcatgattgttgtgtgctaaaataccttgaattttaattcatactttattccctcaaataaaaaaaaaaaaaaaaaaaaaaatgattttatgtttgaattaattgtgtatgccctgcaaaaaaaaaaaaaaa

SEQ ID NO: 7482 - DNA, 2003 bp, Glycine max
aacaaaatctttttctaacatttccaaaaaaaaaaaacgaaataaaaatcgccgccgcagtgccccggggtcagcccacgcgtccggcacgacttacgctcacagacacactcacactcacactcccggtgccgccgccgccaccaccaccaccattgctttcactctccgaatggcaaccattctatctccaatccaaaccctcaaattccgttctcccaatcccaaacctctcttctctcccaaaccgcctcccatctccacacctctcaccttccgcgccgataaactcactctcttcgtctcctccgccacctcctccgccaccgtctccaccaacggccctccctctcctccctcccctgctcgctcaaaggttcggcgacacacgatttccgtgttcgtcggcgatgagagcggaatgataaaccggattgctggcgtgttcgcgaggagaggatacaacatcgagtcgctcgccgttggcctcaatgaggacagggcgctcttcaccatcgtcgtgtcagggactgataaggtgctgcgccaagtcatggagcagcttcagaagctcgtcaatgtcttaaaggtagaggatctttcgagggaaccgcaggtggaacgtgaactgatgctcataaaagtgcatgcggatccgaagcaccatgcggagttgaagtggttggtggacatcttcagagctaagattgtggatatctcgcaacattcggtgacaattgaggtcactggagatccagggaagatggctgcggttcaaagaaatttcagcaagtttggaattaaagaaatagccagaactggaaagattgcattaagaagggaaaagatgggtgcatctgctccattttggcggtattcagctgcttcttatccagatcttgaaggaagaacacctgttaatgcccttgtgggagcaaaaaatatgaaacctgttgccaaacttgatacacctgtggggggagatgtttatcctatagaaccatcagatggttttacagtcaatcaagttcttgacgctcactggggtgtcctcaatgatgaagatactagtggaattcgatcacacactttatccatgcttgtgaacgatgctcctggagttctaaacattgttacaggagtttttgctagaagaggctataacattcagagtttagctgtaggacatgcagaagttgaaggactttctcgacttacgactgtggttcctgggacagatgagtcaattagcaagttggtgcagcaactctataagctagtagagctacatgaggttcgtgatatcacccacttgccatttgctgagcgagaattgatgctaataaagattgctgtaaatgctgctgcacggcgtgatgtccttgatattgctagcattttccgggctaaagccgttgatgtatctggtcacacaataactctggagcttactggagatttggacaagatggttgcattgcagagattgttagaaccatatggcatttgtgaggtggcacgaactgggcgaattgctctagtccgtgagtcaggtgtggactccaagtacttgcgtggatactcttatcctttgtaatcacttcacctgggtcgaagaaccatcaaaatcttaggattttagagcttgtactttctcttaaactttgcctacggattcttgccttctgaactataatgttaataagtccttctgtgattaatataggcttgggatgacatctgagattaaaaaaaaaggttttcctctcctcaactttgcttcattttttggtggaattacagtttactattttgtgtagggacaaattttttgcttgtcaaaatatttatgtttcttacttggatgttgtctgttcaaaattaaattccttatattaatgctgtcgaatcctatgttgcttgcattaggacattaattttattgcttatacaattgtgatgtttttaaacaaaaaaaaaaaaaaaaaagaattccgcagccg

SEQ ID NO: 7483 - DNA, 1163 bp, Glycine max
ccacgcatccagccaaacaaaccaagcaacattataatagaaagaggacacaagagaaagaagggggagctatagccataaggagaaaaactttcaaagaagtgaaagcaaaaaagagttgttcttttcctttctgctgataagctgtgtgagtgagttcattgacaagcctgaaatgacaactatgctgacaaatgagcatggtctgagtttgaacctcaaggagactgagctttgcctcggtttgcctggcgggggctctgaagtggaaactccaagggccactgggaagagagggttctctgagaccgttgatctgaagcttaatcttcagaccaaggaagatctgaatgagaatctgaagaatgtctcaaaggagaagactctccttaaagatcctgctaagccgccggctaaggctcaagtggttggttggccaccagtgagatcatacaggaagaacatgatggcagtacagaaggttagcaatgaggaagtagctgagaagacaacaagcagcactattgctaattctggggcgtttgtcaaggtttccatggatggagcaccttaccttcgcaaggtggacctcacaatgtacaaaagctacaaagacttatctgatgccttggccaaaatgttcagctccttcaccatgggtaactatggggcccaaggaatgatagacttcatgaatgagagcaagttgatggatcttcttaacagctctgagtatgtgccaacctatgaagataaggatggtgactggatgctcgtgggtgatgtcccatgggagatgtttgttgggtcatgcaagcgcctgcgaataatgaagggatcagaagcgattggccttgcgccaagagcaatggaaaaatgcaaaagcagaagctgaagctggcctaatacaatgttctatgagagatcccgtaccaaagtggacctataaaagaaattatatgaagcacttcagcgagactatggagcggagtgttgttagtttgaatgtgtctggtgttttttgttttgttcgtatatagattattcaacttttaattttaaggagccgatcgatggggcatttgtaatggacaagaagcaataaacttaacctatatagtctggcttgtttattaaaaaaaaaaaaaaaaaatccctcgtgc

SEQ ID NO: 7484 - DNA, 2369 bp, Glycine max
ccacgcgtccggtgtacttgaagggtttcactgaagggacgatgattgtgggggtatttgctgggagaagagttcaggaagctaagcccttgattaggaacaagcttttagaaacaggccaggctattatctacagtgaaccagagaaacgggtgatgtcaagatctggcgatgagtgtgtggtagccctcacagatcagtggtacattacatatggagaatcagaatggaagaagctagctgacgagtgcctttctaacatgaacctgtattctgatgagacacgacatggatttgagcacactttaagctggttgaaccagtgggcttgctcacgatcatttggtcttgggactcgcataccgtgggatgaacagttcctagttgagtctttatcggattccaccatttacatggcgtattacactgttgcacaccatttgcagagtggtgacatgtatggatccggcgagtctgccatcaaacctcatcaactgactgatgatgtctgggattatattttctgtggtggaccatatccgaagtcaaccgatatatcatcatcccttttagaaagaatgaagcaggagtttgaatattggtatccctttgatcttcgagtttctggtaaggatctcatccagaatcatcttaccttctgcatttacaaccatactgcaattatggccaagcatcactggcctcgcgggtttagatgcaacggacacattatgctcaattctgagaaaatgtccaagtccactggaaatttcaggacgttgcgtcaggcaattgaggagttttcagctgatgctactcggttctctttggctgatgctggtgatggtgttgatgatgcaaattttgtctttgagactgcaaatgctgcaattctccggctcaccaaagagattgcatggtatgaagataatctggcagcagaatcttccatgagaactggcccaccatctacatatgcagatcgcgtgtttgccaatgagattaacattgctgtccagacaactgagcaaaattacaccaactacatgtttcgagaagctctcaagactggcttttatgatcttcaggctgctagggatgagtatagattctcatgtggggctggaggttgcaatcgtgacttggtgtggcgttttatggatgtgcagacacgtcttatagcacccatctgcccacattatgcagaatttatttggagagagcttttgaagaaggatggttttgtggtaaatgcaggctggccgacagctgatgctcctgatctcacactgaagagtgccaataaatatttgcaggactcaattgttttgatgaggaagttgcttcagaagcaactttcaggctcaaagaaaggtaataagaaaggtcctccagctgcatcactgacagatagcaaggtgacaggcttgatatatgtaaatgaacagtttgatagttgggaagccgagtgcctgagtattcttcagaaaaaatttagcagagatactcgaacttttgctccagagtctgagatattgcaggctttacaacagagttctgtaggtcaatcttctaattttaaacaagtccaaaaacgttgtatgcctttcttgaggtttaagaaagaggaagcaattgcacttggggctcaagccctggatttgagattgccatttggtgaaattgaggttcttaaggaaaacttggaattgatcaagagacagataggtctagaagatgtggaaattttatctgcagcagatgctgattccttggctagagctggaccactagcttctttactaaatcaaaatcctccatctcctggaaagccaactgctatctttgtaactctgtagctactgggtgagtttctggaaacttttcttcttaacctagttcacaattcctacttaattttttggttatctaaacacgaatgtaatttatttttatttgataaatttttatttgttatatatgtagacatggatgagttactgaaccttagtgttgttaaatttttttttggcttgatttgaggtttaaatattttttctatattgtccctcttatgacggaagttgatccatgtagccgaccccacctagtgggataaggcgttgttgttgttgttgttgttgtccctcttgtttgtttcatgggtcataccctcatccggttgagtaaattaacttggaaacatctattcatgatgtatgcacacaagaagtccctcttttagtatgtagcctgctagagacgatttggcagcaatttagaaagtcggcattctcgttatagctgaaaatataattgcttcactgatattgcattagtttcctgtttgagaaattttaaggaaagtg

SEQ ID NO: 7485 - DNA, 2797 bp, Glycine max
ggctcgagctgctacaagcttagcagaactggagaaaatttttgaaattgcaattgggggatcagaagatgaaaagatatctgctgctgccattctttgcggggcatccctaattcgtggatggaatatacaggaacacactgtacatttcattctgaggttgttatctccaccagttcctgcagaaaacactgaaggaaacaactatttgattaattatgctccaatactgaatgtactctttgttggaattgcatctgttgattgtgttcaaatattttcgctccatggcttggttccacagcttgcatgttcatcgcttccgatcggtgaagtttttgggtcatgtgtaccgaatatctcatggacactaacatcaggggaagaaatatctgcccatgctgtgttttcaaatgcatttattcttcttttaaagctatggagatttaaccgacctcctcttgaatatggaattggagatgtacccactgttggttctcaattaactcccgaatacttactattagtacgtaattcccacttaatgtcagctggtaacatccacaaagatcgcaacaggaggagactctcagaaatagcaagtttatcatcgcctaattctgtatttgttgactcctttccaaaattaaaagtgtggtatcggcagcatcaagcatgtatagcttcaacactctctggtcttgtccatggaaccccatttcatcagattgttgaggggcttcttaacatgatgttcagaaagattaatagaggaagccagactactattacatctggaagcagtagctcttctggacctgcaaatgaagatgcctctataggtccaaagttgcctgcttgggatattcttgaagccattccctttgtggttgatgctgctcttacagcctgtgctcatggaagactgtctccacgtgagttggcaacagggcttaaagatttagctgattttcttcctgcatctctggcaaccataataagttacttctctgctgaagtaactagaggagtttggaaacctgtatttatgaatggaacagattggcctagccccgctgcgaatctactgaacgttgagggacagatcaggaaaattttggctgcgactggtgtagatgtgcctagccttgcttcaggagacagctggcccccggggcttccattacccttggctgccttcacaagccttaccataacctacaaagttgataagacatcagagcgttttcttaatttggctggccaaacattggagagccttgctgcaggttgtccatggccttgcatgccaattgtagcttccttgtggaccctaaaggcaaaacgttggagtgacttcctcggctcctctgagaagataaggaagtcactccacaacagtgatgcagtagttcaacttataaaaagctgcttcacggctacccttggcatgaatagctctcctatctcaagcagtggtggtgttggagcccttcttggacaaggatttaagtatcatttatgtggagggctttgccctgttgctccaggaattctctatttacgtgcgtatcggtcaatcagagatattgttttcttgacagaagaaattgtttccatcttgatgcactctgtgagggaaatagtatgcagtggcctgccaagggagcgattggaaaagttgaaagcaaccaaagacggcataaaatatggacaggcttcacttgctgcatcaatgactcgggtgaagcttgccgctgccctcggggcctctttagtatggatatcaggaggcttgatgctggttcaattattaataaaagaaactttgccatcctggtttatatctgttcagagattagaccaagaagaaaagtctggtggaatggttgcaatgcttggtggatatgcacttgcttactttgcagttctttgtggtgcttttgcttggggggttgattcatcatcatcagcttcaaagcgacgtccgaaggttttaggtacccacatggagtttctggcaagtgcacttgatggtaagatatcactaggatgtgattcagctacttggcgtgcctatgtgtcaggttttgtgagcttgatggtaggttgcacacctaactgggtgctggaagttgatgtgcacgtgttgaagagactgagcaatgggttgaggcagttgaacgaagaggagcttgctcttgctttgttgggtgttggtggagtaggtacaatggatgctgcagctgagctcatcatagacactgaaatataaacattttcactattctgagggcacctttgccttttaggatgagttgtacattagttaattttcatgtttataaagttgtgcagcatgttgaattaacagttttgttaaaagtaccacgtattagaatggaaaattttgtatctataacgttcatctaatgttagtaacttggtatatccatccccaaatcgatgcatgtcctctgttttatggtgtgtcagtacaagttatttcattcttataactttttttattatatgttttacaattattatttttttatctctattacattacttattttattttatatttctttcttttctctttctatgttttttcaagttattgaaacaggaataggaataaaattgtgtaataggtgggcaaatgataaaaaaaatattccataataattgtaaaatgtctattaaaaagggtcatcaattccttttagatgggtcttattttaagaaacaagagtttttccttactttaaacatttattactttacattaagc

SEQ ID NO: 7486 - DNA, 1762 bp, Glycine max
  misc_feature (1734)..(1734): n is a, c, g, or t
  misc_feature (1736)..(1736): n is a, c, g, or t
ctcgagccgctcgagccgggaagaactaacaagaggcgtaagcgtaaacttgtccgaagaataacaccgggaaagaaagagagtgaagaagggtataagcgtccttgtgaaggcactagggtgttctgaactgatcctctccctgggtctggcactgtaaaattcaacgtcaaccccataatatactttgaagaaacgcttccatcttctctctatttgtttcaacttcagttatgcgtttctctctctagccagccatcatcactatgtcatccccaaactccgtccctcagtcccacgcgccgctccttctcccgcgccccgatgccgccgcccgcctccccatcctagcgctcctcctcggccgccgcggccactccgccgtggtccgggagacggcggcgcgtgagctggaggagcgccgcgccgactggacctactcgaagccggtggtggcgctcgacatgacgtggaacatggcattcgtgctggtctcggcggtgatgctcgcctgcaccgtcaaggagaaccccaacacgccgatccgctggtggatctgcggctacgcgctgcagtgcctcgtccacgtggccctcgtgtggctcgagtaccgcaggaggaacgacgctcccagggacgaggaatctgctgccagcctccaatacgacgacgtcaacgatagcgacgaggacgatgttggaacctccgggagttcctcttcctccggattcacaaaacgatgtgcgtcattgaataccatgatttcattactttggtggatggtgggcttttattgggttgtctctggtggtgatattctgctgcaagatgctccacgtttatactggttgtctgttgtctttttggcatttgatgtcttctttgctatcttttgtgttgttttggcatgcttgattggaattgccctctgttgttgtttgccctgtattattgctattctctatgctgttgcaggacaggagggtgcatcagaatcagatctcagtatacttccaaaatacagatttcaattgttaagcaatgaggaaacacctggtgagggaggaggatcaatgattcctatggagaccagcaacggttattcggtgaatgaacgaacactttcaccagaggatgcagaatgctgtatatgcatctcttcttatgaggatggagctgaacttcatgttcttccttgtaaccatcatttccattctacatgcatagtgaaatggttaaagatgaatgcaacttgtcctctttgcaagtataatattctcaagggaaatgaacaggtgtgacaatactaaaggcgatcaaagatatataatatcaagctgagttttattatataacagctcagggttttcaaccgctgatgcgtatatgtagataatatcaagacatgaaaaaatagaacgtctcccaatttgctcggtttagctgtcattgttttgttgcttaattgcttcagtagagaaaaaggtagaggtaagaaggaaaggtgccgtatagagatcttttaaataagttaacgatttcatttgatccttatttctcctttattagtcatttgaaaatcgtcatatttcttgtatcaaatttgtttatatgggagaaaacaatggaaagtgtggcagtctaactttcagcttattccaggagtgtattttatggttctttgtttgtttgttttggtagaaacaaagataattgctttatttttgcttggtnancatgagaaccttccctccctttgttc

SEQ ID NO: 7487 - DNA, 2087 bp, Glycine max
ttccggtccggattcccgcgtcgacccccgcgtccgcaagtttcgaaattgaaaagggtgggagagatacaaagtgttcattgatttaaacccttgctagaacccttggtaaagcaagcaaataagggctcaatgaacaacaactggctttcgttccctctttctcctactcattcttccttaccagctcatgatcttcaagcaactcaatatcatcaattttcccttgggttagtgaacgagaacatggataaccctttccaaaatcatgattggaatctgattaacacccatagtagcaacgaaattccaaaagtggctgattttctaggagtgagcaagtctgaaaatcagtcagaccttgcagccttaaacgaaattcattcaaatgattcagattatctgttcacaaacaacagtctggtgcctatgcaaaaccctgtgttggacacacctagcaatgagtatcaagaaaatgctaatagtaatttgcaatcattgacattatccatgggaagtggtaaggattcaacatgtgaaaccagtggtgaaaatagcacaaacactactgttgaagttgcacctagaagaactttggatacattcgggcagagaacatccatatatcgtggagtaactcgacatagatggactggaaggtatgaagctcatctttgggataatagctgtagaagggaaggccaatcaagaaaaggacgccaagtttatttgggtggatatgataaagaagagaaagcagctagggcttatgatttagctgcactgaagtactgggggacatccaccactaccaactttccaattagtaactatgagaaggaattggatgaaatgaaacacatgacgcgacaagaatttgttgctgccattagaaggaaaagcagtggtttctccaggggtgcatcaatgtatcgtggagttacaaggcatcaccaacacggaagatggcaagcaagaattggcagagttgcaggaaacaaagatctttacttgggaactttcagtactgaagaagaggctgctgaagcatacgacatagctgcgataaagttcagaggtctcaacgctgtcacaaactttgacatgagccgctacgacgtgaaagccatccttgaaagcaacactctcccaataggaggaggagctgcaaagcgtctgaaagaagctcaagctctagaatcttcgagaaagcgcgaagagatgattgcactaggatcatccacattccaatatggaaccacaagctctaattctaggctacatgcttaccctctaatgcagcaccaccaccagtttgaacaacctcaacctctgctaactttgcaaaaccatgatatcagttctcacttctctcaccagcaagaccctttgcatcagggttacatccaaacgcagcttcagttgcaccagcagcagagtggtggttcttcttcttatagctttcagaataataatataaataatgctcagttctataatggttataatcttcagaaccaccctgcattgcttcagggaatgattaacatggggtcttcatcttcttcatctgtgttggagaataataatagtaacaataataatgttggtgggtttgtgggaagtgggtttggtatggcttctaatgcaacgtcggggaacacggtggggacggcggaggagctagggctggtgaaggtggactatgacatgccgactggtggttacggtggatggtcggcggcggcggcggcggagtccatgcagacgtcgaatagtggggtgttcacaatgtggaatgactgagggaagggaagctagttctagtaatgtatggcacaacgtacgagttagttaccatacaattttgttatgcttttttctttttttttgtttttgggttttttaatattctcgcaattggaaaagaaaataggtgctgattttctgtgactaaggaagtgagcaaagaccatatatctatttatatttatgtctcttgttatggcgaatgtttgtgagacttttgcttgatttaggtaaactaatcaaacactgacttatatgtactaatgttttatttgttt

SEQ ID NO: 7488 - DNA, 1020 bp, Glycine max
aggctgcagaagcatacgacctcgcggccgtaaagttcagaggtctcaacgctgtcacaaactttgacatgagccgctacgacgtgaaagccattcttgaaagcaacactctcccaataggaggaggcgctgcaaagcgtctgaaagaagctcaagctctagaatcttcgagaaaacgcgaagagatgattgcactaggctcatcttccacgttccaatacggaacctcagcaagctcttctaggcttcacgcttaccctctaatgcagcaccaccaccagttcgagcaacctcaacctctgctaactcttcaaaaccacgacataagttcttctcacttctctcaccagcaagaccctttgcatcatcagggttacatccaaacgcagcttcagttgcaccagcagagtggcgcttcttcttatagctttcagaataatgctcagttctacaatggttaccttcagaaccaccctgcattgcttcagggaatgatgaacatggggtcttcttcttcttcctcatctgtgttggagaataataatagtaccaataataataataatgttggtgggtttgtgggaagtgggtttggtatggcttcgaatgcaacggcggggaacacggtggggacagcggaggagttagggctggtgaaggtggactatgacatgccggctggaggttacggtggctggtcggcggcggactccatgcagacgtcaaatggtggggtgttcacaatgtggaatgattaaggaagggaagctagttctagtatgggacaacgtactagttagttgccatacaattttgttatgcatttttatttttttgtctttgggtttttaatattctcgcaattggaaaagaaaaataggtgctgattttctgtgagacattgatcccaaaggaagtgagaaaagcccatatatctattatatatttatgtctctcttattatgccgaatgtttgtgaaacttttggttgaattaagtgttgattaattgattcatgct

SEQ ID NO: 7489 - DNA, 1111 bp, Glycine max
tcccgcctcgacccacgcgtccgcaagttttggaagttcaaaagggtgggagagatacaaagtgttcattgatttaaacccttgctagaaccctaattggtggtttttgatttggtgaaaggtaaagcaagcaaataagggctcaatgaacaacaactggctttcgttccctctttctcctactcattcttccttaccagctcatgatcttcaagcaactcaatatcatcaattttctcttgggttagtgaacgagaacatggaaaaccctttccaaaatcatgattggagtcttattaacactcatagtagcagcgaagttccaaaagttgctgattttcttggagtgagcaagtctgaaaatgagtcagaccttgctgccagcttgaacgaaattcagtcaaatgattcagattatctattcacaaacaacagtctggtgcctatgcaaaaccctgcggtggacacacctagcaatgagtatcaagaaaatgctaatagtagtttgcaatcattgacattgtccatgggaagtggtaaggattcaacatgcgaaaccagtggtgataatagcacaaacactactactactactactgttgaagctgcacctagaagaacattggatacattcgggcagagaacatccatatatcgtggagtaacgcgacatagatggactggaaggtatgaagctcacctttgggataatagctgtagaagggaagggcaatcaagaaaaggacgccaagtttatttgggtggatatgataaagaagaaaaagcagctaggtcttatgatttagctgcactgaagtactgggggacatccaccactaccaactttccaattagtaactatgagaaggaattggatgaaatgaaacacatgacgcgacaagaatttgttgctgccattagaaggaaaagcagtggtttctccaggggtgcatcaatgtatcgtggagttacaaggcatcaccaacacggaagatggcaagcaagaattggcagagttgcaggaaacaaagatctttacttgggaactttcagtactgaagaagaggctgctgaagcatacgacatagctgcgataaagttcagaggtctc

SEQ ID NO: 7490 - DNA, 1270 bp, Glycine max
gtttttcggctctttcttccccttttgtctgaacaagcaagttttcctcataggctcgcaatcggaaaccctaaccctaaccaattgcgataatctttccccaaaatggcaattgcacgcactggagtctacgtcgacgactatttggagtacgcgagcacattacccgctgaacttcagagactgctcaacactgtccgggaacttgatgatcgatcccaatctatgataacgcagaccaggcagcagacgaagtacactatggggttctcatcacatggctccaagaagggtaatcacagttataataacaattatgggaatgaggacgatgatgcagctattgagaaaatgcggaaagaaatcgaggtgaatcaggatagtgcattgagtctttgtactgagaaggttttgttggcaagacaagcatatgacttgatagatagccatataaaacgacttgatgaggatttaaacaactttgccgaagatttaaagcaagagggtaaaatagcaccagatgaaccagcaattctgcccccgttgcctatagtccctaaacctgaaaagcgtaaacccatatatgtaactcctcaatcaaagagaattgattacagggatagagattgggatagggagcgtgatagggactttgagctgatgcctccaccaggaagtcataaaaaggagtatgctaccccgatggatgttgaccaacccattgatccaaatgaaccgacatactgtgtttgtcatcaggtatcttttggagatatgattgcttgtgacaatgaaaattgccaaggaggtgaatggttccactattcgtgcgttgggctaacgcaagagacaaggttcaagggaaagtggtactgtccgacttgcatattactcccacaatgtcaacgatgaatctttgcacgaactaaattacattcataaatgaccactgtttcaatagaattgtcactttttagtgaattatttgtcttctatatcgcttggtcatttgtgcttggcaaagaggccaagtgggctctatcaggcctcatgtataaagtcctctaagatttgagagaagtgatttcagatatgaattttggagaaagttaattacatgtgaaatgcagaagtataggcgcgtgtggttgtataagaatggagatatttgtttggaaacctctttcaaggtgagagagggagaccagagaaaaaaattaacctaaattttttaattcaaaatcaattttgcaaaaaaaaaaaaaaaaaa

SEQ ID NO: 7491 - DNA, 908 bp, Glycine max
tcggccccgcgacccacgcggggaccctcatccttgttctttccattgatttcttgcttctatatattacttgcttcttttcttgatcatgtcccttgctggtaaaatcagctctgaaattggtgttcaggcaaccgctgcaaagtggttcaacctcttcacaacacaacttcatcacgttcaaaatcttactgatagaattcatggaaccgagctgcatcatggtgaagactggcatcacaatgagtcggtcaagcactggacttataccatagatggcaaggttacaacttgcaaggagagtattgaatccgttgatgaagagaacaaaacaatcaactacaagctcttcgatggagacattgataatcagtttaaggtctttaagctcatctttcaagcgattgataaggaaaatgacagtgctattatcaaatggacaattgaatatgagaggattggtgaggaagttgatcctccatatggctacattgaatacgtccacaaatgcactaaagatattgatgctcatcttctcaaggcataactccaaataaacaatataattaaaaagaaataatggactttgccttattatctttataatcgagaaggatatgcttgctaagtccttcgattgtatgaaataaatttggatatgcgtgtcggtgatgtcaactgaagtgtgttgaattatatgttaaagagctccatgtgatgctgatgcatataaatgaatatttccactttaagaaatatatatttttatgttgtgttttaaaaaaaaaaaaaaaatttcaattaagtttgattcaccaaatcttcaccagctcgtggaaacgcattaacgacacgttcaggaatttattgtatgttaaaggggtccatgtgatgcatataaatgaata

SEQ ID NO: 7492 - DNA, 880 bp, Glycine max
tcgagtcagctacgtaggccccccccccatctctcatccttgttaattagtttgttccatttcttgcttcttaatttcttgatcatgtcacttgctggtaaaatcagcattgaaattggggtgcatgcaagcgctgcaaagtggttcaacctctttgcaacgcaactccatcatgttcaaaaccttaccgaaagagtgcatgaaaccaagctacatcatggtgatgactggcatcacaacgaatcgatcaaacactggacttgtaccatagatggtaaggttacaacatatcacgagagtattgaatccgttgatgaacctaacaaaacaatcacttacaagatcttcggtgaagatatcgatcaccagtataaggtctttaaggtcatctttcaagcaattcataaggatcatgggggtgcattcatcaaatggactattgaatatgaaagggttggtgaggaagttgatcttccatttggcttcatcgaatacctcaacaaagggagtagagatgttgatggtcatcttctcaaggcatagctccaaaagttatgtagaaattaaataaaaaaaataaagaaataatgggctgggcttgaggataaagtgcttatatttactatcggtgtgatgtttgacgagaaggatgcttatgtgttgatcctttcttttgtgtggaataaacatggatatgtctgtccgtgatgtccttgaagtatgttaaattataccttaaagtgctcaatgtgaagcgtataaatgaatatttatgcttattgtacataaaaaaaaaaaaaaaaaattaaaaaaaaaaaaaaaaaaaaaaaaaaaaaaaaaaaaaaaaaaaaaaaaaaaaaaaaaaaaaaaaaaaaaaaaa

SEQ ID NO: 7493 - DNA, 944 bp, Glycine max
  misc_feature (11)..(11): n is a, c, g, or t
  misc_feature (20)..(20): n is a, c, g, or t
tcgagtagctncgtaggccnccccccccatccgaaacagacacacagaaagaaagaagaaaatggcgatgttagcttcaccatctgtgaaactctcgctcccattccctctttcttcttccaaacccaaccctcgcaggcccttcaccatccgagccaccgagcccgaaaccccactctccggttcggacccatcccagcccgaaccggacccttccgacgacgccttcgacgaccgcatcaaccagctccgcctccggtaccgcagcggcaccggtaagaaggcggagctccgaaagaacaaaaaatcaaagaaaggaacctccggatccgggtcgggcatgtacctgccgccggtgccgctgaaggaaccggtttccggcggcgtgaaggtggagctcgggttcagccagtacagcgagcgattgaacggtcgcattgcgattctcggtctggcggcgctggtgctggtggagctcgcgacggggaagggtgtcattaactaccacacgccggctattattctgattcagatctatttcgtggctgcggttggagctgtctttgttaagtatgagaaggagaagatcagcgtttggccccaaactgaatcttcaactaacaaataaagaaatgactttcaactaccagttattgcttgtggagctgaacgtgcttctatctttggctaatatattgtaaattattactgttgaaaggaatgttgctttttgggtatgatatgatactactcatacttgtttgagattgagagggtgcgcttgttttagcatttcaatccgttggcacgtgttctgatgtactattttgtgagaagcaagaaattgttatttctccttcaaaaaaaaaaaaaaaagaaaaacaaacacactaagaaattgaaaaaaaaacaaaaaaaaaaaaaaaaaaacaaaaaaaacaagg

SEQ ID NO: 7494 - DNA, 892 bp, Glycine max
cccacgcgtccgtacggctgcgagaagacgacagaaggggagggtgaccagtgaacacaatacagggcagcatcgccatgggattgagtattctgagaagcacttccatttccactcctatctcttcctccaaatccaaacccattttctcaactcttgttcgttcatctttcgcctccatttcccccacaaagtgtgttactcccaccactcttttcgtttctgccacccccttcttcaccgcctcacccaagcgcggctttcgtggtgggattgtggccatggccgccgctggctcgctccgcaaatcagaggaagagtggcgcgcagttctctcccctgaacagtttcgtattctcaggcaaaagggcaccgagttccctggaacaggagagtatgacaagttctttgatgagggagtttacaactgtgctggttgtgggacacctctctacaggtccttaacaaaattcaattctggttgtggctggccagccttctatgaggggattcctggagccataaatcgcaatccggaccctgatgggatgaggacagaaataacgtgtgctgcttgtgggggacatctaggtcacgtctttaaaggagaaggatttccaacgcccactaacgaacgccattgtgtcaatagcatttcactgaaatttgcgccagccaattcttaataaaaattgagtctgctgttcggacgtgactgcttaagtacccaacattagtaaaaaaaaattatgcaatgtacttatattatgaatgaagttcatataatgatggctaaataccaattttaattaaagagttatgttgatgatttatgttcccttctaaaaaaaaaaaaaaaaaaaaaaaaaaaaaaaaaaaaaaaattaaaaaa

SEQ ID NO: 7495 - DNA, 911 bp, Glycine max
aatgtaaaaggtgagggtgacccgtgattcgtgaacacaaacaccatcgccatgggcttcaatattctgagaaccacttccatctccactcctatctcttcctccaaatccaaacccattttctcaactcttcttcgttcttctccttccaccattttccccccaaagtccgttactcccaccactcttttcgtttctgccacccccttcttcactctccatcccaagcttggttttcgtggtgggattgtggccatggccgcacctggctctctccgcaaatccgaggaagagtggcgcgcaattctctcccctgaacagtttcggatcctcaggcaaaagggcaccgagttccctggaacaggagagtatgacaagttctatgaagagggagtttacaactgtgctggttgtgggactccactctacaggtccataacaaaattcaattctggttgtggctggccagccttctatgaggggattcccggagccataaatcgcaatccggatcctgatgggatgaggacagaaataacgtgtgctgcttgtgggggacatctaggtcacgtctttaaaggagaaggatttccaacacccactaacgaacgccattgtgtcaatagcatttcgctgaaatttgcgccagccaattcttattcttaataaaattgagtctgctgtttggacgtgactacttaagtacccaacatcggtaaaaaaattatgcaatgtacttatattatgaatgaagttaaaaaaaaaatgatggctaaataacaatgttgataatttgtacctttattcctctgttccctttttcacttggtgctagatctactatgttcatttgtgcttgtgttcgtacttgggtttatatatgtgatatgtccaagtagattaaaggtgat

SEQ ID NO: 7496 - DNA, 1678 bp, Glycine max
atgaaaaataaaatcacattaaataattactgctgcagttgcacaatctgccatggataccatcataaccaaaggaaaatcttcgaataaaccactagttgttgctggctgtgtccctcaaggaagtcgagatttgaaagagctccaagggatcagcatagttggagtccagcaaatccatcgtgttgttgaaattgtagaggagactctaaaaggtcatgaagtgcgccttttgacccgtaagaaattgcccacacttgaccttccaaaggtaaggaagaacaagtttgttgagattcttcctattaatgttggttgtttaggtgcttgcacttattgcaagacaaagcatgctcggggtcacctaggaagttacacaattgatagccttgttaggcgtgtaaaatctgtcatatctgaaggggtttaagagatatggcttagcagtgaggacactggagcatctggtcgtgacattggtgtcaatcctccaactttattgaatgccttagtagcagaactaccagctgatgcaagcacaatgttgcgtatcggaatgaccaatccaccatatatccttgaacacttgaaatagattgcagagattttgcggcatccatgtgtttactcttttctgcatgtaccagttcaatctggaagtgatactattttgagtgcaatgaatcgagaatatactgtgagtgagttcaggactgttgtagatactctaactgagcttgtgccagagatgcagattgccactgatataatatgcagatttcctggtgaaactgatgaagattttgtgcaaactgtcaaccttattgaagagtacaagttccctcaagttcacatttcacaattttatcctcgaccagggacacctgctgcaaggatgaaaaaggttccaagtaatgtggttaagagaagaagccgtgaactgacatgtctttgaatccttcacaccatactctgggatggaaggcaaagtagaaagaatttggattactgatattgcatctgatggagttcacttggttggtcatacaaaaggatatatacaagttcttgtacttgctccagacaatatgctgggaacttcagctgtggttaagataacatctgtgggaaggtggtcagtttttggggaaatatttgagacaatcaaccatgcaagtgacaataaagctctaaacaaattggttcctaatcaggatttgtcttctctctgcggtggattttcagaagagcaagaatcttgtgcctgtggaaatgacatctgttgtggtcaggagggtactctcgaaaagagtgacaattcaagaggcagtcagaaccaaagcaaaagaaatttcattggatggatgctgaggaagcgggggcatctgcacaaaacggttgagagtgagcttgcctcaggatctgttaaaaagcaagaaggaagcatgaggaagtgggacttggttgataaggttcttttgggtggaatatctatcagcatcttgacgattatggctctagtagtagctgttatgtttcgagttatttggtcccaataaagattttcattttttccgaatcaatatgttgttccaaaattttgacttgtacaaattgctcagattttataaaatgttttgacatgttatcgataccgtcgacctcgagggggggcccg

SEQ ID NO: 7497 - DNA, 862 bp, Glycine max
tacggctgcgagaagacgacagaagggggaggcatttgaaaaagaaaagccttccatagcctcccaaaaaatgaagagcactaccttgttcgctctctttctactttgtgccctcacttcatcatacctaccttcagccaccgctgatgtggtgctggacatggatggtaatcctcttggaaacggttggcaaaatgaatatttcatgttgccagttacaagaggaagcggtggtggaatagcactagctgcaactggaaatgaaagatgccctgtaactgtcgtgcaatctcacattgagcgcgataaggggtatgcggcaacttttagagctccattccacctcccttttatcgcagaaggccttcctttgacgatttcattcgataactttgaagtgttaccgcggtgtgtccccactcctctttggtgggctattgtggatggtctagctgaaggacccgctgttaaaattgagtatagagatatagtagaaggttggtttaaaattcagaaagcttaccctctcggctataagcttttgttctgtccagtgcctcttgaggatagcacatgtggggatattgggatttatactgatgataagggattcaggcgtttggtggtgactaagaacaaaccattggtggttcagtttcagaaatttgatccactggccaagaataatcttgtgcttcctgccagtgagtgagagacaattagtgcatgactaaatcaatgctttggttgtaattaataaattattttctcactaaataatataatcaaagcttattatccttcatttgcgaaaaaaaaaaaaaaaaaaggcggggggtgatatagacatttttatttatta

SEQ ID NO: 7498 - DNA, 828 bp, Glycine max
cccacgcgtccgctaatcagaaaaaaaaaaccctagtaatgccgccgatggggaggaggcgaaaggtagcacccaaatcttctctatccaccgagccacctctcaagcagcaacaaccaaaacccgaaaatccccctcaagaatacgaagaagtcgaagaggaagttgaggaagaagaggtagaggaagaggtcgaagaggaagttgaaaagtaagaggagagaaagatggagaagcaacaacaacaagcaccatctaaggaaacaaaggcacagagtgatgaatcagttaaagaaagcagcactgaagggcttccaatggaggatagtccctatgtgaaatacaaggatttggaggattataagcgtcagggttatggtacacaaggtcatcaagaaccaaagacaggtcgtggagctggagccactgaagcacccactctctctggtgctgcagtttcatctgatgcacaagtcgctgccactgatgccattaacagtaaaggagtcccttaattattcacacttcctagaatagatcgttcctttgctaataagaaatcgttttcttaatttggggtggcgttttttaaatgtgtgaacatctcagtaatttgtattattattacttacacgtttgaagtttgcatttagcatattgtactacttttaatttctatacaacacgttttggatgttgtcatattgtactactttttctatacaacacgttttggatgttgtcatgttttggtaagattatctcaggataggattctcttgtattttgtgatatataccatggatggaaatgatccctttttcttta

SEQ ID NO: 7499 - DNA, 1541 bp, Glycine max
  misc_feature (6)..(7): n is a, c, g, or t
aaagcnnggagttggggtcgagcagatcttgaagcaagcaaatatcagatggctgagtacaggatctctgtttatggaagaaaacagagtgagtggggtcagctggctagttggtttgttaacaatgctctttatagtaagaatgccgtatggctaatccagttaccacggttatacaatgtgtacaagaatatgggaattgttacctcctttcagaatattctagataatgtgtttattcctctatttgaagtcacagtggatccaaattctcatcctcaattacatttgtttttgaagcaggtggtgggatttgatcttgtagatgatgaaagtaaaccagaaaggcgtccaactaagcacatgcctactccagctgagtggacaaatgaatttaatccagcatactcttattacctttattactgctatgcaaacttgtatacactcaacaagctgcgtgaatctaaaggaatgaccacaataaagttgcggcctcattgtggagaggcaggtgatagtgatcatttggctgctgccttcctcctatgccataacatttctcatgggattaatttgcgtaaaactccagttttgcagtacttgtattatcttgcacaggtcggattagctatgtcaccacttagcaacaattcccttttcttggactataaacgcaatccattaccaatgtttttccagcgaggtctaaatgtctctctctctactgatgatcctttgcaaattcatttgacaaaagagccactgctcgaagaatatagtgttccagcaaaggtatggaagcttctctgcctgcgacctatgtgagatagctagaaattctgtgtaccaatctggattttcacaccaagcaaagtcacactggcttggggataaatatttgttaagaggttctgaaggaaatgatattcacaagacaaatgttcccaatttgaggatttctttccgatacgagacatggaaagaggaaatgcaatttatttacgctggtcaagctgtctttcttgaagatgtagacccatgaagcaagcctagtcaaattcaccattcaccctgtgataaccctaacgttggtactgtactgaatgttcttttgagcagcagcagcagctttgacagtgagaagttattgtaaccttgaagataaccctcggttatatattaacataatcacaaactccaaaatgacatgctaccttaacactcttggttactattagtatttgcaccatataataaattatgtaggaaagcgctggcatttgtaatcgtctttttaggtggtaggaactagggacacttgtgctagccttgttatttattagaagtaattagcagttagtataatacaatttgctcttcatgaatatacagaatggaatatcatcttgaaactatatttaatttgtgtcaatttgatgctaaaggaagcagccactctgctgttcattattgttattttcattagggaagcaaacgagtttgcataaaatatatttagttgacagaccccgttagtt

SEQ ID NO: 7500 - DNA, 544 bp, Glycine max
  misc_feature (516)..(516): n is a, c, g, or t
gaagagatcgagagaaagaaagggaccaaagaagagaggaagggaagatgagcaacgcagctagcgcaacccccctcctcgccccctacaagatggggaaatttgatctttcccacagggtggttcttgcgccgctcacaagggagcggtcgttcggaaacgttcctcagccgcatgccgtactgtattatcagcagagagcaaccaaaggaggccttctgattgctgaggccactggagtttcagacactgctcaggggtacaaggacactcctggcatctggaccaagaagcaggtagaagcatggaagccgatcgtcgatggggttcatgccaaaggaggaatatttttctgtcagatttggcatgtaggaagagtctccaatcatgcttttcagcctaatgggcaggctccaatttcaagcaccgataagccaatcaaacctgcaacgagagccgatggcattggattggccaaagtctcaacccctaggcgactagcgactgatgaaatcncgttggtcatcgatgatttcagggtcgc

SEQ ID NO: 7501 - DNA, 1258 bp, Glycine max
  misc_feature (1258)..(1258): n is a, c, g, or t
ccacgcgtccgcatgtactaaggaaatctttgaaaaatactacacgacaataccgtgttattaacagattatagatttagttagcagcagagcagaagaaaaagaagaaggtgattgttgttcggtggtttgcaaggatggggaacacgttctgcttcttctgtggttgcgttgctcaatccagcgtcggcgtggtcgagcagtggggtcgcttccaccgcctcgcccaaccgggcttccactttttcaaccctctcgccggcgaatgcctctccggtatcctctccaccaggatctcctccctcgacgtccgcatcgaaaccaaaaccaaggacaatgtttttgtgcagttgctgtgttcgattcaataccgagtgattaaggaaaacgctgatgatgctttctatgagttgcaaaaccctcaggagcagatccaggcttatgtttttgatgtgactcgtgctattgttcctagaatgaacttggacgagctgtttgagcagaagggtgaggttgccaaagctgtcttggaggaacttgaaaaggtgatgggagaatatggatatagtatagagcacatactcatggttgatattatacctgatcctgctgtgcgtaaggcaatgaatgagatcaatgccgctcaaaggatgcaacttgctagtgagtacaaaggagaagctgaaaaggtgttgctagttaaaaaagcagaggctgaagctgaagccaagtatttgggtggggttggtgtagccaggcagcggcaagctataacagatggtttgagagagaacatcctcaatttctctcacaaggtagaaggcactaatgctaaggaggtgatggatcttatcatgattactcagtactttgacacaatcaaagaccttgggaactcatcaaagaataccactgtttttataccccatggtcctggccacgttagggatattggtgagcagatacgcaatggactgatggaagcagccagtgctcaagtaaatgtagaggagtgattttgtaatattgccttagaaaatagaaggtatatctctctatctgtcacacacacacacaatgatattatagtattattattacttgtgtatgtagtatgtttctgctaaattttgtggaagaaaagttttgttcagttggaagttgtaaaataagatgtttttcagtcgtattaaataatatttgcagtcatgctatatgtttgaaattcgaaagagtggaaaaatctagttttttaacn

SEQ ID NO: 7502 - DNA, 813 bp, Glycine max
aaaatgctgaacctcttttcttacaagagaaagatagggactgatttatcacttatatatccaatatatatggttagtcacagtcttctacataaatatatttgtggcgtgtttagttattaaacatctaagaatggctacttttcctactcttcatggcctgcacaatcctcttcctcgatctcaattcctaggccaagatcaccctctcactcaccaattccctctcaagcaacaagtgcatcacaaaacagcaccaactcatgaagttctaatgccacgtgctgcaaagttcaacatattggaaatgatgggagggagaggactatgcaacggggaaaagggtcttcagcaagagctgaaaaggcaagttgttgttccacaatcatcaatatcatcacaagaagaagaagcaccaagtggtgaaaaagaggagcaagaaggtgaaggtggtgatgatgatgaaggaagtgttgaggtaccagaagatggttttgagaaggaaatgatggggctaacagggggttttcctgggggtgagaaagggttgaaaaagtttattgagaaaaaacaaccctcctacaaaagcaactaataatgttgtctccctctcattttgaaagaggccattgtgaagaatattcaaaggaaattaatgttcatttttatttgatgttatatatctgtgcccttctgatttttgacaattcaaacttggatgaggtttgttttcttaagtcttatctcccccttttctgatgagtctcagaattttgtatggagggtttaattaaatgttttcctttccattcc

SEQ ID NO: 7503 - DNA, 1096 bp, Glycine max
  misc_feature (3)..(3): n is a, c, g, or t
atnacctagaacatcctaatcgaaaaatttttcaactttgcattcgtctagttgtggaatccttcttaatagtactgttttagaattgctaagatgaagtcaagttttgaagaattgaagaagaagaagaagaaaggcgaaggagagcattcgaaggcataaacataaagaaattgaagataatgcgaaccctttgcgacgtatgcgagagcgccgctgccattctcttctgcgccgctgatgaggccgctctctgctccgcttgtgaccacaagatccatatgtgtaacaaacttgctagtaggcatgttcgagttggccttgctgaccccactgatgttccacgctgtgacatatgtgaaaatgcacctgctttcttttactgtgagatagatggtagttcgctgtgtctgcaatgtgatatgattgtgcatgttggtggtaaaagaacccatggaagatatcttctattgaggcaaagagctcagtttccaggtgataaacctgcccaaatggaagaactagagctgcaacctatggatcaaaatgaatcgagaagggatgaaagtcagtcactcaagctaaaaacaagagatagtcagcagaatcacagtgtctcaccttttccaaggcaagaaaataatattgatggtcatggaaaaatggataaaaagttaattgatcttaataccaggccactgcggttaaatggatcagcaccaaacaaccaggaacaatgcatggatattttaagaggcaataatcatgaatctgccagtgtgccaccagtagaatccttcaaacaagagtctgagaagtaacaaaggtacaacatatagggtgtgccagtgtgggcagaggctacagaaatattatgtttactcaaatttcttttacactgttgaccttgtttatgtgaatcttgtttttttttttgcttaaaatttgaattgtttggctgcagacctaattaatgacggaaaatagttgctttcatatggatgagctgcataaacaaggttactactgcataaattcgagggtataacataaattgttgtccaggataaaaaaaaaaaaaaaaaagcttatcgat

SEQ ID NO: 7504 - DNA, 1193 bp, Glycine max
  misc_feature (1189)..(1190): n is a, c, g, or t
cggacgcgtgggcggacgcgtggaggtgcacctcatctcatctgtatgcctatgcttgtttatcattttcttactttcctctcacgctctgccacaaaactccgtctccgcaataacggaataaaaaaacaagtttaattactattatggcgccgagggatcataagacaagcaacgctaaggctaacggtaacggtaacagcggggtgaaggaggtgcattttcgtggagtgagaaagaggccgtgggggagatacgccgcggagatcagagatcccggcaagaagagccgcgtctggctcggaaccttcgacacggcggaggaggcagcgcgtgcctacgacgccgcagcacgagagtttcgcggccctaaggccaagacaaacttccctctccctttggaaaatgttaagaactcgagccccagccagagcagcaccgtcgagtcctccagccgcgaccgcgacgtcgccgccgattcctcgcctctagacctcaacctcgcccccgccgccgtcgcatccgctcgattccccttccagcaccagttcccggtttttaccggcgcggtgcctgcggcaaatcaggttttgtacttcgacgctgtcctacgcgccggcatggccggtccacgtggctttgcgtttggctacaatcatcatcccgttgcggcgagtgagttccacgcgacgacgagcgactcggactcttcctctgttatcgatctgaaccataatgaaggcgaggttaaggggaacggttctagaatcttcgatctggaccttaaccatcctcctccgcatgagatcgcttgatccaaagtctgactcacccctttagttttttgttttttttttttgtgtgtttcggattatgaatttctcgttagtttttttttatataagtagagaaagtagcagcctccgataagggaaaataacgagggaagggaagggaaagaaaagaaagtatgtgaatacgtaggcggtatgattgtctcaattttttgcgacatagaggaaccaccaccggtttcatcctgttgtttcttaaatcacgaaatggttatcgggtttttctttcgttttaattgattatgtactgcggtgtaatgtttttggtttgcagccataatttggttcaatgaaattaacacggaaagtttgcataataggaaatataaaaaaannaaa

SEQ ID NO: 7505 - DNA, 503 bp, Glycine max
ctaaaaccctagctccaccacccacctaaacccgcgaactcaccaaggcggcggcggcggcggcgcgacagcagcagcggcgatggggagcgacacggagacggagaagaagaagaccccggtggcgctggcgcccatcgccaagccgctcgccggcaagaagctctccaagaaaaccctcaagctcgttcgccgagcctcggaggccaagtgcctgaagcgcggggtcaaggaggtggtcaagagcatccgtcgtgggagcaaagggttgtgtgtaattgccggaaacatctctcctatcgatgtgattacacatcttcccatactttgtgaggaagctaatgtcccatacatatatgtgacctcaaaagaggagcttgcgactgcggggaccaccaagaggcccacctgctgcgttttggtgatgaccaagccagccaagggggagatcactgaagaggtgaaggagaaactggaatcggaatacaagcaggttgtaactg

SEQ ID NO: 7506 - DNA, 2448 bp, Glycine max
agctacggtaggtaccccccccgaagctaccctctctctctaaaaccttgccatcgtccttcacaaccccccgttgctcttccaccttacaacttcaatgtgagagtcaagattcattcatttatttatagccaccggttcaggtggcgcagccaaaccaaacccacaagaggtgaagaacaataacataaaccattcttcacctctcctctctcccaccatagtaatgggtcagagcctaagttgcagtggcaactatgaccacggcctcttcaccgccgtgcagcacggtgaccttgaaattgtcacaactctcttggactccgacccctctctcttgcaccaaaccactctctacgatcgccactctcctcttcatattgccgctaccaatgaccagatcgagattctgtctaagctcttagatggatctctcaacccagatgttttaaatcgccacaaacagactccgcttatgctggcagcaatgcatgggaacatcgcgtgtgtggagaagcttcttcaagccggagctaatgttttgatgtttgatactagttacgggagaacctgcttacactatgccgcatactacggccattcttcttgccttaaggctattctttcttctgctcaatctagtccagtatctgcttcttgggggttttctcggtttgtgaatattagagatggaaaaggtgcaacgccattgcacttggcagctcgtcagagacggtctgaatgtgtacatattctattagacagtggtgctcttgtttgtgcttcaactggtggatatggctgtcctgggagcactcctctacatctagcagctagagggggatctatagattgcattcgtgaattgttggcatggggtgctgatcgtcttcaacgcgatgcatctgggcggataccatatatggttgctctgaaacacaaacatggagcctgtgcatcattgctaaatcctacatctgcagaacctcttgtctggccgtctccattgaagttcatcagtgagcttaatcctgaagccaaagctttattagagcaggcattgatggatgcaaacagagaaagagagaaaaacatattgaaagggagttcttactctctgccatctccatcacattctgatggggtagctgataatatgtctgaggttagtgagtccgaattatgttgcatctgctttgagcaggtgtgcacaattgaagttcagaactgtggccaccagatgtgtgcacaatgcacactagccctgtgttgccacaacaagcccaaccctgccactgcctgtcttactccaccagtttgtccattttgtcggagcacgataacaagactcgttgttgtgaagacagaatgccacgatgaaactgatcaagacagtgctgatatcaactgttccaagctgagcaagtcatcaaggaaactcagacacttgaatgacagtggtagcagcagcttcaagggactatctagtgttagttcattcgggaagttgggtagccgcagctctggaaggattgctgctgagtggcttgataaacagtgatggcaaattacttgtggtaatcaatgattccatattggcaagatacggtaactacagaggtgcttaaccggcaaggcaaaaatcaaagttgaaaacaggtgaaggaatattatgtaattttgggaaataagcaaaagtgagttgaagtgaagtgaagttcgcggtaggtaccaagtgttgttgggaaaaagagaaggggatgtcatgttgttgtagtattattgttacttgagaatgaagaagcatcacctgcgtcgatcgatgattttgggcatcgtcaataattttattttatcatacgtatcccagtaaagtgggaataatttctctcaaaagtataaatcaataatattaagggaaagtgtattgcttatttgcattatttatttctttgtatcgataagatataagaaataagatacaaaagagaaagacagagcctttttgttgcttgtcatgtgatcatgtctccgtgggtaaactagttagtgcaattgatcaggatcggagcatgctggctaatatataaaatagtatacttttttttttcttttctctttattgtaacttgttgataaaaaattgtataaatctaatttgtttcatatacaaataaataatagaacatggagaaggtgaagtcatgtctcacatgattaaacgtaaaattggcgtcgtgatatatatgagcgaataccgaataccctaaaggctggtgtttggtctaataataattagggggtggccaccacaaataccaactgggtttgttgggacttttcacaccaaaaactgaaaacaggaaagagacacggcataaaaacaaacaaggaaagttaagtacatgcatgccttggtcagtgtacgtgtcatttctccataaactg

SEQ ID NO: 7507 - DNA, 1469 bp, Glycine max
atttttttctctacagttcctccaatccggttcggttggtccggtgcggttcggtccggttcaattggatcatggagcaaaccactctcgaagccattcagttcaacgaggaaatccaaggtctcatggctgctccggcgccggaaaccgccaattccttcaccgcgctgctcgagcttcccccgacgcaggccgtcgaactcttccactcgccggagcgcgccgggaaaccgccgcgccacagtcccaaatcctatccgttgacctccttcgccgcctccgcatccgcccccgccaccgccaccgccaccgccaacgccaacctcacctttccctccaacgccgcgctgatcgatcgcgccgccaggttctccgtcttcgccggccagagctcgaactcgaactcgccggaggtgaagcgagagctgccggagaccgattccaacccgagctccactcacggcggcggcggcggcggctccgtctccgatctcgccgtggagaaccagaatctgaaaactgcgaagaggaaggagcgagagaagaaggttaaagcgtcgtcgaagaagagcaagagcgtcgccgccgccgacgagatttccggcgacggcgagaagcttccgtacgttcacgttcgagttcgtcgaggtcaagccactgatagccatagcttagcagaaagggctaggagagagaagataaatgctcggatgaagcttttacaagagctggtcccgggttgcaacaagatatcgggaacggcattggttctggataaaatcatcaaccatgtgcaatctctacagaatgaagtggagatattatcaatgaaactggcagcagttaacccagtaattgatttcaacctcgacagcttactggctactgaaggagtgactccaatggactgtaacttccctccgacagttgcacctgtcatgtggccagaaatcccacagaacggaaacagacaacaatatcagcaaccatggccgtttgatgcactccaccaacccctttgggggagggaagaagacaacactaatttcatgactccagaaaactcactcttgagttatgactcatcggcaaattcagtatctctgcattcaaatcagttgaagatggagctctaaagggaaactacaaaggtggtggtaccagtagcaattagcctattagtgtatataacaaatatagtattagcaattagtcatgatttgagcagcctcaacattcagcaggttttccctaactctattttgtcagagtcagttggaaacctggattttattcagccagcaaggaagaagaattggtatgctatttttatttaatatattactatcactatgtatactaactatagtaatcattcaatctttcaagtgattgattgatttagattgtaaaatcattgaacgaactattactgaactatcattgaagtttgttgctttgttcaaaaa

SEQ ID NO: 7508 - DNA, 1599 bp, Glycine max
  misc_feature (102)..(106): n is a, c, g, or t
cagtgggctttctgatgatgcatggttgttacatgggttcaaattactaagattaggattttctgtagagaagcagtggaaggatgttgaattggattcagnnnnnacttaaaatatgaaacattgaaacactggaaatattgtagatgagagagttgacatggctcttagttttcagaatttcagacgcacttgatgcctttattagtcatgcttaatgtggctatggattattaaagatgttgttgttggacattgtagttttataatgttacttatttgcacttatcatataatttgaacaaataattttacatccataatcctcgcagatgcagtccaagattagcgctttcttcaaatctactacctccgattcctcttccgtctctgccgacaatgacgacgacttgtccatctgggagaagcagcaacaccatatcatcaacacctacacccgaaggcctccaaaccctaacgccgttattccttcggtggtcaaaaacaagaagaggagctacgcccaattccacctcgatttcggccaatccgatttcctcttacgcgcctgttccacttgcggaatcaatttcactcccggcgacccagacgacgagaaatcccacaaccactttcacaaatcctacacccaggggatacaattcagaggttggaccaaagaaaatgttatccctcttcccaccctcgaagcgggtcgaatcattttggtttcggagatcgacctcacttctcacagaagaatagttgagcaggtcgtgagtatgatggaaattgagcttgggtgtggatggatccttcacgacctctttaaggtgtatctgtttgtttctcttcacagggttgttgggtgcctcgttgcagaaccaattgaaaaggcattcaaagttgtgtctggctctcctgatagcgtgaagaaaagggaagtgaggacgcgttctaccacttttcggtttgggaatgttattttccaaagggaggttgaaaaaaaagttgcttccttgagtgattctgaaaggatggaaggtgcaatcttctgtgatagcaaaccaaccatcgctgcttgtggcattagggccatttgggttgctccctctaacagaagaaaaggaattgcaagcaaattgcttgatgccgtgaggaagagtttctgcaaggatcttgagcttgaacgttctcaactagcattctctcagccaacctcagctggaaaggcattggcaacaagttacactggcactggatcattcttggcgtattaaagccaacaaaactattggttactactactatttcgtactgacagataaagccatgtttagattagtgattacttctattgactgttaattaacaaaaacataagctattattcttgtaaagtataacctttttagcccatataagtatgaatctttgatttcgttgcttcttattgttgtaagccttttgtcatcccgaattgatttacccattaggttcttgagtatcaaagttgtggcgtgtttggaaaatccccagttttaagactattacaactgtggttgaggcattttaaaaaatgtttggttttgttctgcc

SEQ ID NO: 7509 - DNA, 1061 bp, Glycine max
cccgaacgtgctgaagtggatcggacgcgccggggtgaagctccacgcgcgcctggcggaggagattcgctccgccgtgagaggcgccggcggggagatcaccatggcggcgatggagaacatgccgctgatgaagtcggtggtgtacgaggcgttccgcatcgacccgccggtgccgttgcagttcgggagggcgaagagggacttgatcatcgagagccacgaccacgcatttcaggtgaaggaaggggaaatgctgttcggataccaaccgtttgcgacgaaggatcctaggatcttcgagagggccgaggagtttgtgggggacaggttcgtcggggaggaaggggaaaagcttctgaaacacgtgctgtggtccaatggccctgagaccgaatctccgacaattgggaacaagcaatgcgccggaaaagacttcgtcaccttggtttcgaggcttctcgtcgtggagttttttctccgctacgactcgttcgagattcaagtgggaacttctccattgggttcttccgttactattacttccctaaagagagcaagcttttagttaataattgttattaattttgtttttgacaggctaggatcatgatattgtatggttacattttacataaaatgtcttgatttgattttcttcctataattaagtcttacctagtctagaagaagcattcaactaagaaaagaaaagtgcaatttgttcttttgagttctttattcaggcggcttttccctgcttctgctttagacctgtaacatccccttattacaaatgtctggtaacagcgttttgggcaatcattatagtttcatggggttacggaggtgattactgttactaaaatgatcggcaagatacaaatttatgttaatgttaacatagctgtaatgtagtgttttccgcaagcagattgtacacttggactttagattagtgttgtctaataatagctttgtggtggggcaacgtgcactccactataactatatggattttgttttttccccctaataaaatggtataatatactgcaaga

SEQ ID NO: 7510 - DNA, 2590 bp, Glycine max
  misc_feature (2331)..(2353): n is a, c, g, or t
  misc_feature (2442)..(2447): n is a, c, g, or t
  misc_feature (2517)..(2523): n is a, c, g, or t
tcgagcagctacgtaggccccccccccaagtgtcatagagaagaagctatcctagttccaagctgtttattaccttgcatcttccgcaatcaccttctctcttcactcttatctctttctctctaaaaatgtgactttgttgtacgtgtgagactgagcctaaaacagtacggatacttgagcaaaggaacaaatattgaagtgtccaatgcgtaccaacaataccctttagtttactctctctaaaaaaacaaacaattctctatcctctacactctagtctctcgctgtttgttctctacttaactcacatctctaagctgtgtgcgtgaaccagcggatagcaaggatgagtaaacaagacatgatgaaaagtcagaattgccttctcaaggtcaatatccactgcgatggctgtgaacagaaagtaaagaaaatcctgcagaaaattgatggggtgtattctgtgaacatagatgcggagcgagggaaggtgatggtgtcagggcatgtagatccagctaaactgataaaaaagctgaagaggtcagggaagcatgccgaactttggggtggccagagaggcatgatgtacaaccaaaactaccccacctaccctcagttcaagaacttgcacatagataacaccaaagggggtagcaaggacaataagtctcagaatcacaagggtggtgctcagaaaggtggtggtcaactagcacacttccaaagtgctaatggagggtcaaaagtaccccccaagaatcagaaatctgtcgacttcaacttatctgaagatgaacttgatgagagtgattttgatgaatttgatgatgactatgatgagtttgaagatgattttgatgaagaggatgaagaggaagagtatggtcatggtcatggtcatggccatgggcagcaggggcatcctatgcaacataacaagatgatggctatgatggcccagatggggaacgggcgtgggccacatgggcctggtggaatgatgaatgggcctgccatgaacggccataaagggaatgggggtgtcaagaagggtgaggtcattgatctgcctatacaaatgaagggcaaaggtggaaacttcagcttcagcgagggtaaaaatgaaataaagggcaatggagatggtggtcaaaagaacaaaggtggaaagcaaaagggtggagataataatcataacaatggtaacaagaaaaagaactccaaaggcaaaaatggtggtggcttcctagttcggttcctaggcttaggaaaaaagaacaagaagggaggcggaggtggaggttcagccgacacaacaacaagcaagaataaaaacaacaacaaaggaaagaaagatggaggtaaattcgacaaaattgactttgacttccaagattttgatatccctcctaccaaaggtaaaaatggcaagggtggcagtaatggtaaaaacaataatgacaagggtcatggtagcaataatggtaatgtgggtcaccacatgggtcagatgggcccaatgggtcagagaggtccaatgaatcagatgggcccaatggaccatatgaggaatatgaacatcaatatgccggcggtgcaaggattaccggcagccacggccgccgcgatgaacggtggttactaccaaggcatgcagatgcaaatgcaacaacccaacccttacaacatgcagcagcagcaacaacagcaactaatggccatgatgatgaaacaacaacaacaacaacaaatgcaagcaaacatgaacgtgtacccaccacacatgatgtatggaaggccacacccacaccaagacccatctatgaactactttccacccccaccaatgccttcacacccaatggcggatcctatcacgcacgttttcagtgatgagaacactgagagctgcagtatcatgtaaattatttattagtggtgactagtttgttttaattaggtttttctactatttgtttgtagtcttctttcttttatttggggggttcattaaattttgtcctagtgctagaaaaatgtgcaacattttaggactattagggatatcatgtgctgtttgttttattttggtccggtcctgcttgaaaacaacccgatgagtaggacatgctgctgccagtgcaaggcgatgacagactctttcacatggcctttaatttgctcaaattaaatggagccatgctccctgtaaaattcaatgctctagattctgttggctttactattggccaaatatgttcttttcacacatgttggtcacaatattcaatacttaagttcaacttcaattgtgtgctctgtaannnnnnnnnnnnnnnnnnnnnnnttctaattactagaatataatactctaaattactaggactatgttttaggcatctctattcaaacaattagttgttgcccaatatagcnnnnnngttgcattatgcttcagtcattcacattcctcaataaaatataagatgttgccaaatgctttgagcaggnnnnnnntcacacactccacttaaaagttagttccaacttccacacacgctccttacttacctctttacctgct

SEQ ID NO: 7511 - DNA, 1178 bp, Glycine max
aactcatagtcataacatatagagaagctatcctagttccaagctgtttattaccttgcatcttccgcaatcaccttctctcttcttcactcttatctctttttctctaaaaaatgtgactttgttgtacgtgagtgcgagtgagcctaaaacagtacggatacttgagcaaaggaactcgtgtcggcgtcgccggtccccccccccaataccctttactctctctaaaaaacaaacaattctctacacacttgacactactctagtttcactgtttgttctctacttcactcacatctctgcgctgtgtgcgtgaaccagcagatagcaagcatgagtaaacaagacacgatgaaaattcagaattaccttctcaaggtcaatatccactgcgatggctgtgaagagaaagtaaagaaaatcctgcagaaaattgatggggtgtattctgtgaacatagatgcggagcgagggaaggtgatggtgtcagggcatgtagatccagctaaactgctaaaaaagctaaagaggtcagggaagcatgccgaactttggggtggccagagaggcatgatgtacaaccaaaactaccccacctaccctcagttcaagaacatgcacatagataacaccaaagggggcagcaaggacaacaagtctcagaatcacaaaggtggtgctcagaaagaaggtggtggtggtggtggtggtggtggtggtggtcaactagcacacttccaaaatgctaatggagggtcaaaagtaccccccaagaatcagaaatctgtcaacttcaacttatcagaggatgaacttgatgagagtgattttgatgaatttgatgatgactatgatgagtttgaagatgatttggaagaagaggaggaagaggaagagtatggtaatggttatggacatggtggtcatggtcatggtcatggtcatggccatgggcagcaggggcaggggcatcctatgcaacataacaagatgatggctatgatgggccaggtggggaatgggcgtgggccacatgggatgaatgggcctgctatgaacggccataaagggaatgggggtgtcaattatgggggtgtcaagaagggtgaggtcattgatctgcctatacaaataaagggcaaaggtggaaacttcaacgagggtaaaaaaaaaaaaaa

SEQ ID NO: 7512 - DNA, 3106 bp, Glycine max
acatgcttgccttcctcatagtagtagtggagaggtctttcattattcagttggatttagcaccaccaagatgaaggttcaagaaacgaggtcgcatgttcatgcacttggggaagaagagaaggtgatgacaaggaagcagaaggctgagtccaaggcacatgaagtggaacattctccaaagaaggccaaggtggaaaaagaagatggccacatcaacgggaaatctgaaactggcgttgcagaagaatatgatgagttctgcaaagccacaaccgagcaccttcctttggaacaaatgagagacattctggaggccaatggccttgattcttctggctctgatcttgaaattacaagaagatgccaagacttgctgttttatggtgcattggacaaatgctcggtttgcaatgggagtttggagtttgatggcagacgttatgtttgcagagggttctacagtgagtgggctagttgcactttcagcaccagaaaccctccaaggaaacaggaacccattaagttacctgattctgttcagaactctctggcttcagacttgctaaagaaatatcaggacccgagtcacaggcctcacagggatctaggcttagcagaaaaaccctttactggaatgatgatctctctgatgggtcgtcttactcggacacaccattatttggaaaacaactattgaaaagcatggagggaaggtggcaaactctataattgggtcaacttgtttggtagcttcacctgctgagcgagaacgtggtggcacatccaaacttgcagaagccatggagaggagtataccagtggttagggaggcttggttgattgacagcattgaaaagcaagaaccacaacctttggaagcttatgatcttgtctctgatctttctgtggatggcaagggtatcccctgggacaaacaagatcctggggaagaggctatcgaatcactctcagcagaactcaagctttatgggaagagaggagtctataaagataccaagttgcaggaacaaggtggaaagatatttgaaagagatgggatactatacaactgtgccttctctgtttgtgaccaagggcgaggactgaatgactactgtgtcatgcaactgattgttgtcccagagaatcgtttgcatctgtactttaagaaagggagagttggggatgatccaaatgcagaggagcgattagaagagtgggacaatgtagatggtgctctgaaagagtttgtgaggctctttgaggaaataacaggaaatgagtttgaaccttgggaaagagagaagaagttccaaaagaaacctttgaagttttaccccattgacatggatgatggaattgaagttagacatggggcactaggtcttcggcagctggggatagcagcaacacactgcaaacttgagcctttggttgcaaattttatgaaggtcttgtgcagccaggagatatataagtatgcattgatggagatgggttacgactgtccggaccttccaataggaatggttacaaatcttcatctgaaaaaatgtgaggacgttctcttagaattcatagacaaggtgaaatcattgaaagagactgggcccaaggctgaggctgtgtggactgattttagccaaagatggttcactctgatgcactccacaaggcctttcaattttagagattaccaagagattgcagatcacgctgctgctgcgttagagggggtgagagacataacccaggcttctcacctcataggagatatgactggctcaaccattgatgacccgttatcagagacatacaagaaattgggttgctcaatttctgccttggacaaaagttcagatgattacgagatgattgtgaaataccttgaaaaaacttatgagccggtcaaagttggtgacattgaatatggggtgtcagtggaaaacatttttgcggttcaaacaggtggttgcccttcctatgaagacattataaaactaccaaataaggttcttctatggtgtggatcacgaagctcaaacctcttgaggcacttgcaaaagggattcttgccagcaatatgctcattacctattccgggttatatgtttggcaaagctattgtctgttctgatgctgcagcagaggctgcaagatatggttttactgctgtggacaggccagaaggattcttggttttggccattgcttctctaggaaatgagattaccgagttgaaaaccccacctgaggatgcatcatctttggaggaaaagaaggttggagtgaagggaccggggaagaagaaaacagatgaatcggagcattttgtttggaaagatgatataaaagttccttgcggtaaactagttgcctcagaccatcaagatagccccctggaatacaacgagtatgctgtctacgataaaaagcgggcacgcataagctacttggtgggagtgaagtatgaagagaaggaagagaagggtgcggtgattgacacagctgaatgatgggaccaaaaaggatgtaagggaagcttttcttttttgtgatgcgggaattgaaagctatgaccatctatgtactagtggtttctctagttagtggaagatttatgtcattttgatgtatatttacatgtgataaaataggctgtatgtggtgtcacattttgatgtatgtataggtaaatggcccgttagttagggtaagtaaatattttgtcctacacatgacggcatgagaatggaactacatctaacactatgttgtttcagtcctagttgactactctgtctgtatgaatgagatgatatagtagaaatggtataatgatgtccttttgtttaataaaaaaaaaaaaaaaaaaaaaaaaaaataattacaaaaaataaaaaaaaaaaaaaataccaacataaatactatataaaaaaaaaaatccttcagttttaaaaaggggaccaaagggtttcgttttctgtgtttaatgcctagggggttattttttgaacctttttgaggtgtcccccatctaaatccaaaatttttgaaaaaaaattggcaaaaatgccccaaatggggtattttatataaaaag

SEQ ID NO: 7513 - DNA, 1122 bp, Glycine max
  misc_feature (1)..(1): n is a, c, g, or t
  misc_feature (4)..(4): n is a, c, g, or t
  misc_feature (87)..(87): n is a, c, g, or t
nctngcttcacggtatgttgatataaagctttgccaaaatgagaggcataaatgtgatgggagaagtggatgtccctgggcatgcanaatcctcgcgtccgggatatcctgatctttggccatcaccttactgtagggagccacttgatgtttcaaagaactttacttttgatgtcatttctggtattttggcagatatgagaaagattttcccatttgagctatttcacttgggtggtgatgaagttaatacagattgctggagtagtacttctcatgtaaaggaatggcttcagagtcacaacatgaccactagagatgcctatcaatattttgtactgaaggcccaagagatggctgtttcgaaaaattggagtccagtgaactgggaggaaaccttcaatacgtttccatcaaagctccatccaaaaaccatagtgcacaactggttgggccctggtgtttgtccaaaggttgtcgcaaaaggtttcaggtgcatttacagtaaccagggtgtctggtatcttgaccatctggatgtaccttgggatgaggtatatacagctgagccactacagggaatacatacagcttccgaacaagagcttgtaattggaggagaagtttgcatgtggggtgagacggctgatacatccaatgttcagcaaacaatatggcctcgagctgctgcagctgcagaacgcttatggagtcagagagattctacctcacaaaatattaccttaattgcattgccccggttgcaaaacttcagatgtctattgaatagacgaggggttccagctgctcctgtcacaaattattatgctagaagggcacctgttggtccagggtcatgttatgaccaataatccttgtaatgattcacatgttcaggtgtaacctggtatgcaagtaactgatgtttcatctactttacctggttgatgagctagaatcattatttgagctcaactcctgggcagatatggttgctgatgtcagaactctttaatgaactggcaacagccatgttgcaatgtaatttattgttgagttaaataaatcatatccagtttacattttttaaaaaaaatcatatccagtttacattttttaaaa

SEQ ID NO: 7514 - DNA, 2689 bp, Glycine max
cggtccggattcccgggtcgacccacgcgtccggttcattctttctgtaaaactctgacggcgtccgataccagtacccatggtgggttttctgtgctgagacggcatgctgatgaatgtcttcctcctctggatatgtcgaagcagccacccacacaggaattggtggctaaggatcttcatgcaaatgaatggcgatttaaacatatcttccgcggccacccccgccccccccccccccagagtggttggagtgtttttgtcagctccaaaaggcttgccgctggggatgcatttatatttcttagaggtgagaatggggaacttcgtgttggtgtccgacgagcaatgagacagcagggtaatgttccatcctcagttatctccagccacagcatgcatctcggtgtccttgcaactgcttggcatgccatctcgaccgggaccatcttcactgtttattacaagcccaggaccagtcctgctgaatttattgttccgtatgatcaatatatggagtctctcaaaaataattatagcatcgggatgcggttcaaaatgaggtttgaaggtgaagaggctccagagcagaggtttactggtaccattgttggaatagaagattctgatcccaaaaggtggagagattccaaatggagatgcctcaaggtgagatgggatgaaacatccaacacccctcggccagagagagtttccccttggaaaatagagcctgctcttgctcccccggctctaaatcctctttcaatgcccaggcctaaaaggcctcggtctaatgcagttccttcatccccagattcttctgttcttactcgagaagcatcatctaaagtgagcatagacccttcaccggcaaatggctttccaagggtcttgcaaggtcaagaattctcgaccttgagaggcaattttgctgaaagtaatgagtctgatactgctgagaagtctgttgtttggccacctgctgcagtagatgatgaaaagatggatgtttctacttcaaggaggtatggttcagagagctggatgtcaatggggaggaatgagcctacatattcggatcttctttcaggctttggggccagtggggatccttctcatttatccttgaaggatcaaatgagccctgcttattctgctagaaagcaatcattggatcatgaaggcaaacttcacatgcctcatccatggcctgtaatgccctctagtctgtcactgagcatcttggactctaatacaaaaggtcctgcacatggtggtgatacaacttacaaagctcgagggaatttgaggtacagtgcatttggtgaataccctgcactgcatggtcataaagttgagcattcacatggaaacttgatgccacccccacctgcactcctaactcaatatcagagtccttgttcaagagagcttatgtcaaaacaagtgtcagcaaaaacttgtgaggctgtgaaaccaaaagatggtgactgtaagctatttggcttctcacttatcagtggccctactttaccagagccttctttatcacaaagaaatgtgagtgaggctgctgatcagatgcatcttacagcacaccaacaaagaacatctgaaaatgatgaaaagttagaccactcgaagggatcaagacctgtagatgatatagttgttgatgaccaggacagaccattacggacttctcagctgcatactaaagatgttcaagctaaacctctcagtggttctgctaggagttgcactaaagttcacaagaagggcattgcacttggtagatcagtggaccttacaaagtacagtggctatgatgaattagttgctgaattggatcagctgtttgaatttgggggtgaattattgtcaactaaaaaagattggcttatcgtctttactgataatgagggtgatatgatgcttgtaggcgatgatccatggcaggaattctgtgccatggttcgcaaaatttatatctaccctaaagaggagatccagaaaatgagcccaggtaccttgagctcgaaaaatgaagagaatcattcggtgacggctagtgaaggtgcagatacaaaagatgttaaatgtcagccgcatcaaaagttcaattcagaaaatggtcttgacgcctaatgattagtagattgatttccgtagctctcagattccgggatggaaagtagggaactgccatgaagccatccagttggaaaacttaacttgaagacgaaatcgaggctgactgctgcttatcagtgactgcttcgaatcaatatataagatggcacgaaagagtatccgttcaattttggaaatcccggaattagtagtataatgctcagctatatacaatccctagtatgtaatcaattgtgtttttgagtgaggtgatatagggtgatatcaaccttgcttttcttttccaaacaatcccaccttgtagctgtacatagttgtttctcatctaccctctgaacaacaaaccgttaatgtaatgaaaattgatagtataccagggaggccttgtggttggtatccagtttatttgattttaattttgattcttattagtcataatttgtgagatggaaattatcgagattccattctgcatgctgtataattaaattttgttttaagtgtacatttgttttaaaaaaaaaaaaaaaaa

SEQ ID NO: 7515 - DNA, 3335 bp, Glycine max
ccacgcgtccgatttatcagctgagagaaaaaataaatactaaaataaaaccacgcgccccgcaagagagagaaactaagacagaaagagagagaaagagtggttgaaagcgtccattgaaggtatagagagagaggttttgtgaattggtgctgcttcgtgtctgtttatttcctcgcgaggtttgaattccggaacagtgaagagaaacggaggttccgatcctgcgatgtgatatatgagagatctgtgaggaaattgaactggaaaaaaaaaatggcgacgtcggaggtatccatcaagggaaattcggtgaacggaaaaggagataatagttctggtggctacaccaacgatgttaggaacggttctggtggaggcgaggctcggaattcttcttcttcgtcttcatccgcgagagacgcggaagctgcgctttacagggagctgtggcacgcgtgtgcaggtcctctggtgacggtgcccagagaaggagagcgcgtgttctactttcctcaaggacacatcgagcaggttgaagcgtccacaaatcaggtagcggaacagcatatgccggtttacgatctaccacccaagatcctttgtcgggttatcaacgtcatgctcaaggcggagccagacacggatgaggtgtttgctcaagtgactttacttcctgagccaaatcaagatgagaatgcggtggagaaagagggtcctccggcggcgcctcctcggtttcacgtgcattcgttttgtaaaacgctgacggcgtctgatacgagcactcacggtgggttttcggtgctgaggcgacatgccgatgaatgccttcctccgctggacatgtcaaagcagccacctacccaggagttggtggccaaggatctgcacgccaacgagtggcgattcaggcatatttttcggggtcaaccgcgtagacacttgctgcaaagtggttggagtgtttttgttagctccaagaggctagttgctggggatgcgtttatatttttaaggggtgagaatggggaacttcgagttggtgttaggcgtgcaatgagacaacagggtaatgttccatcatcggttatctcaagccacagtatgcatctcggtgttcttgcaactgcttggcatgccatattgactgggaccatgttcactgtgtattacaagcctaggactagtccagcagagtttattgttccctatgatcaatacatggagtctctcaaaaacaattataccattgggatgcggttcaaaatgaggtttgaaggtgaagaggctcccgagcaaaggtttactggtaccattgttggaattgaagatgctgataccaaaaggtggccaaagtccaaatggagaagtcttaaggtgagatgggatgaaacatcaaacataccacgtcctgagagagtttcacaatggaagatagagcctgctcttgctcctcctgctctgaatcctctaccaatgcccaggcctaaaaggcctcgatctaatgtggttccatcatccccggattcctcggttcttactcgtgaagcttcatctaaagtcagcgtagatcctttgccaacaagtgggtttcaaagggtcttgcaaggtcaagaactttcgaccttgagaggtaattttgctgaaagcaacgaatctgatacggcagagaagtctggtgtgtggccacctgccacggatgatgaaaagattgatgtttctacctcaagaaggtatgggtcagacagctggatgtcaatgggaaggcatgaaccaacatatccagatctactttcaggctttggggcccacggagatcattcatcccatccatcatttgttgatcaaaatggtcctgtagctaaccttagtagaaaacatttgctggatcgtgaaggcaaacataatgttcttagtccttggcctggagtgccatctagcctatcactgaatctcttggactcgaatttaaaaggctctgctcaaggcggtgatacagcttaccaagtacgagggaatctgaggtatagtagtgcatttggtgagtaccctgtgcttcatggacataaagttgagcattcccatagaagctttttgatgccaccaccaccatcaactcaatatgagagtcctcgttcaagagaactgttgtccaaaccaatatcaggaaaaccttgtgaggtttcaaaactgaaagacagtgactgtaagctatttggcatctcacttcttagtagccgccccattgcatcagagccttctctatcacaaagaaatgttacaagtgagtcagttggtcacatgcatacagcatcacaccatcaacgtgcaattgaaaacgatcagaagtctgagcattctaggggttcaaaaccagctgatggtctgctgattgatgaccacgaaaaggtgttacaaacttctcagccacatctgaaagatgtacaagcaaaatctcatagtggttctgctagaagttgcactaaagttcacaagaagggtattgcacttggtaggtcagtggacctcacaaaattcagtgattatggggaattaattactgaattggatcaactattcgaatttggaggtgaattaacttctccacaaaaggattggcttattgtctacactgataatgagggagatatgatgcttgttggtgatgatccgtggcaggaatttgttgcaatggttcgcaaaatttatatctaccccaaagaggagattcagaaaatgagcccgggtaccttgagttcaaagaatgaagagaatcaatctgccagtgaaggtgcagcagacgcacaagaaatcgagtgtcagctcaatcattcatcttcagatacctgatagttcgtagatttgatttccatagcttccaggttccggactggagtggaaagtagtaggtgactgtcataaagccatctagttggagaatatgacctgaagaaggaaattctaattctgaatctgactgttttatcaagtgagtgcttgtgtttggaatcagaatatggatggcatgaatgagtatccatccaattttggaccgtgtcgtggaattagtagtagtagtagtagtagtagtatatatgccttccctgttatacactcctaatatagtagtatagtacggaattgtgcgttgtgcaaggtgataagggagtgtatcggccttgcatttttcaacaatcctaccttgtacatagttttactcgcaaccttagtaccggaactcgttaatgtaattaagttgatatacaagggcgattttaaacagaaaaaaaagcgaaagccgatcccttcaacccgtttcaaaggtaacaaaa

SEQ ID NO: 7516 - DNA, 1545 bp, Glycine max
cgaccatgaaaaggtgttacaaacttctcagacacatctgaaagatattcaagcaaaatctcatagtggttctgctagaagttgcactaaagttcacaagaaggggattgcgctcggtaggtcagtggacctcacaaaattcagtgattatggggaattaattgctgaattagatcaactattcgaatttggaggtttattaacttctccacaaaaggattggcttattgtctacactgataatgagggagatatgatgcttgttggtgatgatccgtggcagtaaggatatctaacaatgacatatgtgattattctgtaatggtaaaaaaaaatcttggcggtggcaattggtgcttgttggtgaatattccgtggcaggaatttgttgcaatggttcgcaaaatttatatctaccccaaagaggagattcagaaaatgagcccgggtaccttgagttcaaagaatgaagagaatcaatctgctagtgaaggtgccacagacacacaagaaatcaagtgtcagctcaataattcagcttcagatacctgataatttgtagatttgatttccatagcttccagattccggactggagtggaaagtaggtgactgtcataaagccatccagttggagaatatgacctgatgaagaaaattctaattctgaatctgactgctttatcaagtgactgcttgtgtttggaatctgaatatggatggcatgaatgagtatccatccaattttggaccgtgtcgtggaattagtagtagtagtagtagtatatatatatgccttccctgttatacactcctaatatagtagtatgttattgtgccttgtgcaaggtgatagggggtgtatcggccttgcatttttcaacaatcctaccttgtacatagttttactcgcatccttagtacccaaactcgttaatgtaattaagtgtcatatacaagggcggtttatctgattttaaatatgattgtctcttattttagtggggtaatttgtgccagtatgcctaatcattgtggatattaaaatattagtatgcgtttgggtagtagatgtattattaaattttgcctccaagtcttggcatgtgccttgcagccttggtgtttgcgaatgagtccattaccgccatatcttgtcccagggttttcgaaccagcggcgtagttgaagtcatgtaacgagtgaagaaagtggacacttggggtctctggaaaaccgatggtttgaaaattccttggtgaaatgtatttgtggtttatcgttgcgatgacactgctagttgtggtgtagtcatctctctctgggatatgtgtagcgtggttacgtgatagaacttcattctttgaaagcaccatcgttgaatgtccaataatggtttttgaaaaataaataaattgattgtacttttctgctagagaaacatactctgtatgtgcacgttgtggacctcattatttccgtggttctgtcctttatgtctaacaagctttggcccatggaattcattatttatctaaattaaaa

SEQ ID NO: 7517 - DNA, 3381 bp, Glycine max
ctctggttaagtcctcaccattcccctcccatcccttcgcgcacgcgcgggcacaacccaacccacccttcttcttcttcttcttcaaaacctcaacagattgtggaattgcgcgttgaacaacgactcaattattctcccgcaagctctgtcctcacttcaaagcttcgaggttaggttcttcgagagtttctttgtttttactccgtcgcttcccgagaaaccgtcgcttgcgtgagcgaggcttgtagaaccacgcgaggagtgtcgcggatgagagatctctggtgaggtctgtggaaatggcatcatcggaggtgacgatgaagggaaattgcttgaaccacaacgacggcggagccacggagcctcattcgccgtccacggccaaagacgcagaagctgcacttttcagggaactatggcacgcatgtgccggtcctctagtcacggtaccgcgggaaaaagagcgcgtgttttatttccctcaaggacatattgagcaggtggaggcgtcgacgaatcaggtggcggaccagcacatgccggtttacgatctcccacccaagatcctttgtcgggtcatcaacgtgcagctgaaggccgagcccgacacggatgaggtgtttgctcaggtgactttgcttccggagccaaaccaagatgagaatgccgtggagaaagagccaccaccacctccgccaccacggtttcatgttcattctttctgtaagactctgacggcgtccgatacgagtacccatggtgggttttctgtgctgagacgacatgctgatgaatgtcttcctcctctggatatgtcgaagcagccacccacacaggaattggtggctaaggatcttcatgcaaatgaatggcgatttaaacatatctttcgaggtcaaccgcgtagacacttgcttcagagtggttggagtgtttttgtcagctccaaaaggcttgttgctggggatgcatttatatttcttagaggtgaaaatggggaacttcgtgttggtgtccgacgtgcaatgagacagcagggtaatgttccatcctcagttatctcaagccacagcatgcatctcggtgtccttgcaactgcttggcatgccatcttgaccgggaccatcttcactgtttattacaaacctaggaccagtcccgccgaatttattgttccgtatgatcaatatatggagtctttaaaaaatagttatagcatcgggatgcggttcaaaatgaggtttgaaggtgaagaggctccagagcagaggtttactggtaccgttgttggaatagaagattctgatcccaaaaggtggagagattccaaatggagatgcctcaaggtgagatgggatgaaacatccaacacccctcggccagagagagtttccccttggaaaatagagccggctcttgctcccccggctctaaatcctctttcaatgcccaggcctaaaaggcctcggtctaatgcagttccttcatccccagattcttctgttcttactcgagaagcatcatctaaagtaagcatagacccttcaccggcaaatgggtttccaagggtcttgcaaggtcaagaattctcgaccttgagaggcaattttacagaaagtaacgagtttgatactgccgagaagtctgttgtttggccacctactgcagtagatgatgaaaagatggatgtttctacttcaaggaagtatggttcagagagctggatgtcaatggggaggaatgagcctacatattcggatcttctttcaggctttgggaccagtggggatccttctcattcatccctgaaggatcaaatgagccctgcttattctgctagaaagcaatcattggatcatgaaggcaaacttcacatgcctcatccgtggcctgtaatgccctctagtctgtcactgaacatcttggactctaatgcaaaaggtcctacacatggtggtgatacatctttccaagctcgagggaatttgaggttcagtgcatttggtgaataccctgcactgcatggtcataaagttgaggattcacatggaaacttgatgccacccccacctgcaccccaaactcaatatcagagtccttgttcaagagagcttatgtcaaaacatgtatcagcaaaaacttgtgaggctgtgaaaccaaaagatggtgactgtaagctatttggcttctcacttatcagtggccctatcgtaccagagccttctttatcacaaagaaatgtgagtgagcctgctggtcagatgcatcttacagcacaccaacaaagaacatctgaaaatgatgagaagtcagatcactcaaagggatcaagacctgtagatgatctagttgttgatgaccatgacagaccattacagacttctcagtcgcatactaaagacgttcaagccaaacctctcagtggttctgctaggagttgcactaaagttcacaagaagggcattgcacttggtagatcagtggaccttacaaagtacagtggctatgatgaattagttgccgaattggatcagctgtttgaatttgggggtgaattattgtcaactaaaaaagattggcttatcgtctatactgataatgagggtgatatgatgcttgtaggcgatgatccatggcaggaattctgtgccatggtttgcaaaatttatatctaccctaaagaggagatccagaaaatgagcccaggtacactgagctcgaaaaatgaagagaaccagtcggtgatggctagtgatggtgcagatgcaaaagttgttaaatgtcagccacatcaaaagttcaattcagaaaatggccttgacgcctaatgattagtagattgatttccatagctttcagattctgggatggaaagtaaggaactgtcatgaagccatccatccagttggaaaacataacttgaagatgaaatcgaggctgactgctgcttatcagtgactgcttcaaatcaaatatataagatggcattaaaagagtagtatccgtccaattttggaaatcccggaattagtagtatatgcctgcccagttatacaatccctagtatttaatcaattgtgtttttgagtgaggtgatatagggtgatatcgaccttgcttttttttttttttaaaacaatcccaccttgtagttgttgctgtacatagttgtttctctcccaccctatgaacaacaacccattaatgtaatgaaagtttcgtataccaggtcgcggccttatggttggtatccagtttatttgattttaattttgattcttattcttattaatcataatttgtgagatggtatccattctgcatgatgtattaattaaacttcattcaaattctgcataagttgttttgtaaaaa

SEQ ID NO: 7518 - DNA, 560 bp, Glycine max
ccaaacccttttcccctcttcttcttctactactactccccccaccccacccagcctaccgtcgcagaagcacacgcgcagacagattggaaccggagagctcgatctgatagcacaagctttcgaatccctttcggcggaaggaatggcggaggagaaggggacgctgcaggcgatgagggggtgggtcgtggaccacaagctgcgggccgtagggacgctgtggctcacggggatcgcgggatccatcgcctacaactggtccaggcccgggatgaagaccagcgtcaagctcatccacgccaggcttcacgctcaggccctcactctggctgccttgggttgttctgcgcttgtggagtactatgatcaccagtcaggttcaggatcaaaggttcacgactatgcaaagcagttccttccatcggacagaaacgccaaaaaggactccgtgtagaagaggcagcaagttataatataggcttccattagctgatatgggaatttgttgatgttattttctgagcaaacaatctggcatttcacatgccgttatcaag

SEQ ID NO: 7519 - DNA, 785 bp, Glycine max
tcagctacgtaggcccccccccccccgatatcctctctctctctctctctctctgaacaagacccagccagccgttagggaaatcaagcacagctcaatcattgaatcttagcataaacacatacagaagaaggaaaagtggcaccctgggaggagctgatattgaaggagggtttggaagaaaaagaattttgttttgagatatatatacatatatgtgcaagtgcataggaaattaacacaaaaagatgacatggtgcaatgactctgatgaggatagggttattgaatcaacgacgccaacaataactattactcctaacactgatggcataaagctcaccgaagaaattagaaccataacatgcccctcgtgcggccataacattgaattcaaagatcagggtggaatccatgacttgccggggttaccagctggagtgaagtttgacccaaatgaccaagaaatattagaacatttggaggcaaaagtggcgtctgatgcatgcaagcttcatccccttattgacgagttcataccaacgcttgaaggcgaaaatgggatctgttatacacacccagaaaagctaccaggtgttagcaaagatggacagatccgccacttctttcacaggccctcaaaagcatacacaactggaacgaggaaaagaagaaaagttcacactgatgatgaaggaagtgaaacaagatggcacaaaacgggaaaaactagagcagtttttgcagcagccggtggtgcagtaaaaggttttaagaacatacta

SEQ ID NO: 7520 - DNA, 740 bp, Glycine max
  misc_feature (624)..(624): n is a, c, g, or t
ggttcgaatttaaaaccccattccctccgaaacaaattagggtttgggttttgacaccatgactggttcgcgcagaggcaatggcgatggcggggaaaatgtgaggaaagcggcgagcgagcagaacccggccactcgcagggtcatacgctcccagttcctccaactcaagaatctcatcaatgagaaaagagatgatttgatgaacacggagtctgacaagttcgacaccatcttggatgagttcgacaagttacacgtccaagttgagaagccgagggagcaagttgcagatgcagaggcactgctggatctcacacgcactctagtgggatctgttaagtcgttggcgaacgagggtgtgaccccttctcaatttgtttcatctttgctcatacgctacgcccatacccaacactctattgattggcacaaacttggccttgccgcctccccaatcttcctctccgttcatggctcttctaccatgcttggtcccatggacaaccagtttaagcaacgcaaaatgggagttcgcaggaaccgtgatcctcgtcaaattgcaactactagacctcaacagcttgatgaggctgttacagagaaaaaaactgatacccacanaaacagggccactatgtttcacatcttaaggaggacaaagcgtgagccacttgaaaatttaattttgaacagggagggcttttggtcagagtgtggaaaacttgattgccctatca

SEQ ID NO: 7521 - DNA, 825 bp, Glycine max
  misc_feature (790)..(790): n is a, c, g, or t
gtttccttcttcaacttgtgctccttctaagtgctactccctccctatattcgtgtgcctccctcggcccccccccccaatttgaacctctcaccttgctcatcatctggaatttatttggcagtcatggattattcatcatggattaacacttccttggatctcaacattaatctccatagggttcacgaagaacttcccaaaaagcaggtggaaaacaattttttctcattggatttggaggtgaagaaatcttctgtaaaacaagagtcagcaggtgccttggcggaggaactgaagcgggtgagtgcagaaaacaagaagttaaccgaaatgctcacagagatgtgtgagaactacaacactttgcgaagcaatttgatggaatacatgaggaagaatcctgataaggagctcagctcatcaaggaaaaggaagtctgcaagcagcaacaacaatagtactattccaatgggagtcaacggaacctctgaaagcagctcaaccgatgaggaatcctgcaagaatccaaaggaagacatgaagacaaaaatttcaagagtttatatgaggacagaagcatctgatacaagccttattgtgaaagatggatatcaatggaggaaatatggacaaaaggtgaccagagataacccttctccaagagcatatttcaagtgctcttttgctccaagctgcccggtcaaaaagaaggtgcaaagaagtgtggatgatcaatctgttctggttgcaacttatgaaggagagcacatcatacacacccttctcnatgggaggtacacaggttccaccgttcagtatcat

SEQ ID NO: 7522 - DNA, 1584 bp, Glycine max
tcgagtcagctacgtaggcccccccccccgaaactttcgggtcttatctccaattgcaacatactaagtgggttggctggtttagatctgagcaacagcttttaattttctacttgcttgaattttattggaagccatggattgttcatcatggattaacacttccttggatctcaacattaatccccgcagagttcatgaagaagttcccaaggaggtagaaagcgagcttttctctttgggaatgaccaagtttaacgtggaagaagagtctactagtgacttggaggaggaactgaagcgggtgactgcagaaaacaagaagttggccgaaatgctctcagtggtgtgtgagaactacaacactttgagaaaccatttgatggaatgcatgaggaaaaatggtgaaaaggaggtcagcccaacatcaaagaaaagaaagtctgaaagcagcaacaacaatagtaatttgatgggaactaacaatggaaactcagagagcagttctactgatgaagaatcttgcaagaaaccaagggaagaaatcatcaaagcaaaaatttcaagagtttatgtcaggactgaagcatctgatactagccttattgttaaagatggataccaatggaggaaatatgggcaaaaggtgaccagagataacccttgtcctagagcatatttcaagtgctcttttgctcctagctgccctgtcaaaaagaaggtgcaaagaagtgtggatgatcaatctgttctggttgctacttatgaaggggagcacaatcatcctcagttttcttcccagatggaagcaacatcaggttctggccgtagtgtgacccttggttcagtgccctgtaccgcatctctcagcacttcaacaccaacacttgttacccttgacttgacaaaatctcagggaagcaacgattccaagagcacaaagcctaaaggagattcacctaaagtacctcaggttttggtggaacagatggctacttctttgaccacggatcctaattttagagcagcacttgttgctgccatctcaggaagattgttgcacaataattaaatggaattttggtgaagtgttgctaatttagtgtcaattgtttaagtattccataaaatagagatcattctttagagcaaggggtctctctatgtaaatacaacatggaaggctgggacatatttgatcctttaaagtggaaataaagttccactaaggatgacatgttgagctgattaaacaacagaaaatcaagctctgcaccaccctctgcctcatcatgatggtaaagatttagcaagtcttttttggctaatatatctaggatacctcaaattaaatttcatagtaggttgtagcacacattctcggaaagatctttcataaagtgcatctctacggcaatttaatttctcccttttcttctctcactactctctctggcaagccaactctatatctagtcctagttttagaatttcatttcagaaattatattatacattgatcaagtattataagtgatggaatgtaactcaaaacatggaaaaaaaaaaaaaaagggcggccgc

SEQ ID NO: 7523 - DNA, 2052 bp, Glycine max
  misc_feature (2022)..(2022): n is a, c, g, or t
tcagctacgtaggcccccccccccccattaatcattgattgtcgtgtgttgaattcagaaggtggtagaaagcaagcttttctctttgggaatgcccaagtttaacgtcgaagaagaggttagttgagctagttaattaattgatttattttttactttcttcaagatcatttatcagattgtagaacaattaattcaagggcatgtttacttttgttgtttcaattgtttttatttttaaagatttgtacagaacagataactgtattctgtgcgaatctttgaaaataaaaaagaaattgaaaacaaagtgataatcttataaattaaaagtgaaagaagaaaataaaaacatgaaatgaaaacagaagtatatgattcttttggctaaaaatatacgagataaagggtcctaatatatggatggtattgttggtggcatttcagtctactagtgacttggaggaggaactgaagcgggtgagtgcagaaaacaagaagttggccgaaatgctctcactggtgtgtgagaattacaacactttgagaagccatttgatggaatacatgaggaaaaatggcgaaaaggaggtcagcccaacatcaaagaaaagaaagtctgaaagcagcaacaacaacaacagtaatttgatgggaactaacaatggaaactcagagagcagttctactgatgaagagtcttgcaagaaaccaagggaggaaaccatcaaagcaaaaatttcaagagtttatgtcaggactgaatcatctgatactagccttgtgagtctctttactagtactctcctttggttctttgacatagcatagactatttaaatagggtaagtgtttgacagatttttcattgtatgtggttttagattgtgaaagatggataccaatggaggaaatatggacaaaaggtgaccagagataacccttaccctagagcatatttcaagtgctcttttgctccaagctgccctgtcaaaaagaaggtaaatatatataaccaagtgctaactggtttggttattcacatgtttgtagggaaatggatctcaagctaagattggttttgctttttcgtttggttattcaggtgcaaagaagtgtggatgatcattctgttctgcttgctacttatgaaggggagcacaatcatcctcaggcttcttcccaaatggaagcaacatcaggttctggccgtagtgtgacccttggttcagtgccttgttcagcatctctcagcacttccactccaacacttgttacccttgacttgacaaaatctaagggaagcaacgattccaagagcacaaaacctaaaggagattcacctaaagtacctcaggttttggtggaacagatggctacttctttgaccacggatcctaattttagagcagcacttgttgctgccatctcaggaagattgttgcacaataattaaatggaattttggtgaagtgttgataagttagtgtcatttatttaagtattccataaaatagaggtcattctttagagcaagggatctctctatgtaaatacaacatggaaggctgggacatatttgatcctttaaagtggaaataaagttccactaaggatagatgttgagctgattaaacaaaagaaaatcaaactctctgcttcacccatctgcctcatcacgatggtaaagatttagcaagtcttttcttggcctatatatgtatcaatgatatctcaaattaaatttcatagtaggttgtagcacacattctctgaaagatctttcatacagtgcatctctacggcaatttaatttctcctttttcttctctcactactctctttggcaagccaactctatatctcaaatgtttaattgtacagactcggcctccaagtcctagttttagaattttatttcagaaattatattctacatcggtcgagtattgtaatttgaatgcaactcacagcatggaagaatgaaaaaagggggaccacatgattagagttttcgattcnaaaaaaaaaaaaaaaaaaaaaaaaaaaaaa

SEQ ID NO: 7524 - DNA, 2826 bp, Glycine max
gcgagatattgtgtgcttgcttagagaggttttggttccgcagaagattctgaattctgatgctctagtgcgattccatgggagaggtggtcatcatgagtggagagaagaagtcagttagagtggagggggtggagaaggaagatagtggtggaagtgggagcaaggctggtgaatttaaggggttgatgaggtgggagaagttcttgcccaagatggttttgagggtgctgttggttgaagcagatgattccacaagacaaattattgccgcgcttctcagaaaatgcagctacaaaggttatgtgatggggatctgggttcaatgaaagtctaaggatctaatggctcctttccacttgctttaagagtcttggcagtctggaaactacaggcttacatgatagtgatacaattattttcttacatgatatgattattttcagttgtctatttgccataaagaatttctattattgacctttgttcttgtatgaaacttttaatgtgagaaaatgaagtacttgaaactaatttacacaatattagaacttcaaaataactttgctcatctgctttgagcagtggttgctgttcctgatggcttgaaggcatgggaattactcaagggaagaccgcacaatgttgatctaattctgacagaagtggatttgccatccatatctggctatgcacttctcacattaattatggagcacgagatttgcaaaaacatccctgttataatgatgtcttcccaagattcaattagcacagtatacaaatgcatgttgagaggtgctgctgattatcttgttaagcctattagaaaaaatgaactgaggaacttgtggcaacatgtttggagaagacaatcatcaaccactggtattaatggcctccaagatgagagtgttgcacaacagaaggttgaagccactgcagaaaataatgctgctagtaatcgttcaagtggtgatgctgcttgcattcagagaaatatagaactaattgagaagggaagtgatgcacagagctcttgtaccaagcctgactgtgaagctgagagtgaccctgtcggtaacatgcaggaattttctctgctgaaatgtggggaagcatatccaagtggaacagagacacaacaggttgaaacaagctttcgcttaggccagacattaatgatgcatgacagtcatgctggaggattaaatgtgagtatccgcaaaaatggtgaggcaagcacgactaatgacaaggatactgatacagagcattttgggaatgctagcatcagtggtgaggctcatgacaatccctatgttcaaattaactcttccaaggaagctatggacttgattggagcatttcatactcatccaaactgttccctgaaaaattccacagttaattgcacaggcaactttgaccattctcctcaattggatctttctttgagaagatcttgtcccggaagctttgagaataaactcactgaagaaaggcacaccctgatgcattctaatgcttcagctttcaagcggtatactaccaggcaattgcaaatatcaatgcctgcagtgttaattaacttctctgatcaacaaagagaacagataacaaattgtgagaaaaacatctcacacatcgctactggcagcaactcagatagttcaacacctatgcaaagatgtattgtgtctccaactacagtccaatcaaaagaatctgaacttgcaacctcacaccccccgcaaggacattctctcccaattccagtaaagggtgtaaggttcaatgatctatgcacagcctatggttctgtacttccttcagtgtttcatacacagtcaggtccaccagcaatgccaagtccaaattcagttgtgctccttgaaccaaactttcaagtaaatgcattttatcagtcaaatatgaaagagagtagttcagagcagctttatgaatctcgtggtccaaatggaaacaccacccaaaaccacattgtgtacacacaggagcacaaatcagaacatgcagaagatcgaggacatatctctcctacaactgatcaaagtgtgtcaagtagtttctgcaatggaaatgcaagccatcttaacagcattggttatggaagcaactgtggaagtagcagcaatgttgatcaagttaacactgtctgggcagcttcagagggaaagcatgaagacctcacaaataatgcaaactctcatcgatctatccaaagagaagcagctctaaacaaatttcgcttgaaaaggaaagagagatgctatgagaagaaggttcgatacgagagcagaaaaaaactagcagagcagcgtcccagagttaaaggacaatttgttcgtcaagtgcatcctgatcctcttgttgcagaaaaagatggcaaagaatatgatcattcagatttctgactcactggagaggagagcatgaattccttagagtatatagttgcttcaaaattttgttttcctgaatccttaaataccagaagcacttaatctgtatatgctttctaaaaccgtttttcttatttgcccttactgtagatcgtgatatataatatacctgatgtattatatcattgtaattttacagtcttatagggatcttcgtgcatcattatttatttatttatttatttataaggagttgtttacttacaacttacaagttacaaggaccgactgatttatcttgtaagagtttttacatagtaccatagcattatgattttttataataactgccactaccagttaacttttatattttattcaaaatttgcacctttatttt

SEQ ID NO: 7525 - DNA, 1305 bp, Glycine max
cggctcgagcggctcgagctcgagccgaatcggctcgagagttgattgatctctatggttgcacattttggtgctggggttttcctcctaattcaactaataagcataatcagcttcattaactggctgactgattgttttgactctgaaaaatatgcagaaaaatgccaaatccaggtgatgttatttgcaactatttcatattttatctgcttggtggggatcattttgatgtacatttggtatgcgccacaaccatcttgcctcctcaacattttcttcatcacttggaccctagtgcttctcctactcatgacaagtgtatctcttcacccaaaagtgaatgctggcattttaagtccagggttgatggggctctatgttgtcttcctttgctggtgtgcaattagaagtgaacctgagggagctgaatgcatcaggaagtcagaatctgcaaacaaaacagactggcaaagcatcattagctttgttgttgcaatactagcacttgttgttgcaacattttctaccggcatagattccgaatgctttcagttcaggaagagtgatccgccagcagaagatgatgttccatatggttatggcttcttccacttcgtttttgccacaggagcaatgtactttgcaatgctattgatcggatggaatagtcatcattctatgagaaaatggacaattgatgtgggatggaccagtgcatgggtcagaatagtaaatgaatggttggcagtttgtgtctacttatggatgctggtagctccaatcatatggaagagtagacatgctgattctacatgagaacttccctgttatctctattctggtttgaaattgtgaggattaagatcttaaaatgccacatatatttgctgcacatgtagtggactcctccagatactgctcttaggaaaaaggaatcaacaccctgcaaatttgatgtcagaagcaatggttctgccaaaaatgcacataagctgttgggtttgttacttgaagctacacagtacctgttcatttatccctgatcactgaaggagtataaagtaacttagcaaccatttagaggatgctcatcagaaagttcattcatgatttgtcaatttatcagagtaattttgttgtgagtgaatcatcatatgttcaacataaggtaagcagtgtattaccatttgtcagtgacaaataatatagaagtcacaatcaatgaaacaccgagtctgagttcattgtttttttttaatatatttatttgtaccatgttaaaagaaaaaaaaaaaaaaaaaa

SEQ ID NO: 7526 - DNA, 2532 bp, Glycine max
atgcacgcgcacgcaagcgtaggcttggaattggggtcgagcgaacaaaacacttacctcggcaccgtttccgcggaaccggtccaagtttcagtcctaaagccgcattgggacacactaaccccagcacggagtgtgtcccatcacaattctccccctttcagaagcttgcaaacacgccgttagctttaaaaaggaaaaataggaatatagcacgttggagcatcatttctttttctttacagtccctcgcttcacgcgttaagaagagcccaaagcgaattcgaacttagatcttaatcttcacttgttcttcgatctcgcgaaccagtgagctggagtttcaacaatgatggagaaggcagactctgtgcagaagctgtacacgcgcatgcgactctgggaatttccggatcagtatgtgattgagccaacggatggatcttctggttcttctttggctgttagtcgagtcgatggctccatgaagctcattgatgagcttccagaatgcagcacgcttcgagttcctaagatttacacgatttttggtgttgttgggatgttgaagctgttggctggatcatatttgctggttataactgagcgtgaatctgttggatcttacctggggcatccaattttcaaaatttctaaattgaaggtttttccatgcgataattctcttaaaaatacccctcctgaaaagaagaaaatagagatggaattttctgggctgcttaatgttgctgagaaaacctctggtctgttcttctcatatgaaactaatttaactctgagtgcacaacggttgaatgacctgggtgatgagtctagattgcttcctctttggagacaggcagagcctcgattcctatggaacaattatatgttaagaagtgctcatagataacaagcttgaaccatacttgctccctgtagtccaaggcagctttcatcactttcaagcagccattgggaaagatattattgatgtcactttgattgctaggagatgcacaagaagaaatggaacccggatgtggagaagaggagctgagccggcccgcgcggccgccaattttgtggaaacagaacaaattatgcagtttaatgggtatactgcttcatttgttcaggtccgtggttcaatcccactcctctggcagcaaattgttgacttaacttataaaccaaagtttgagttattgaaacttgaggaagctccacgagtcctagagaggcatttcttagatttaaggaaaaaatatggggcagtattggctgttgatcttgttaacaagcatggcggagaagggcgactgtgtgaaaaatttggtgatgcatcgcagcatgtggctggtaatgatgtaagatatctgcactttgattttcaccatgtctgtgggcatgttcattttgatcgtctctcaatcctgtatgatcaaatttcagatttccttgagagaaatggatatcttctgttgaatgaaaaaggagagaaaatgaaggagcaacttggagttgttaggaccaattgtattgattgtttagaccgtacaaatgtaactcagagcatgataggccgaaatatgttggaatatcagcttagaaggcttggtgtctttggtgctgaagaaaccattagttcacatccaaatctggatgaaaactttaagatcttgtgggctaatcatggggatgatataagtattcaatactcaggaactcctgctcttaaaggagactttgtcagatttgggcaccgcacaattcaagggatactacaagatggtgtcaatgctcttctacgatattatttcaataattttgttgatggaacgaagcaggatgcaattgatctcttgcaaggacattatatagtttctgttggccgagatacagctgccacttctcagaaaggaggccttgaagctatagcttcatttcctctggctttgggtctggttttgactggtttcctctttgcaaccatgtcactgaggcaagttcaatatgatttccggcacatcttcttttcgctaatgtgggcgggcattagcatcggcatagcagcatttgtgagggccaatggccgtgttttctgcaacaggcctcgcctacacaacccccggtgataacttctattcagaccagtttgggcaatttatgtgaagtgtccagcttctgcagcagcagtcaccggcagaggccttagttctacatctagatcactttaacgatcaatatttacatgaggctccttcttgaagcttattatatttattctttcttactaatttgtaatcactgtagcttccagatttatattcatatcatcatagtcctaccgaatcccatttgagtgattgctactttactggtgtttctgacacaccgtatcctccctgtatatctgagtttttatttgtggcgtctttaaaagattatggaaaaatttgaaggttcttaggaaacacattgatttgattatcttctactctcttaagtaaaaaatttcttgattcagaa

SEQ ID NO: 7527 - DNA, 1867 bp, Glycine max
tctttcctgccccgctgtactttgcttcttctttctttatccgttccttcttcatcatcatcgtcgtcattctttaatcctggcaaaaaaaaattacgctactttcgttgcgatcgtttccaatttcatgcgctttcttgtgtggggtggattggtggtgggttggttgattttaggtttgggaaagaacgcgtgactttgatgattacgaggattaaattgcatcaacaagtctctatgatatggatcaaatgagtcaacaaaggcctggctattttcattccgaaagtttccatttcagaggcagcaacttctctcagctacgtaggcccccccccctgacagcctcagggaacggaactaatctagattcccattatttactagatgcttatgacaatggtatggtgtatggaatgacacaatacaatggagttcaacatcaacataatcttgatatgggtgttccagctgcggccaacttatattattctagcatgaatccttcatctggtgcggctgtatctctaaatgctgaagttaggagaggaaattatcaatatttcaatgcctcggctagttcttcagttgctccccctaacgcaagacacactgaaaatggcatcccctcgctaccacattgcacttcgtggagcagatcaggcgagtctatgatggtgcgtgaccctaaccgtataactcgagtaaattatttaagtcaacactttcaaccagcagctcctcctccctggctggaccagcagttgaatagcaataataatgatggtcatgctttgccttggcatcagtctcttccaatgccatatgtacaagctcccagtgctaatggaagttcattagagaatgcaagaatgggcccccagagatatcatgatacagctggcagcagaagtggccacagatttcctcatcctcctcttgtcaacccacactatcatagctttcatcatcaaacacagcctgtgcaagaaatgagaggtcactccatcaactttcacccccctcctccagtaactgcaccttcatatagagttccaacaaatgcatcacgaagttcttcaatcttcatacaagatgctattgagatgggtgctaggcatgttggcgctgcaccatttgctggttcacgtatataccgaccccataggggcagcacacatgagactactcttagacatcgaaatcttcctcccgtgacttttctccaagttgatgatgttactttactggttgaccatcataatgatatgcgcttggacattgaggatatgtcttatgaggagcttcttgcattaggggagcggattggcaaagtaaacacaggtttgtcagaggaaatgattacaagtcaaatgaagacaaaaacttatttattactacctactaatgctattaacttggaggaggcagcttctgaggaacaggaaaatgattcttgcataatatgccaggatgaatataaaagccaagaaaagattggaattcttcaatgtgggcacgaatatcacgcagattgtttaaagaaatggttacttgtgaaaaatgtctgccccatatgcaaatcagaagcattgactcctggagagaagtgtgtataaaaaacaatgagatttacatgtctctttgttcctacatgcacacttctaagctactacatttttctaacgaattcatattttgttgtgtatatgaacactcgtacatatagacagtcgcattgtccaactcatttatttgttggcatcaaaacattgtatgtatcaagttgtacagacttctgttgatatattaactttaggcaattacattgttgctattttttatttttaaaaaaaaaaaaaaaaaa

SEQ ID NO: 7528 - DNA, 1942 bp, Glycine max
gtggtagtctatatatgatgataatacatcataacaatgtgattttttcatcttttttcaccatttgactacataataacagttataagtattctatttgatatttcattaaataaaaaaatttagcttataaaatattatattttaaaaaataatatataaattttattaaatattttaactagtaaatctaactcaatctgtttaaaaaaaccaattaatttggattagatattaaaaatttactcaaaacaactctttcaaatttaattagaatggatcataagttttatcaaacctaacccaaaatgactcacatactcctattataatttcataaaactaaaaatcattgcatataataaagcttattaatttttaaatagattacattaagatctacatagaaattaaattcttacatgtagaaattacacatgacttttcaatatagaaccaaattaagcataattacttcgcccaatccataaagaagttgagattctttgatgactgaccaccttctagtatgttatttatggtcatgtctttcaatttcaatgacctagctttgatgtcttcatcaacaagcagttgatccaccttcttccttatctcttccctagaaattattccattttcatccttgtctagtccaagcccaatcttccacacatcacatatatatgacttgtcaagatattgatcagtggcgcatggccaacacaagaaaggtacaccggcacatataccttctagggtagaattccaaccacagtgactaatgaagctagccaatgcagggtggttcaatatcttcttctggggtgcccaaccaactattttacctttgcttccatggaaatcatgtgcgtatgcattaacattttccttgttgtcattacatggacgtacaacccaaatgaaaggcttgtcaaggagatcaagtgcaagagctaattctttaaattggtttggatccattactgccaaactgccaaaggaaacatatatgacagattgaggtggttgttgatctaaccactctaagcaagttgtatcttcttcccaaaatgcacttttgctgttgtcactttccatcaatgggccaatgggtaggaactttggtgatacggaaaatgctccaggctcaagatcataagtagtgttgcaaagccaccactctcctaactccaaagttttcatctcttgcacaagatggtcaaagaagatcttattaaagccacgccatggaaagttttctgtgtctatcagaggcatgtttggagagagttgaatttcttgtgttttggtgggaagtccttgagaatcaataatgccatcatgaatcagctttgggatgcaagcagcagaagccaaggaagttgcagatgctggacagagaagagctcctttgattcccagtttgtggccaacttccaaaggccaacccatattaaatgtaacaataatacaggtgatcttattgtcagcatccaaggcattgatatcttctatgagctttggaagcaaagcaggcatgttgcttttgatagacaaaagaagttttgtcacatcacttctgtcatcttcagcctccaaaccatcaggaagagtcaccaactttacttgtgaatgctcgaggttgtcagcaccagaagtctttgttcgtttgaggctgaactcagtgtgtacaaaagtgaccttgcaaccatgtttaaccaaaagcagagaaaattgcataagagggttcacatgtccttgaactggaaatggtatacaaagaaagtgagggatacccattaatttgcatgaactagtgttgatgggaaacaaaagatttattattagatgactcgaagatcgaagggcgtgattaattattattaatttgttgagacaagagggcttggatgaaataatgtttgtagtttatatgcat

SEQ ID NO: 7529 - DNA, 1708 bp, Glycine max
tcagctacgtagcccccccccgcgcccgcaaaacttctctctcacactcactttctctctctataactctttctcacccgctagggtttccttttcatcgcatcttgagtttgcaacctcgtcttgtgatttccatggagggtgctgggatggaagagaataatattattaatgatgatgataataataacaagtctgaggcgcatttgacttctgccgctgcttttgtggagggtggaattcaggacgcttgtgatgatgcttgcagtatatgccttgaagctttctgtgatagtgatccttccacggtgacgagctgcaagcatgagtttcatcttcagtgcattctcgaatggtgtcaaagaagctcccagtgccccatgtgttggcagcctatcagtctcaaagatccaacaagccaagaattacttgaggcagtggaaagagagcgaaactttaggttcaatccatctagaaatgccacaatatttcatcatccaacactgggggattttgagttacaacatttgccagttggagctagtgacgctgatcttgaagagcgtataatccaacacttagcggctgcagcagcgatgggaagagcacgccacattgctagaagagaaggccagagaaacaggtcatcagctcaaggtcgcccacattttttggttttttcaactaatcctaattcacctcccatggctcctgcttcttcctctccatctcagaggggggatgatgaaccaattcctacaattgctgttgccaatctgtctccaactcctgcaactggagaagaatcatcacagctgactttagttccgcctattcaagcagaacaggtgtctgcttcaggatctggatctactgctcttgctacagatcatcagggatcatcttacaacaataggagatctcctaatcagtcatctccaagtagtcaagacagagcagggccatcagaattacaatcattttcagaatctctgaaatctaaactgaatgctgtatcaacaagatacaaggagtcaatttccaagagcacaagagggtggaaggagagatggttctctcggaacaacactatgtctgaccttggatctgaagttaggcgagaagttaatgcagggattgcaactgtgtcacgcatgatggaacgcctggagaccagcgacaataatagaagcaatagcaattctgcccccagtaatatagaggatggttcagttcaggaatataatggtcaaactttaacaccaggcaatgaaggggacggtcttttgagagacaataacacaaaagcttcttgtgctgcaggctctagttcgaactaggcatgtagaaggaattgcttgaactctgaatttgttttgtccaaaaggtagaaatagaattgcccattggggatgtgaaattccatggatgtgatgcattgcctattggctggcgcagaccaggcaagtgataatccattggcctgcagaagaagaccaacaattgtgatattggaaataaaaaaacttaaaaaaggcagcagtggtctctttcgtttgaaacttaggaacctatatatgattgtatattcacattgtaaacttatttatagatattcctcagataatctttacatgaattgctgtgtttccttcttctacttctagagataaatcactctttttggatcaaaaaaaaaaaaaaaaaa

SEQ ID NO: 7530 - DNA, 2586 bp, Glycine max
ctctctctctgtgtctctctcacattcccgcgcctccgcctttccatcggttttttccatgatgggcattgaacagaaactgtagaagcctgtcgaacagtgaattgtaatagtggtaaaatgaaagaatgaatgggtatatatatgtgtgggagtatacagatatagatatagatatggtggtgcagctgtggtgatttggcattttctggtttttgttcggtgcttgttggtattggttggtttgttggttccatttgatgtttacatagaggagctagcttagccactttcggcaaaagaactcacagagatacatttacacaaagaaagaacgcgtttactgtttagagaccaaaccccatcttttgtaccactcaatgaatcattagtccatactcaaactctgaaagcgagtgtttttttagagctgagacaaatagtatatatttgagtttgggtgattggagaagaaactgaagaagagagattgcaaaatgagagtgtgctgtcttggttggttgagcattcttgtcaaatgaggtttccctttccgaggtgatttatttggacacgcagattaaactgcatgcaattgacgcgcaagatgttttaaaagaccacgcaagaaagagaacaaaagaaaaagaaaaaagtcttgtttctaaattttcccaattttgaaggaaaactaaaagagaaaaatggattgtagtaacgagttggatatgcaagaaccgagcattgagacggataagcttagttacgaaatcttctccattctcgaaagcaagtttctcttcggctacgacgatccaaagctctggttccccaagcaaatacctcccaagccggaatctcagactccggcagctaccgccgccgtggactgcgtctccgcagtcaagaaccagcgcggcaagatatgcattctcgccatcgacggcggcggcatgcgcgggattctcgccggaaaagccctcgcctacctggaagccgcgctgaagaagaaatccggcgaccagaacgccaccatcgcagactacttcgacgtggccgctggcgccggagtcggcggcatcttcacggcgatgctcttctccaccaaagaccaccgccgcccgattttctccgccgacgacacgtggcggtttctggcagagaaaggaaacaaattctaccgcgcgggaggcagcgcaagcaaccgggggttgctgaagaggttactttccagtggaggttccggctcggtgtcgtcggcgacggcgggtttggagaaagcggtgaaggaagcgttcacggcggagaatggtggtgggagtttgactctaaaggacactctaaaaccggttctgattccgtgctacgacttatcgagtacggcgccgtttttgttctcacgtgcggacgcgttggaaacggatagcttcgacttccggttgtgggaggtatgtcgtgccacctcggccgaaccgggtttgttcgaaccggttcagatgcgttccgtggatggtcaaacaaagtgcgtggccgtggacggaggtttagcgatgagtaacccaacgggggcggcaatcacgcacgtgctgcacaacaagcaagagtttccgttcgtgcgaggcgtggaggaccttcttgttctgtccctcggaacgggtcaactattggaggtgagttacgactttgaccgagtcaaacgctggaaggccaaggattgggccaggcccatggcccgcatttccgccgacggctcctctgacctcgtcgaccaggccatcgccatggcctttggtcagtgccgcagcaccaattatgtccgcattcaggcaaatgggtcaagtatggggcgatgtggacccaatgtggatacagattcaagtcccggcaatgtgaagatgctgagtaggaatagcagaagagatgttgaagcaggagaatgtagagtcagttctgtttggaggaaagagaattggggagcagagtaacttcgagaaacttgactggtttgctggagaacttgttcaggagcatcagaggaggagctgcagaatagctcccactgttgctttcaagcaagctaacccaaaagcgacttaggccatccatggccaacaacagttcaaagaatcaacctaaagaaaaagtgaaaaaccgatataggaggaagcaggagcaagggaaaaaaaacaagaaaagaaaaaggcagatagtagtagtatagcagcttttcttttcaggatagacaaagaaggttagggagtcgagtgaaaaggacaagtggtgtaaaaagggtggaaaatctttgtgggatactttgccctctagtggacagacattgtggtgtccactctacctttctattagggtaagaaacgaagaaagaaaaagccagtgtctgagttgaagctttttagggtcaaacatgaatcaagtgtgaattttttatttttaaaatgagaattcagggtggtaaattggatcacattcttccattccattctacttttcttcttcttaaggatattttgtaaatctctttttcatattaaaaatgtttttatcgatgcttcaaaaaaaaaaaaaaaa

SEQ ID NO: 7531 - DNA, 764 bp, Glycine max
  misc_feature (667)..(667): n is a, c, g, or t
accagagaatagctcccactgcggctcgctctcgagccgattcggctcgagcttaggccatccatggccaacaacagttcaaagaatcaacctaaagaaaaagtgaaaaaccgatatagtaggaagcaggagcaaggaaaaagaagggaaaaaaaaaacaaaagaaaaaggcagatagtatagtatagcagctttacttttcaagatagacaaagaaggttagggagtcgagtgaaaaggacaagtggtgtaaaaagggtggaaaatttttgtgggatactttgctctccagaggacagacattgtggtgtccacactacctttctattagggtaagaaaccaagaaagaaaaagccaagtgtctgagttgaagctttttagggtcaaacatgaatcaagtgtgaattttttattttttaaatgagaattcagggtgggtaattggatcacattcttccattccattctagttttcttcttcttaaggatattttgtaaatctttttttcatattaaaaaagtttgattccctgctgcacagaaaagaaaagagaaagtaaaaagaggttaaaataaatggaagtattagtaagtaattacgtttcgggggggggccggaaccatattcgactataagagaggatattacgcgcgtaacgtggcgtntttataaacgtggattggaaaaaactggggtaagcatgtaattgcgtggatacagtgcgttgcgagatgggtaaaaggaagaagccggacaaagccg

SEQ ID NO: 7532 - DNA, 793 bp, Glycine max
  misc_feature (773)..(773): n is a, c, g, or t
catgagaactagagaggcctgcccaacagtaaattattataatatgcatatggtgctgcagctgtgctgatttggcattttctggtcttgttgcttgcttccatttcatgtttacatagaggagcaagcttagctactttcggcaaatgaactcagagacccaaagaaagcgagtgttgtatgttttagaactgagacaaatagtatatatttgtgtttgggatttgtcatcttggttggttgagcattcttgtcaaatgaggtaggtgatttattttgacacgcagattcaaactgcatgcaatacacgcgcaagatgttttaaagaccacgccagaaagagaacaaaagaaaaagaaaaagccttgtttcaaaaaaaattcccaattttcaaggaaaagagaaagagagaaaaaatggattgtagtaacgagttggaaatgcaagaaccgagcattgagacggataagcttagttacgaaatcttctccattctcgaaagcaagttcctcttcggctacgacgatccaaagctctggttccccaaacaaatacctacgaagccggaatctcaaactccggcggctaccgccgcccgtgaacggcggctcctccgtcaagaaccagcgcggcaagatatgcattcttgccatcgacggcggcggcatgcgcgggattctcgccggaaaagccctcgcctacctggaagccgcgcttaagaagaaatccggcgaccagagcgccaccatcgccgactacttcgacgtggccgncggcgccggggtcggcggca

SEQ ID NO: 7533 - DNA, 856 bp, Glycine max
ggctcgagctcgagccgctcgagcggctcgagcggctcgagagcagaaattcatacaggcttttaaattgatgttatttgcaaatatgtgtctcctaacagcaactgacttgaagcgtatttttgagaaagtggacgtgaatggcgacggattggtgagccttgaggaactgaatcgattgcttcagatgacgggcaattcccaatatagcatagaagagttggaatcacttgtggaaaagaaaagtcttggtttcagtgatttcttgttcttttacaactcaatatcggagcagaacaagggagagagcaaaggaagtgagttggagagcgacctggccaagacgtttgaggtgtttgacttggacggagatggtttcatcacaagccaagaccttgagtctgtcttgaagaggcttggcttctgggatcaaacacatgccaaggattgcagaaccatgattcgtttctatgacaccaatttcgatggtcgccttgattttcaggaattcaagaccatgatgttgctcaccaaagcttgaatatattcatcattcaattcattttccatctcaatcaataatactatgggtgcttttctgttctacaatatcatttttatggcctcaacttcttcactctgaaccaatcatgttatgtgtgtttttaaggttatgtcctctgctcgatgtatgcctagtgttgtttatattagttaattaagcccatgctactatcaagatacttctcctttgtttctttaactttgaggaaagaaaaagaaaattttttaaatttagattaaaaagaaaataaatgaaaagaaaagttcaggaatcatttgatttctatttccc

SEQ ID NO: 7534 - DNA, 1037 bp, Glycine max
gaaaaggataataagttatcttgccgcgtagccgcccagtgggaactcgcaattggcgactgctgctagaaccttcttttgttatctcgcaatggctgacttaagccccaagccattaccaaacctataaatacacgccttctttttattcttcttcttcaattcatattcataatccacatttattcatcagtttttcgttcccttcacaaaactcagaaccctaactatatccatggcatcgggtggaacagaagcttttccagatttgggtaaacactgccagcaccgcgattgcaaccagctcgattttcttcctttcacctgcgacggttgccaacagatcttttgtttggaacacagatcctacaagtcccacgcgtgcctgaaatccgaccacaacagcagaaaggttgttgtttgcgaagcatgttccatgtccatcgagaccaccggccatgtgggacaagacgaggaggcaatcttgcagaagcacctcaagtctggtaattgtgaccctaccaagaagaagaaaccaatttgtcccgtcaagcgttgcagggaggttttgacgttttccaacaccagcacatgtaaaacttgccacattaaggtgtgcctcaagcatcgtttccctgctgatcatgcctgtagcagaggagcttcagcttcttcatcagcttgtgtttctaatggtttgtggaacaatcggttcttgactgcttttgccaagaggactggacaagaatgtgccaaaaatggtgcaacttgttctacttctcctcctagtacaccttctgttaaggcctattgattgctacatgcttgatgtgttacttattgattcttgggtggtttgatggcaatacagtattgctttacagtgtaatttgaatgttcatgattacattgcatccatgaactacgatattgaaatcatctgtattgggatttgttttgatttggatcatatctgtcattgtacacaaacaaggttttaaatttcagtggaggttgtcacaaaaaaaaaaaaaaaa

SEQ ID NO: 7535 - DNA, 823 bp, Glycine max
cccaatttgccaaccaaccacactcatagaactaaagcaaagtgactcaccaattcacacacataataaactcactgctcttctctctacccctccgaaacccgacccgaaaatgcgatccaaatcggatcccccggtgccccctccctcctcctccggcggaagcgacccctcctccggcgcatccatcgatccgatcttccacctcctccgcgtcctccccttcagcttcctccgcccccctcgcctccgcctcaagcttccctccttcaccctcccctccccgaacgccgtcttcgccctcctcctcctcacctacttcatggtcgtctccggcattgtttacgacatcatcgtcgagccccccggcatcggctccactcaggacccctacaccggcgccgtccgccccgtcgtcttcatgtccggccgcgtcaacggccagtacatcatcgagggcctctcctccggattcatgttcgtcctcggtggcatcggcatcattctcctcgacctcgccctcgatcgcaaccgcgcgaaatccgtcaaggtttcctacgcctccgccggcgtttcctccgtcgtgctagcttacgtcatgagcatgctcttcatccgcatcaagatccccgcttatcttagatgaataatggatccacgagattcctgagttttaattaatttgtagtttgactgaggttttcgttttcgcgttttctagggttgttgaattgaatatggatatagtaattggatctgatttggcgttatttatgtgaagtgcacttttttgaagtaaaattcccgtggttttgagtggacc

SEQ ID NO: 7536 - DNA, 1314 bp, Glycine max
attcccggaggaaagaacacaccaacaccaacactaaccttgttttcttcgtctttactcttctcttcacagaagcgtaaaaacaaaaggcttgactagagaaagagagagagagagcttcgaatcgaaactcagaagtagaaagaaacacaaatcacaatcgctatggctaggtacgaccgagcaatcaccgtgttctcccctgacggccatctcttccaggtcgagtacgccctcgaagccgtccgcaagggcaacgccgccgtcggcgtccgcggcaccgacaatgttgtcctcggcgtcgagaagaaatccaccgccaaactccaagactccaggtcggtgaggaagatagtgaatctggacgaccacattgcgctggcctgcgcggggctgaaggccgacgcacgcgtgctcataaacagggcacgtgtggagtgccagagtcacaggctcaccgtggaggatcccgtcacggttgagtacataacgcggtacattgcggggctccagcagaagtacacgcagagcggcggcgtgaggccctttgggctttcgactctgattgtcgggtttgatccctacactcactcgccctccctctaccagacggatccctctggcacgttctcggcgtggaaggcgaacgccaccgggaggaactcgaattcgattcgggagttcctggagaagaactataaggacacttctggccaggagactgtcaagttggctattcgcgcattgcttgaagttgttgagagtggagggaagaacatagaagttgcggtgatgactaaggagcagggtctgcgtcaactggaggaagccgaaattgatgccatcgttgctgagatcgaagcggagaaggcagctgcagaggctgctaagaaagcccctcctaaggagacataattttctgttttgtgttatgcgagcattgttcttgctaggtattggctgtactcactgaagctaaaaattgatgccattgtgtctgagattgatgcaaagaaaacggctgctgaggctgcaaagaataccctttctaaggagacatgattttatgttacttttatttagctcgtgaattgttcttgctagatgttggcctaacttaaaatgactgctttattgtttttgggtactgccattagtgttggtcatatttaattgcatgtcattattattgaagttcaattgagtagggtgatacacaacatcttcatagacaggagctggttctttatattgtggccaatacgactaatatattttcatagtttagaagaaaaaaaaatgacgtggaatggg

SEQ ID NO: 7537 - DNA, 842 bp, Glycine max
cgattgggtaccgggccccccctcgagtcagctacgtaggcccccccccctttttttatttgaagaaaatatttattattgaatcttgaagtacatgtacatctgtacatgacttgtttgcttgcctttaaagcctttatgtacatggtgtgtcttttacatcttaaaagtaaaaaatttggctacatgataaatctgatgattttatattggctttgtagaatactacaatcaaacagtgacatagataaagtagttctgcttattcctgttgcataattacagtatttctgtttgctaatagcttgttatgcgtctcaacaggaatatgtttaatatacttcactattgactttttaattaggttgttgagagtggagggaagaacatagaagttgctgtgatgactaaggagcagggtctgcgtcaactggaggaagccgaaattgatgccatcgttgctgagatcgaagcggagaaggcagctgcagaggctgctaagaaagcccctcctaaggagacataattttctgttttgtgttatgcgagcattgttcttgctaggtattggctgtactcactgaagctgaaaattgatgccattgtgtctgagattgatgcaaagaaaacggctgctgaggctgcaaagaataccctttctaaggagacatgattttatgttacttttatttagctcgtgaattgttcttgctagatgttggcctaacttaaaatgactgctttattgtttttgggtactgccattagtgttggtcatatttaattgcatgtcattattattgaaaaaaaaaaaaaaaaaaaattcctgcagcccgggggat

SEQ ID NO: 7538 - DNA, 1331 bp, Glycine max
tcagctacgtagggcccccccccctaaagaagcacaactcatctagaatcaaggatggatggcaaaaggacactcacaggagtcatatttcagattctttccccaataatgcattttcagatcgatatgatccttcagaatcccttgttatctgtgaggatgatatctcctcggactctaaatatatcaagtcagataaattttacgacaaggaaggttattagcattgtcttggtcagaactgggaagacactacacctgctgtggcttttggtaataacttatcaagcttcagcgatttatcaatgtatcctcctttgtatccttgattgtgaaagtgcatctaaacaagcttgccttggagtgattttattgttgttgtcgttactaatattattagtgtcttagagaataagtaataaaataccaattatgtcaaccacattagaatctattacatcgctagatttttgtagtttactctatgattgttttacttaacaaaaaaagatagtttttgaatcaattatggttatgcatgtgacgtgctaggagaaatgaaacagtttgaataatgctttactttggatattgaatcatttaactactactagatcaattatatatagttttgatatcttacaaaggctttaggtattaaggtgaagcagctgtagaggccactgaaaattatgtcttatttttttttggaaatgaattttatatctgtcagtgtctcacttaggagtgattgttttttaacctgtttgaacttccaagtattttttttaatcaacaatttccctgttgtgttctcttccactcacttgctcctaatcttagcttagaatttgccaaggttggtcaagctttgtcattatttagccttttattttattgcaagaaaatgtcttgagcattaatgcttttggttcgtctaattctttgtgttttgatttcagaatggcttgaaacaacaaaatctttcaatttctacctgaattcttccgctctttttaaatacttgcttcttcagagagacagattcttcaattgtctcactaggtttcttccttgtttagtagaagagatccagctgtgatgaagtgacttcaacaaaaatgatgtcaggttctgataaagtaaacccttgcgcatgccatatacaaagaggagggaaactagtgtgacaactgtaggctatagcctggcctagtgtatgatttacttcttaaaattgtgcaaattgcaaactcgttttccatttgtgttttttgctatcacttttaaagagtaacatgaaataatttgactaaaaaaaaaaaaaaaaa

SEQ ID NO: 7539 - DNA, 695 bp, Glycine max
tctttcagcaaaaccaaaccctagcagcactacttcaaaaagaacagcgccatagcataacccttcgaagtcgccgtttgttttcttttcgttcgcatcttctctctctctcagaaagatgaaggtggtcgccgcgtatttgctcgccgtcctcggtggcaacaacagcccctccgccgatgtcatcaaggaaatccttggctccgttggagtagaagcagatgaagataggattgaatcgtttttgtctgaagttaagggtaaggatatagttgagcttattgctgccggtagggaaaagttggcctcggttccttctggtggtggtggtgccgttgccgtcgccgcagctcctgggggaggtgctgctgctgctgctcctgctgctgaggcaaagaaggaggaaaaggtggaggagaaagaggaatctgatgatgatatgggtttcagtctcttcgattaattggtgtagtctattcagcttttttgttcagaacatattcttaattaacactagagcatgagtttgtcaaagttttgttctaaggagtaatttactgtgttttttaatatcaatgaccaaccaagttggatgaatttggtttgatattttagtgttttgatgttatggaatttcattttggtaaatctcagtcaagcttattccttgttttaaaaaaaaaaaaaaaaaaagc

SEQ ID NO: 7540 - DNA, 772 bp, Glycine max
  misc_feature (768)..(768): n is a, c, g, or t
gcaaaagcctgcgagtagacgacggaagcgcactacctcaaaaacaacactacaataacataacccttcgaagtcgtcgtttatctctcctcgttcgcatcttcaccctttccctgtctctcagaaagatgaaggtggtcgctgcgtatctgctcgccgtcctcggtggcaacaacaccccctccgccgatgacatcaaggaaatcctcggctccgttggaatagaggcagatgaagataggattgaatcgttcttgtctgaagttaagggtaaggatatagttgagctaattgctgccggtaaggaaaagctggcctcggtgccttctggtggcggtggtgccgttgccgtcgccgctgctcctggtggaggtggcggtggtgctgctccggctgctgaggtaaagaaagaggaaaaggtggaggagaaagaggaatctgatgatgatatgggtttcagtctcttcgattaattggtgtagtctattcagctttttttagtccagaacatattctcaattaacactagagcattgagtttgtcaaagttttgttctaaggagtaatttagtctgtttttatatcaatgaccaaacaagttggatgaatttggttttatattttagtatctttaaagttatggaatttcattctggtaaaatctcatacacgcttattccttgttttactttttgaatatagttattatgttaagtgacaaaaattaatgaattatgccattaaaattacgccccaaaaaaaaaaaanaaaa

SEQ ID NO: 7541 - DNA, 719 bp, Glycine max
  misc_feature (446)..(446): n is a, c, g, or t
  misc_feature (448)..(449): n is a, c, g, or t
  misc_feature (453)..(453): n is a, c, g, or t
  misc_feature (457)..(458): n is a, c, g, or t
  misc_feature (464)..(465): n is a, c, g, or t
  misc_feature (467)..(467): n is a, c, g, or t
  misc_feature (469)..(470): n is a, c, g, or t
  misc_feature (496)..(496): n is a, c, g, or t
  misc_feature (500)..(500): n is a, c, g, or t
  misc_feature (504)..(504): n is a, c, g, or t
  misc_feature (510)..(510): n is a, c, g, or t
  misc_feature (514)..(514): n is a, c, g, or t
  misc_feature (532)..(532): n is a, c, g, or t
  misc_feature (540)..(540): n is a, c, g, or t
  misc_feature (554)..(555): n is a, c, g, or t
  misc_feature (559)..(559): n is a, c, g, or t
  misc_feature (562)..(562): n is a, c, g, or t
  misc_feature (575)..(575): n is a, c, g, or t
  misc_feature (578)..(579): n is a, c, g, or t
  misc_feature (582)..(582): n is a, c, g, or t
  misc_feature (584)..(584): n is a, c, g, or t
  misc_feature (589)..(590): n is a, c, g, or t
  misc_feature (592)..(594): n is a, c, g, or t
  misc_feature (596)..(601): n is a, c, g, or t
  misc_feature (603)..(612): n is a, c, g, or t
  misc_feature (614)..(615): n is a, c, g, or t
  misc_feature (617)..(618): n is a, c, g, or t
  misc_feature (620)..(621): n is a, c, g, or t
  misc_feature (623)..(624): n is a, c, g, or t
  misc_feature (627)..(632): n is a, c, g, or t
  misc_feature (634)..(634): n is a, c, g, or t
  misc_feature (637)..(640): n is a, c, g, or t
  misc_feature (645)..(646): n is a, c, g, or t
  misc_feature (648)..(650): n is a, c, g, or t
  misc_feature (652)..(652): n is a, c, g, or t
  misc_feature (654)..(654): n is a, c, g, or t
  misc_feature (656)..(656): n is a, c, g, or t
  misc_feature (658)..(660): n is a, c, g, or t
  misc_feature (663)..(664): n is a, c, g, or t
  misc_feature (666)..(666): n is a, c, g, or t
  misc_feature (673)..(673): n is a, c, g, or t
  misc_feature (687)..(687): n is a, c, g, or t
  misc_feature (691)..(692): n is a, c, g, or t
  misc_feature (694)..(698): n is a, c, g, or t
  misc_feature (701)..(706): n is a, c, g, or t
  misc_feature (708)..(710): n is a, c, g, or t
  misc_feature (712)..(719): n is a, c, g, or t
cttcaattccttgtctatcccctctggaaagtgggaaagaaagcagagggataggaagaaggaagaatggagaagtatttcggaaacgcttatcgtggcgacccgggcgtgccccattcggacccggatcgcttcgtcaacatatgggtcggatccgctgccttcgctgttctcacatatttcaatccctacatgtggcagctctctaatcagttcaattggcatgacaaagcaatgttatatgagcaatatcactggaaacaggcaaggaagaagaatcagccatatgagttcttgtggaacaagacctgggacaagaaccaccgggaacattactactacaactggcctatttactttccttaggccacttctatttcatttcttgcatactttgtcctatttattttggctgcaaacctggatcgcccccccccccccccccngnnacanaccnnggacannancnngcgggaccagactactacacttgccnattnactntcttangccngcttttattcattttttngctacttngggcttttagtttnntttngancttggattgcccnccnnggngntggtnngnnntnnnnnngnnnnnnnnnntnntnntnntnnttnnnnnngnggnnnnttgtnntnnngntntngnnnttnntnggttggntttggtgtgggggngggnntnnnnntgnnnnnngnnntnnnnnnnn

SEQ ID NO: 7542 - DNA, 936 bp, Glycine max
tcagctacgtaggcccccccccccccgagtggatgtgattatctgaattcagtgatgagggtgttgtcgttgagcccctccactttggctttgggtcgccactttctctgcaaaaccacctcacactcccacccttccctttccctcccacgcgccgcttccatctccgccactctcacgcgcccacccattcctcccaattcagatccccgcaggttccccttctcctccctcacctcttccaccaacactcccaacaacaatccctttctctctcactcccaaggtgctggtgctggtgctggcacgttcctttggaaccccgcttccgacaccccttacgccgcgctccacggaggcaaagaccgcgtcgccacggtggtgctgttggggtggcttggagcgaggaccaagcacctcaagaggtacgtcgagtggtacaattcgcgcggcattaacgcactcaccttcgtcgtcgacatcaaggagctgcttcgatttgacctcggccacgtgctcgagacccgaatctctctcctcgccgaccacctcgtttcttgggtgtcccgcgaggaacacgatgggagggaacgctgcctggtttttcacactttcagcaacacgggttggtttgtttatggttacattcttgcccgaatgctgggtagtgaggaactcatggagaagattaagggatgcattgttgattcgggaggaggagaacctttcaatcctaaggtatgggctgctggtttttctgcagctatattaaagaagcgcaactctttaggacccgtagttgaggtagaaggcaagcttaaatcagagactgaagttagcttgtcaaaggttcaacaaaacgaaccttccacaatcgaaacagtggtcttgtcactattagagaagttcttctcatttgttttgcagttgccagat

SEQ ID NO: 7543 - DNA, 2215 bp, Glycine max
aaagtagaactgatcaactaagaaggggatgctagttggtgtcaatcatgaggagattttgacttaaagccagcgtcggaggccccccccccgaaaatgcaatcaagattggaagaagaggaggaagccaaggctgctcttatgagtaggatccagaggctaaccaaactcattctggtttcctcaaagaatgcaattcctggatatctaactgatgttcccaaccatcagcgaagtcactctgttggcgaggatgatattgaaaatgagagtcagaaagattcttctgcagtgtcatcagatcagtttcatgatggtagacataaaagatcatctagtagatggaatgaagagctctccccagctagcagtactgttactgaatcaacacaagctggtgaactgataagtagaacaaaattgacagtgggtgggatgacaatgtctgatcagaaggatctactggttgaacaagtcaaaatgctagccggagatattgctttcagtaccagcactctgaagcgcttgatggagcaatctgtaaatgaccctgaaggctccaaaattcagattgagaacttggaacgtgagatccaagaaaaaaggaagcaaatgagggtgttagaacaaaggttaattgagactgaagaatctcctgtggctaattcatcgctagttgaaatgcagcagacagttacaaagttaatgactcaatgtaatgaaaaggcctttgagttggagctaaaatctgcagacaaccgtgtccttcaggaacagctaattgataagtgttctgaaaacagagagttgcaagaaaaggtgaagcagctagagcagcaactggcggcaattaatagtggtacattgtcagtgtcttctgaacagtgtgcatcaggagaaaacattgatgacttgaaaaagaaaatacaatcccaggaaattgaaaatgaaaaactaaagctagggcaagttcacttgtcagaagagaatagtgggttgcgtgtgcagaatcagaaactctctgaagaagcttcttatgccaaagaactggcctctgctgctgctgtggagctgaaaaatttggccggggaagtgacaaaactttcattgcagaaggcatagcttgaaattgaattgatggccgcgcgagacctggtcaactctcgtagtgctgttgtgcaaacggttaatggtgtcaaccgcaagtacaatgatccaagagctggaaggaaggggaggatttctagccgtgctaatgaaatttcaggaactggtgtagatgattttgagtcaaggagtcttgatgctgatgatttaaagatagaactacaggctaggaaacaacgagaggcagctctggaagctgcattagccgagaaggaatttgtggaagaacagtaccggaaaaaaactgaagaggccaagagaagagaagaagccttggagaacgatttagcaaatatgtgggtccttgttgctaagttaaaaaaagacgggggtgctgttccagaatcaaacatcgataaaaaaaatgatggcgcagaacacataaatggtccaaaaactaatgacgttgaaagtaatattgttcccaaggagcatcttttggatgcaccgaaaccagatgaggaaatgcccaaagaagagcccttggttgttcgcctcaaggcgcgcatgcaagaaatgaaggaaaaagaactcaagtaccttggaaatggtgatgccaattcccatgtttgtaaagtatgttttgaatctccaactgcagcaattctgcttccatgccgacatttttgtttgtgtaaatcttgttcacttgcttgttctgagtgtccaatatgccgcacaagtattactgataggatttttgcttttacataacagagggctctatcccattgaattaatatactccatgctattacgggtgcaattcttttattagtttgcctgtatgtaacggcgtttaaaaggtatatcaatatctttcttttatactaccccaggggaactgtattatagggggacaaagggggtgcggagaaagaatgtaaaaagaaaaaaggtgtaaacagcactgctgaagtacatatgcacaatatatgtttgctttatgtaatccagcagaattttgttgcccatcctctgtatgttctttactgagtgtaagagctgaggtttcttattgattccctcctgctgcaaaaaaaaaaaa

SEQ ID NO: 7544 - DNA, 824 bp, Glycine max
  misc_feature (810)..(810): n is a, c, g, or t
ttttttttttttttttataaatggatattctcatatatttagtaactataattcatgaatccaattacaacccgtaaaatatggcatatatataacacaatgatgtagaacgacacgggtatacccgtatttctgggatatatcttttacatcaaatgaacgcaaaatgaagcatgcatctagtacatacttgaacttatttaaatttgtggggtacaaaacgacattagaaagaaaacaaattaacaatagcaaaccataactgtgaaaatgaaacactaatcttagtaattatcatcacaaatctggaattattgaacgtacgtacgtaattaactcaattgatttttcaaggcttgttggcttcaacatgcttgaaaccaccaatgacaccaccaacaccaccaatagcacctacaccacctccaacccctccaaatccaattcctttgtaaatgcctcctccaattccaattcctttgtaaatgcctcccccaattccaccacctagaccactaccacctccaagtcctcctaaaccaccaccacctccacccacatctccaattcctccaacaccaccaatggaccctccatctaagcaattttctggcttcttgacctcttcctttgatttttcctccaagtttcttgcatcaacatattgggatattcccagcaccaaacatactcccaaaacaaccaccgaaatgaacttcctcttcatcactatcttataatctttaacaactgtgtgtatgtgctagtaattgtatacacacacctcactaggactactccctctggttngattaggatgttct

SEQ ID NO: 7545 - DNA, 617 bp, Glycine max
ttttttttttttttttttttttttttttttttgacatgggtaatttttgggatcttctgcatcaaatgaaattgagctagcatacacgtagctacgtacatacgtgaatttatttgtggtacagaacatattagctagaaaaaggaaacaaatttaacaatagcaaaccataactgtaaaaatgaaacactaatgattactatgatcatcacaaatctggaattattgaacgtacgtaattaactccttagttgattgatttttcaaggctttttggcttcaacatgcttgaaaccaccaatgacaccaccaacaccacctatagcacctccaccagcaccgccaatgccgccaatgcccccaacaccaccaatggaccctccatctaagcacgattctggcttcttcacctcttcctttgattttttctccaagttccttgcatcaacatattgggacattcccagcaccaaacatactcccaaaacaactactgaaatgaactttctctccatcactgatcttattctaatctttaagactttaactactactgtgtgtatatatgtggctatagtaattgtatacacacctcactaggactttctccctctcca

SEQ ID NO: 7546 - DNA, 1072 bp, Glycine max
atgttttcaattaattgcttagtggaacgagaaaggaggccaccagaaaagcatggcaattttctgcatcaagtatggatgcaacttatgagcctttaatttgtggtagcatataacaatcaactttggttcatcaaggtctgtccaaattcaatcaccaaatttaatcctctccctatttatgtaagtccacccactttatataccaaattgaaatttggtttgttcaaatttatcagcaagttatggtcaaggtgaatttctgcacccttttgctaccatgtttgaaaggttgagtagactaagccatgatctattgcagcttctgatttgttagtggttgaaatccttaagggtgatgatcaaaagggtatcatgcttcaaactagaatcaggactggtcatgccacaggtttggttctattgttactagtgttattattatattattatactactggtgagtaaattaaagtaactagagcttgaaatttcaactgcctttactggggaagaagcctaattgagtgttgaaaagtgatggtgttttattccaaagagataagggtgttggggcatggaccaaagacagcaagcaagcttcaagggtcaacaccccatgatcagcttttgatccaaacctcagattccttctctggcttgctgttgttcacaataggcttccttgtgttcatggttgcttgtgttaaggactgggagttccagagtttctttgccaaagggtgtgtgcttcttcacatctctatggctgtgtggagattctactttgaaggaaagcttgaggatcttgcacatgactggcctaggcatgctgttggggacattgcattggccacttcctggcttttctttcttgtgtacatgtggagggagaagtatgattagttagttattgttgtaaagtactataaatgttggggtctcacatctgaagaaaattctttggttttgtgttgtgatatgcttgtttgaatcatttatgtacattttgtagagttttcaatgtaagtttacccatatttgatctcaataagttaagaataaagtaaat

SEQ ID NO: 7547 - DNA, 1851 bp, Glycine max
ccctctttcctttccctcccccccgtacggctgcggaagacgacagaagggggatgaacaatcaaccaagaaaacagtgagcacagttcagttgcacaccttctctgtgcttcttcttcgatgttcaattacaataacaccaactcgcttcatgaaacaccccactccaatttcgccctgtcacaatcgcatcactcatgcattggccactgtcacataaccgcgatcgctggatacgacaccctttcgttctagggtttcccctccaccactatggccatcagaggcgtcaatttcaaatggttcgatggctttttcttgtccatgctcgccaccagcatagctattgtggcaattaattggaagcggtatcaatcttgtactcaccctttgcacatatggactgtggttgactacgctgctgttttcactttccggcttttgatgtttgttgataacgggcttgcttcgggaatgggtttagattttgggtggccgcagagatatgctcgcttctgtggaagagtagttgtactttcaattcttgcattgcttctctatccatttctttgggcttggacaataattggtaccctgtggttcagcaacactaaaatctgcttgcctggagggggccagaaatggggcttccttatctggttactttttagctactgtggactcctctgtattgcttgcttggcaatgcggaagtggttaaaacgaagacaagcacgcatgttaggtgctcaagagggtatccctgtatccgcatttggggttctagttgaaatgatccgagtacctgattgggcatttgaagctgcaggtcaagaaacaaggagtatggcccaagatgctgcatatcatcctggactttacctaactccagcccagagagaagcagttgaagctttaattcaggaactcccatcgttcaggttaactgctgttcctactaattgcagtgaatgcctcatctgcttagaagaattccatgtaggaaatcaggtccgtggcctgccctgtgctcacaattttcatgttgaatgcattgatgagtggcttcggcttaatgtgaattgtcctcggtgccgttgctcagtatttcctaatcttgatctcagtgctctgtccaatatccgttctgagtctgaacagtcttctgccactgctgtgacaagcagagatatgacaggacaaacttctagtcagagttaccttctgagattacaggggcctctccacccagtttgtgttgactttgcagggccagctggtgagacagacaatgctttggaaaatgctgaaaatggtgttgtacctgttgtgactcaaaatatgtcaactagagatcaggccacttctggtgaacacatgcctgttggtctttcctcttcccaaaattagattgcttctcaactctgttatattcctaacccattcgtgagaagttgcaggttacatatcagtatccagccattgcctgaagctttatatatgatgtactttctaacatgaaaatttctggactgattcataaagaaatggatcagcttcctttttttctgagggatcttgtagaaataaagacttgaagggtgaaaatataccttttttttacttcgctaagaatattatattgaatattttttcctacccttgtttttacctggggtaagaattcctttagtttttcatgtcttgaaaggtgggtttgataacttgatacaacaacaaagcttcatcccattagacgaggtcgattacatgaatcacacgacaccattttgacacggttaaaacccaaagtttcagtatatcgaaataaaagtagacatttgtttttca

SEQ ID NO: 7548 - DNA, 1903 bp, Glycine max
cttaaactcagactgtgagcgagactcggtagtaatagtatagtctacaaggtttcgtattctactacttgaaacctaactcttccttcttcttctacattactcctatggctcccgatgcttccgacgcacttgcagtaaggcagaaagttcaattatttctgaacgcggctcgtactggttcaattgatctcttgaagaaattggcgttgcagctggacgagggcaaggatttggcgaaatcggtggaagcaataaaggacgccaacaagagaggagcactgcattttgccgcgcgagaaggccaaacctctgtttgcgagtacctcttaaccgatttgaagctctctgtcgattctcaagatgatgatggcgagactgcactcattcatgctgctcgtcagggacataccgccaccgctaaatatctgattgaccacggtgctgatcctactgtggctagcaatttaggggccacggcattacaccattctgcggggataggagatgctgagctgctcaagtacttgctgtccaggggagttaatcctgatctagaaagtgatgcgggaacacctttggtttgggctgctggtcatgcccaaccagctgctgtcagtgtactgttggaacatggtgcaaatccccatgccgaaactgatgatggtattaccccactcctttcagctgtggcagccggttctctagcatgcttagagctgttaattcaggcaggtgctaaagcaaatataagtgctggtggagcaactcctttgcacatcgcagctgataatggaagtcttgaactattacattgcttattgaaagcgggagctgatcctgatgtctctgacgaggatggtgtcaagccaatacaagttgctgctgcaaggggctatccaaaagctgttgagatattgttccccttgacgtccaaagtagatactattcctacttggactgttgatgggatacttgagtatatgcaatctgaaactagaaagcaacaggatgaatcgataaatgccaaagaaactaatcagcccaaggaagctgattttccggagcaaaatgtccccgaggtggcacctgaagccaaaaagagagcagcagaagcaaagtcaagaggggatggggcttttaaaaggaatgaccatcatatggctatagattcttatacccaagcaattgatctgaaccccactgatgctactttgctatccaatagaagtctctgttggattaagttgggccaagctgagcatgctttagctgatgcaaaggcttgtagagctttaagaccagattggccaaaagcttgttatagggaaggggcagctctgcgtttgttgcagaaatttgatgaagctgcaaatgctttttatgagggagtaacgcttgatcctgaaaataaggagcttgtaaatgcgttcagggaagctgtcgaggctgggaggaaatttcatggaacggctgaaaataaatcatagtttagccttttgttaataccatgtttcagagagaagagatcaaaatattgcgggtggtgcagccttattcacttgatccttttttccccaatgtgtgtgtgcgtgttttctttaactagttactgtcgtataggaagagtcagctagtaatctgtttcattaaattgttttagtaattataaaggttatgcttatttgacatgttccaaaattgttgcagaattagtacacattatgaaaatggcaatgcaggttcatgggtatttctcccatactgttgtaggattcatttgtttaaagttcagaattttttttatagaattaattctgaattgtcaacatagttaagatgtgtatttaaagatttacatttaaacatatttttggttagcaagggttaatatgtttatggt

SEQ ID NO: 7549 - DNA, 1356 bp, Glycine max
cgcgttccggctcgaggctcaagtacttgctgtccaggggagttaatcctgatctagagagtgactcgggaacacctttggtttgggctgctggccatgcccaaccagcttgtgtcagtgtactattggaacatggtgcaaatccaaaccctcgcgcccgtgatggtattactccactcctttcagctgtggcagccagttctctggcatgcttagagctgttaattcaggcaggtgctaatgtaaatatacctgctggcggagcaactcctttgcacatcgcagctgataatggaagtcttgaactattaaatcgcttattgaaagcgggagctgatcctaatgtctctgatgaggatggtgtcaagccaatacaagttggtgctgcaaggggctatctaaaagctgttgagatattgttccccttgacatccaaagtagatactattcctacttggactgctgatgggatactcgagtctatgcaatctgaaactagaaagcagctggatgaatcgataaatgacaaagaaactaatcagcccaaggaagctgattttccaaagcaaaatgtccccgaggtggcacctgaagccaaaaagagagcagcagaatcaaagtcaagaggggatgaggcttttaaaagaaatgactatcatatggctatagattcttatacccaagcaattgatctgaaccccactgatgctactttgctatccaatagaagtctttgttggattaagttgggtcaagctgagcatgctttagctgatgcaaaggcttgtagagctttaagaccagattggccaaaagcttgttatagggaaggggcagctctgcgtttgttgcagaaatttgatgaagctgcaaatgctttttatgagggagtaaagcttgatcctgaaaataaggagcttgtaaatgcgttcagggaagctgtcgaggctgggaggaaatttcatggaactgctgaaaataaatcatagttttgcctttgcgattaatacctcgtttcagtgagaagagacctaagcattgcgggaagtgcagccttattcacttgatccttttttcctcagtttgtgtttgtgcgtgttttctttcactaggtacagtcgtacaggaagagtcagccagtaatctaatcagtttcattaaattgttatagtaattagaaagcttatgcttatttgaaatgttccaaaattgttgcagaattagtaaattatgaaaatgtttcatgggtatttctcccatactgttgtaggattcatttgttttaaagttcagaattttttttatagcaaaaaaaaaaaaaaaaaaaactcgagactagttctctctctctctctc

SEQ ID NO: 7550 - DNA, 2362 bp, Glycine max
ccgaagtgaacagacactaactcttttctttgcagttgcagttgctgcaatgcctacaaagctattctcccaactacatcttctccatcccctcctccccatgaagccccgcactctcccccttctctccagacccttcttcttcccttcctccaagttcctccgaacctcaccgtttaaggttcgcgccttctcctcccgggagaaggttcccctccgcccctccaagagcctcatcgacgacgaggccgacctcagcaactgggttgacgaattgcgctccggcgggcccgatgaaatgcggtctggccggggcaatgaagtgcggaccggtcggagagaccggtttgccgattctggccggttcagccgcgatgacagggaacgcgaattccggccgccgaggaataataaccgggcttccgcgttggggaagagaaggggcgaggatttgaggaaggggggacagagtgtcggttcgaggagaaagtttcaaccgaggagtgatgatgatgataacgaggtaatgaatggaagaaagttgaagggtggtggcgttggagcctttcctagcgaggatgaggatgaagatgaagacgaagagagtgaagggagtgaggaggaagagatattgaacaagagtagaaccgctttgtttggtcaacaaaacggtttgaaccggaggaccaccgtaccaactccaagaccttcttcccctggaggaggatctgattcttatttgagtgaaaccagatttgaccaatgttcaatctccccactgtcattaaaaggagtcaaggatgctggatatgagaaaatgacggttgtgcaggaggctactcttccagtaattctcaaaggtaaggatgtccttgccaaggccaagacaggcaccggaaaaacagtagcctttttgcttccatcaattgaagttgtggcaaagtcacctccaagtgaccgtgatcataggcggccaccaatttctgttcttgtcatatgcccaactcgagagcttgcaagtcaagctgctgcagaggccactaaactgctgaagtatcatcctaccattggtgtacaagttgtgattggagggacaagacttgctttagagcagaaacggatgcaggcaaacccttgccagatccttgttgctactcctggaaggctaagagatcatactgagaatactgctggttttgcaactaggctgatgggtgtgaaggtcttggtgcttgatgaagctgatcatttactagacatgggatttcgcaaagacattgagaagataattgctgcggtccctaaacaacgacaaactcttatgttttctgccactgttccagaagaggtccgtcaagtatgtcatattgctttgagaagggatcatgaatttatcaatacagttcaagagggaacggaggagacacattcacaggtctgccagacgcatttagttgccccattggacaagcatttctctttactatatgttcttctgaaggaccacattgcagatgatgttgattacaaggtccttgttttctgcacaactgctatggtcactagacttgttgctgaacttcttggtgagttgaacttgaatgtgagagaaatccattcaagaaagcctcagagttacagaaccagagtctctgaggaatttcggaagtcaaagggtctcatcctggttacttcagatgtatctgcacgtggagttgattatccagatgtcactcttgttatacaggttggtttgccagcagatagagaacagtatatacatagactcggtagaacagggcgaagagggaaagaagggcagggcatactgctgctggctccttgggaagacttctttttatctaccgtaaaagatttgcctattgagaaagctcctgtagtaccttcagttgatcctgacaccaagaaaaaggtggaaaaagccctatccaatgtggagatgaagaataaagaagcagcatatcaggcgtggcttggttactacaattccaacaaaaaagtggggcgtgacaagtacaggctagtggagcttgcaaacgagtttagtcgaagcatggggcttgataaccctccagctatacctaagctagtccttggcaagatgggcctcaggaatatccctggtttacgggcaaaataggttattctttcaattcaatttctgacaggtcatgtgaaatatgtattgttttttagttaaaatggtcccttatattgtaagacttgagacatcaaattttcaattatatatacatccattttttgtttaaaaaaaaaaaaaaaaaacgcgcggcctggcaattgtagttccagattaatttaattatatcatcatctagcc

SEQ ID NO: 7551 - DNA, 682 bp, Glycine max
aaaccaaccatacacttcctaccttatcctttggttcctgtggatccaaatacaaagtccctagcttccacaccactgtaacctctactccaagaacaacaccacaggatctagaaaagccattccatcttcaccaccaaaaagaaaataatggcaatggccagtgcaacaactccagccacaatcactgttgtggccatctccagtgttgccagcacaaaaagaagggagaggaatgtgcacttcatcagaggtttgaattcctttggagggttgaaggctcagaacagtgtgacatcactaggtcttcctgtgtgcactgaacagtgttttgcaaaggtggtgagctcattgaaatatcaatcatcatctaagggcagaggtggaggtgctgcctcttcaacatgcaatgctgctggtgagattttccagattgcagccatcatgaatggtcttgtgcttgttggggtagcaattggatttgtccttcttcgagttgaagcgtttgtggaagagtctgagtgagaattgcataaacttttaatcagttttcatatatatgtatttttataaagaaaaaaaagggggaaaagttgtatctttctttaattcttgatatgatgtagaactacattatttttggggtatctgaatagtaccatgtgaattttaatttggagag

SEQ ID NO: 7552 - DNA, 1326 bp, Glycine max
ggccctcgaggccaagaattcaagcgtgatacaaggcattgccataattaactttcagctacgtaggcccccccccctttttgctcaagtttagaatgcccctgttctggataattaacttgctgagatttaagcacttacttgcttgttggttcctctcacctactgggtgttatttcatttttacttgggtgttattcattgggcagtctatctccttgccttacgctagtcttttaggtgaatattacttcaattctttgaatattacttcaagtcttttaggtaaaatactcagattcaggttattttttctcctttgaagcttgttgtcaatttttgcttgtcaatattaacttgtgttaaaataagtcaggctctatttttttaaaaaaaaaatttaagcaggacttatctctcattccctaggacttctaactaatttttgttaaacatatagttaattttgactagattcctctctttaatcattgtactgtaacctatataaacatcttatttggcatacacttattttgtttcaatatatcctttatgtggtatataaacaagtatggcgtatgagttagttaaatattatgataatctatagcaaccttgtagtacttgtattttttttgttaatctatcatgttgaaatgcattaacatgaaattattaatcatgtttcttgtgtttcagaatatggcctgtgacacatttctgacaggccttcccatcactattgcagatcttgaaccccatcagatacattccttctatgaatctctgagtaattattgttcctttgagggtgtcctatactgtaagcctcatttccatcaactgtttaagatgaccggcagctgggacaaaagttttgaaggtgttccaagaagtgttagagtggaaagacctgctgattaggtttttacaatttgccaattgcaattccttgatgtcagcactctacatgctgctctgccagattccactgctgttagaatcatctcaaattctcgtttgtatacacgtaaatcacttatctattagtaggattttaatgtatttcaaatatttgtataagtagaaatttctttctgtcatctggttttggttcaattatgtaggtggtttaacattcatagctgcatgaccaccaagttctcaaatactgtaaatagctgcaaaaaaatatatccaacaacaaaaataacaaaaataaattcgcattttacatcggttctagggaaaataattcccctctcttctgcctcgcgtcttttgtttttttttgtattatatattttattttttttttatttt

SEQ ID NO: 7553 - DNA, 1635 bp, Glycine max
cttgaccatgatgatactgaaaagcagatgttgaggaaattaagtaaacaactgagtggtgaggattggacatggaacaatttgaatacactctgctgggcaattggttctatatcaggttccatgatggaagaacaggaaaacagattcttggttatggtcattcgcgatttattaaacctatgtgaaatcacaaagggaaaagataacaaagctgttattgcgagtaatatcatgtatgttgttgggcagtatccacggtttttaagagctcattggaagttccctcgcgcccccccgaacaagttgtttgagtttatgcatgagacacatcctggagttcaggatatggcctgtgacacatttctgaaaatagtccagaagtgcaagcgaaaatttgtaatcacccaggttggggaaaacgagccatttgtgtctgagcttctgacaggccttcccatcactattgcagatcttgaaccccatcagatacattccttctatgaatctgttggtcacatgattcaggcagagtctgatgcacagaagagagatgaatatcttcagcggttgatggagctcccaaatcagaaatggatggaaattattgggcaggcacatcaaaatgttgattttttgaaggatcaggatgtaatccggacagttcttaatataatgcagacgaatacaagtgttgcaacttctttagggacatatttcttgccccaaatctcgttgatctttttggacatgttgaatgtgtacagaatgtacagtgagcttatttcaaagagtattacagaaggtggaccttttgcatctagaacatcctacgtcaaacttctacgttcggttaagagggagacacttaagctgattgagacattcttggataaggcagaagaccagccacaaattggtaaacaatttgtgccgccaatgatggatcctgttcttggagattatgccaggaatgttcctgatgcaagggaatcagaggttttgtcactttttgcaacaattgtaaacaaatataaagctgcaatgattgaagatgtacctcgcatatttgaagctgtttttcagtgcacacttgagatgattacaagaaattttgaagattacccagagcatcggctcaagttcttctctctactccgtgccatagccactcattgttttcctgcattaatctgcttgtcaagtcagcaactgaagcttgttatggactcaatcatatgggcatttcggcatacagaaaggaatattgctgaaactgggcttaacctgttgttggagatgctgaagaagtttcagggctcagagttctgtaatcagttttaccggacatactttttgacaattgaacaagagatattcgccgtcttgactgacacttttcataaacctggattcaaattacatgtcttggtgctacagcatttgttctgtttgctagaaactggtgctctaactgaacctctttgggatgttgctacaagtcaatattcatactcaagtgatgctgtgtgtgtacgtgagtttaccatacaacatctaagcatcttatttcgcctccagactgcagcagagggttcccaatttgttgatggactctttgtatccaccaatgat

SEQ ID NO: 7554 - DNA, 1224 bp, Glycine max
tgagattctttctgcatgcttaattttctttgtttagtgtatataagtttgccagtttttgaggatttattatgccctcccttgttgcactttccttctccctataataatatgttttggtgagatgctgaagaagtttcagggctcagagttctgtaatcagttttaccggacatactttttgacaattgaacaagagatattcgctgtcttgactgacacttttcataaacctgggttcaaattacatgtcttggtgctacagcatttgttctgtttgctagaaactggtgccctaactgaacctctttgggatgttgctacaagtcaatattcatactcaagtaatgcagtgtttgtacgtgagtttaccataaaacttctaagcacttcatttcccaacatgacatcagccgaggttacccaatttgttaatggactctttgagtccaccaatgatctctccacatttaaaaatcacatacgagattttcttattcagtcaaaagaattttcagctcaggataacaaagatctatatgctgaagaggctgcagctcagagagagagagaacgacaaagaatgctttctattccagggcttattgccccaagcgaattgcaagatgaaatggtggactcatagataggctaaacagtgtgggagctaatagtattacggtgggcattttaacttgtttcataggctttgattcaatccattgccaggtcctttgagaagagatgcagcattttccttcaatccattgccaggtcctttgattcaatccattggcagttcctgatttcagaatttttgctggccggggatactgccttgtccgttgggtgagtgtagattattcaattactaattggggctgataatattcagtcattttgtaagggattcatgaagacatctttatatagaattgcaggatggaagactcattctgagtattgatgactccttaggagtgacctcctaacctcgggtggtttgtgcagaaaacccttgtggtttgatattttgtatttttttcccctcaccaatcaatatttaggaatattgctgtaccatgagcgcacttaatatatatggtttcatgaactagtgtgttaatataatgtgttcatttcctcccaatagagagaggatatttttttaaaaaaaaaaaaaaaaaaaaaagcggccgctctagaggaaaaaaaaaaaaaaaa

SEQ ID NO: 7555 - DNA, 1149 bp, Glycine max
attattttatattattttttgtctatagtaagtttgaaaattaggtactacatcatatgcatgatcggcatttgtaactgctcctctgaatttgtctgagtctgagctgttgattctcccaacacaattataaaaagaagaaaaacttagagtgatagttgtaggaaagtaaaaacagtaagtgttctcttaattcagtgaggttctgaattgttcaacttgagatgatggcatcatttgcagggactactcagaagtgcaaagcatgtgagaagactgtgtatttggtggatcagctcactgctgacaacaagatctatcacaaatcatgtttcagatgctaccactgcaagggtacccttaagttgagtaattattgttcctttgagggtgttttatactgtaagcctcattttgatcaactctttaagaagactggcagcttggacaaaagttttgaaggtattccaagaactgcaagacttgaaagatctgccgatcaggtccaaaccaatacaaaggtttcaaatttgtttgctggaactcaggaaaaatgtgttgcttgcaagaaaacagtttacccaattgaaaaggtagctgttgatggaacatcttaccataaggcttgtttcaggtgcactcatggggggtgtgtaattagcccctcaaattacgttgcccatgaacatcgtctttattgtaggcaccatcacactcagttgttcaagcagaaaggtaacttcagccaacttgacaagcaagaaaatgatgaaggggtgactgagaacacaataactgagtaatagcatgcatgcaactttcaagttactttggcaatacaagttcagttggtgactcattttaaggcatcaaatgcccttgtctcaatccacattaaattctgtttactgtgtatgtgaaaagttttgtgagacaaattttggggttgataattgagaataattagtagatagtttggcttaattatacggctgaccagtctgcatttttctttgaagcttaatgaagtttgtatttttcattattgtgataaaatctggttttctctgtgtatttactgttgcttttggttattcgcatcacaaatatttcagtcctaaagggctaaaaaaaaaaaaaaaaaacaaa

SEQ ID NO: 7556 - DNA, 1201 bp, Glycine max
tttttttctctctatctttaatttcctaaataaataacagatcatgtatatcatatactttattaaagaaaaggaattatatattcacagagtaaaatttttacatcgttatccaattataatttaataaaaattctttttcttcctttttatttattttatttttatttttctcttccgtgtcttctgtaaatctttgatgatcatgttcacttttctttcagccaagtgattctcttccccccgtgatctgcctataaatccagcgacgccaccccccccccccccagtcacatttagataaaaaaaataaaaaagaaaaccaaaaaataatgtcaatggaaatgatggcaacggaacgtgtttgttatgttcactgcaacttctgcaacaccattctagcggttagtgttccatacagcagtttgctaaccatagtgacggttagatgtggacattgtgccaatttgttatcagttaacatgggagcttcacttcaagcatttccccctcaagaccctcagtcacagaaacagcacctaagctttcaagaaccaagcagcaaggaactgggatcatcttcaaaatgtagcaaaatagcgccatttgaggcagtagagcatgaactacctaggattcctcccattcgtcctacagagaagagacatcgtgttccttctgcttataatcgcttcattaaggaggaaattcaaaggattaaggctagtaatccagatatcagccacagggaggctttcagctcagcagccaaaaactgggcacatttccctcacattcactttgggttaaagaacttaaagctggatggcaacaagcaagaaaagttggaccagggggaaggagctgaaaagtctaacggattctactgataatggaagcctgtgagtatgaacttgtttttttcatgcttgacctaaatcagtgaaaaaatgaggttgatcaaatttcccaatatatcgtacaactggatgggagactcctgcaaattaacctcagcctctcacaccaatgtttaatagtactacatatatgtattgcccttttctatatatcgttgttatgaaatgattgctattcttgtgattgcatttattgtgttgaatttgagcacttaagtaagcaacacgttgctctatatatcacaatgatgtccctttataataaaaaaaaaaaaaaaaga

SEQ ID NO: 7557 - DNA, 1150 bp, Glycine max
gactttcaaacgaagaaaaagaagaaaccaaacgcggccaagttgctgatttattgcttccctagctacgtacgtaaaaccgctcgctctctctctctgcttccgagttccgagttgcgagttgcagagagagcaatgagtcaggaatcgtttatatatagcttcgtggctcgggggacgatggtgttagccgagtacaccgagttcactgggaacttccctgcaattgcagctcagtgcctccagaaactaccctcttccaataacaagttcacctacaattgcgaccaccacaccttcaattttctcgtcgaagacggttacgcttactgtgttgttgccaaggaatctgttagcaaacaaatctctattgctttccttgaacgtgtaaaagcggactttaagaaaagatatggtggtggaaaggcagacacggctgttgccaaaagtctcaacaaggagtttggaccagttatgaaagagcacatgaagtatatcatagaccatgctgaagagattgaaaagctaataaaagtgaaggctcaagtttcagaagttaaaagtattatgttagagaacattgataaggccattgatagaggagaaaatctaactattctggcggacaagacagagactttgcactcacaagcccaggaattcaaaaagcaaggaactcatgtccgtcggaagatgtggtatcagaacatgaaaatcaaattggttgttcttggaattttgttgcttttggtcctggttatctggctttctgtttgccatggattcaactgcgcaaactagaaacaaatgaaagtttatggataggtatttaaatgatgtttaaagagcaatttcttaaaagctttagcaagaatctgcttagaaggggggagtttggcaactggagaaaaagtttcctaccttctttatttgttgataatcatatacgatattcttggaaattcttaagagaaaggagatcgggtgtatttgtaatgtatcatatgctggactgtttggtcttgtcaaacaatatagttgtaatttgcttctcttttcttctttattttaaatatagaaaaatgttattaacttagcctctcgtttaaacaattaatttgatccccctaaatctggatttttcgtcttc

SEQ ID NO: 7558 - DNA, 735 bp, Glycine max
aatgataagagcatctctatctccaattccttggcttataataacttctcttaaatttttctgtcctggcagtattgtttactctaaatttttaatctctaatttctctctccttaattgtgtgtagcttaactagctaggcaaaatgagcacaaggcgatggccgagacatgtaactgtaagaggaaggaaaagaagggcgaaagtgtgtttggccaataataatgctgtgaaagtgagaccttccttgcaaaagaagcttagagagcttcagggagcagttcctgggagtgagggaatggacatgcacactttgttccaaagcattgaacaatacatacttcaacttgaagctaaagtcacggtcctaaggtgtttgtccaatttgtatggagtatagaaggagacaacaacactcctaagcactcaacctatttagaaactacatctgggctctaaagaaagggtgaaggtaaggttaacaccattaccgggcttctttcattggggcgtggagggaataataaggttgtattttatttcaattctataatctataataaaagttaggattatccttttatctcttcttgttgcattttattaatttatatatacgtttttaaagagaaaaaaaaaaaaaaaaaaaaaaaaaaaaaaaaaaaaaaaaaaaaaaaaattaaaaaaaaaaaaaaaaaggtttttcgataccgccaacctcaagggggggcccgg

SEQ ID NO: 7559 - DNA, 1038 bp, Glycine max
agttctgctgcgtcggccccgacccaaattctacttcctttcagctgcacaagagtctccaatcccaactctctctctctctctctctccacttgccaaaggaaaaggctaaagagaagaaaaggcaaagcaagggaccaaccaaaacacacacagagaaacatgtcttccccaagcaagcgccgagagatggacttgatgaaactgatgatgagtgattacaaggtggagatgattaatgatggaatgcaagaattttatgtgcaatttcatggacccaatgacagtccttatcatggtggtgtgtggaaagtaagagttgagttgccggatgcttatccttacaaatctccttccattggctttatcaacaagatctatcacccaaatgttgatgagatgtcaggatcagtttgtctggatgttatcaatcaaacctggagtcccatgtttgatcttgttaatgtgtttgaggtgtttctacctcaacttctgctgtatcccaatccatcagaccccttgaatggagaagctgcagctttaatgatgcgtgatcgaccaagttatgaacaaagggttaaagagtactgtgaaaagtatgctaaacctgaagacataggggaagccacagaagagaaatccagcgatgaggagatgagtgaagatgaatatgactctagtgatgaacaggttgttggtaaagcagacccctagctttgcatgcatgtcctgttcttaactttgtattttatctgtacatgatgttcttcttctagttctgttaattcatctcaccacatgtgaacttatcatggataaggggggaaattccccttccttctagtttcccagtcgctgtaaataaagtaccattgattttcctgatgcaatcatatttcatgtttagcactttcaagtgattgtgctgtttagccatggtaatttaatcaacaatgctagcatacagtgtataaataacactctttgtattgggtgattcatgtttgttccattaaatgatgtgaatcttactctatt

SEQ ID NO: 7560 - DNA, 835 bp, Glycine max
catcatcctccacttcaccctcttcaccagatccctcccaagccgcacctgagtcatttgaattgcctccttggccctcggagagttacattgatgacgtcagaagccggacaccgacacttcggtttgacagtgtgtgctgctctaaacgacttgaacatgactgctctgtatgcctcactcagtttgaacccgaatcagagataaaccgcttatcgtgcggtcatctcttccacaaagtgtgcttggagaagtggctggactactggaacattacatgcccactttgccggactcccttgatgcccgaagatgacacaccttgctttcagtaagcaaaacaagtgagcatgccaataagagagagtttcatgtacagtgtagtgtacatattcttgagggtttttgatgttcatgcatctgagttctgccacctttttaagttttaacctttttgccttttatggtctagagtttgtggagggttttgctttcccttcttctgtctgtgctctttagcacaaatgaggggtatactttttgcttgcatgttatgtttgttcacaatgcccaccttgtttggacctcagagccttaattctatatttgggcattttgatcctaatttggaagcatggattgcagaatccatttgttttgcctttcaaactctcctcaccatgtatatattgtgtgtaaatagctttggttgccacataatagagtatattttgtttaatttattttttacaccattaaaaaagtgtataatgagtatgtattgaaagaatgaaataattttagactattattcaatttaaaaaaaaaaagaagg

SEQ ID NO: 7561 - DNA, 1313 bp, Glycine max
acgcccacgcgttcggcggacccatggctgggtttgatatcctgagcgagccatagaaagagttgaattaatagagatacagataacgtgaaactgaaaggaaaatggcactctcagtctcctcaccctcatgcgtacgcgttccttcatgtttttggaaaccaaatggcaagagttgcaaagagcgtactaaggtttcatgtgcagctcacaatgataataagaatccgttggttggaatcggtattggggttgtaacgtcttgtgtgatgggtttaactgcattggatgcggacgccacgagaatcgaatactacgcaacagtggcagagcctttgtgtgagtacaactatgttaagtctggcctcggctactgcgatattgctgagggcttcggtgacgaagctccactgggtgagcttatcaatgttcactatactgcgagattcgctgatgggatagtattcgatagcagctataaacgtgctagacctctcaccatgcgcattggtgtgggcaaggtaatcaagggactggatcaggggattttagggggtgaaggagtacctccaatgcggataggtgggaaacgcaaactgcagattcctccgcacttagcatatggccctgaacctgcagggtgcttctcaggtgactgcaatatacccgccaatgccactcttctgtatgatattaattttgttgaggtttattcggggaacagatcaaagtgaagtcagtcaaaactggtcagatacatatatacatatgaaccacagatggatgggtttagagcaatgaaatggacattttgctagagaatatggatcaacttgtttggcagaatcttcttcctgattacaactacctcaagttactgttcctggttagtggagttgtacatgattgacctggatatcccttttgagagtaatgagcaatccttcctggtgatatatattaagataattcatgtgtatctctgcacatgacatgcgaacagtttgtgcatctttagtgtaaatgtaattttcaatactgctctgaatgataaaaaattgttaattcttcatttgataaatgcctgtctctaatacgtgatatgctttacccttttcaccttcctgtctgaaataggcatggctctacatgcttagagcagtaaaatgcaaagggagaatcataatttcaaaagattaacaggattagcagttaaacgtgttcaaatatgatttctatgctgaattgattaatcacccgtttgcaggtaattcatctaaagttagaaatatgttcataaaaaaaaaaaaaaa

SEQ ID NO: 7562 - DNA, 1142 bp, Glycine max
ctattcataggtaggttcctcgctgtcgaccgcaaaccgcgtcgatttttactttctttcgccattcttttttccttctccaacccacattcttcttattccagaatatacacccaaattcctctttcctagggttttagtccaaagggttttggaggcatcaccatcaccatgagagccaaattgtttgtgttcccaatacgaggcaggaactggtgcttctccagaaccatcgatcactctctctccgcttcccatgcttcctctcaatccccctcaaccctcaaagacttgtggaccaacatcaacgttggtgataaacccctgaacaccaaaactgagctctttgtcgattacatcgccaacaagatgaataatgcttggattggcttggagaaggcgccggaggggtctttcaagaacaagattcatgggttggggttgcggctcttgtcgcgggttaagccctctgagatatttttgaagtctatatcgaaggaaatcactagtgttgaaatcatttatccatcaagtttgaatgctcaacttgttcgtcgaagactaagacacattgctgtgaggggagcagttatccatcggaattacttatacggtttagtttcgttgattccattgacttcagcacttagcattttacctttgcctaatgttccgttcttctgggttttatttcgcacttattctcattggagagccttgcagggaagtgagaggctgtttcaactagtctcagataacagcaagacttcaaacacttgtacatatgaaaagaaaactgagcacaaggaatctaaaagtcaaagacatagttcaaatgaaccttgttgggtgttgaggccatccaaagaacttgagaatcttgtccatctagaagatggtcaagagagtcttagtcaacatgccatcataaacatttgcaagatctatgacttgaacccagtagatgttataaaatacgagaagtccgtcttttaatcagttttgtaacaacttgcattagaattttctattcaatccacttacttcacaatgccataaatttttacccatattttttggttgatagtaactcgtttatcaatatatgttacttgtgaatattttttcacgttctccccaac

SEQ ID NO: 7563 - DNA, 800 bp, Glycine max
  misc_feature (793)..(797): n is a, c, g, or t
cccctgatggattaccaacgctgagtcgccgtacaccttgagtagtttgacattggagtcaattgctgcctggacggctagggcacatgcttcatattcggccatgttgttggtgcagtcgaatcctagcctggctgtgaaaggtacacattgattgtccggagagaccaacactgccccaacgccatggcctagaatgtttgacgctccgtcaaaccatacggtccatttgtcccgatcttcgtccaacttttcctcaaacaaggccatgatgtcctcatccgggaattcaggatgcatgggctggtagtcgttaagaggctgttgagccaaataatctgctaaggcgcttccttttatcgccttttgggtgacgtagactatatcaaactcggatagcaggacttgccaccgggcgattcgtcccgtgagagctggcttttcaaagatgtacttaaccgggtccattttggatatcaaccaggtagtatggctcagcatgtactgccttaggcgatgggatgcccatactaaagcacaacacgttctttcgagcaaggagtaattcatctcacaggtcgtgaacttcttacttaggtagtaaacagcgcgctctttcttcccggattcgtcatgttgccccagcatacaccccattgactcgtccaagattgtcatgtacaaaatgagaggccttccaggtactggtggcataagcacgggaggattcattaggcacttcttgatccttccaaaacctcttggccatccccattccaccgatcagtttggnnnnngcg

SEQ ID NO: 7564 - DNA, 2035 bp, Glycine max
tcagctacgtaggccccccccccgaacttgttcacccttccccttctccttacttctcactctctttccaaaacactccctttctctttccccttacccttcttctgtgtgtgatgatgtagatagagaataaaaagagaccagtgtgcagtgagaaagaggttggtcacttcttgtgtggctttgttttgttctttgtgttggaatttgttgatgggtgaagagggagaagaggtgtcaagagataaggaacagcaacacatgggagtttatggaaatgagtggttgtttagtagtttctgtgcaaattggcgccgtttaagacaccagaattcctgttctatgcctccttttgagtgaaaaaaaaaaaacatcaaaacaaaaacttgttctctctcagcttttcatcttccgatcttaatatacattgactaaaagaaaaataaagggatcaaatttaagttccttgatctaataagatccttgcttttaattgtactactcatgaagagacttggcagttcggatacactgggtgctctcatgacgatttgtccaccaacagacgaacacagtccgaggaacaaccacgtgtatgggaaggagttccagtccatgctggaaggactcgacgaagaagggtgcgtggaagaagcagggcaccactctgagaagaaacgacgactaaacgtagatcaggtgaaggccttggagaagaacttcgaagtagagaacaaactggaacctgaccgaaaggtgaagctcgcgcaagaactcggcttgcaaccaagacaagttgcggtttggttccaaaaccgccgtgccagatggaaaacaaagcaattggaaagagattacggcgtcctcaaagccaattacggatcacttaaacttaactttgacaccctccaacaagacaacgaagccttactcaaacagataaaggaattgaaatcgaggctggtgcaagaagagaacaacaacaacactgaaagcgatgtttcggtgaaggaagagatgatagccactctgcaggatagtaacccgctctgtgaatccgccattcctggatcggactcgaaggagttgagttacgagtgtttcaacaagagtgatgaggtgggagggggttctgtgttccctgtggatttcaaagatgggtcttctgatagcgactcaagtgcgatcttgaacgaggagaacaacaaccacagccccaacaacaacgcggcgatttcgtcgtgtggggttctgcaaagtcacgggcttttgtcgtcgccttcttcttcgtcgatgaacaactgtttccagttccagaaacagtaccagacgacgacgcagtacgtgaagatggaggagcacaattttctcagcgccgacgaggcctgcaatttcttctcggacgaacaagcaccaactctgcagtggtactgttcagaggaatggagttaagagggaagaagaagaagcttaattaattgagagcgagggagggaatagaaagaataaggcattttgcagggtgtatagtaatgggatggagagagaaacattgtaaaaatgaaatggtcaaggattgaagaagagagggaaattgaagagcttgagagagaggggatggggttgaagcacgcatggcgtggggtcggagatgagaggttgatgacgataaaaaaaaaggggggtaataataatcatcaacatccgtgcggggaaaggggagtaatttatgaataataataatgattaggtcgtaatgaagtgaaatctatctagtgagtaatgctgtaaaaaatccacaattcacctctgcttccacctttctttctagctctcaccagttttatcggcttttgtatttctatatctagattaatttcttttataaaaaatctggaattaaatatttatggcattttaaatattatatagatgcggttaactgttttttatattattttttatcacaatttgaattttattttgataacttatattaatatgtattgtaaaaatttattttgtaaactattga

SEQ ID NO: 7565 - DNA, 1976 bp, Glycine max
  misc_feature (1968)..(1971): n is a, c, g, or t
ccttggtttatttaaagtcacctacgctcgccccccccccgcctgtgaacttgttcacccttcttccctttctcacttaccactctcccccttctttccaaaacactccctttccctttctattcacttcccctacccttccgtgatgatgtagatagagaataaaaagagaccagtgtgcagtgagaaagagattgctcacttcttgtgtgggtttgttttgttctttgtgttggaatttgttcatgggtgaagaaggagaagaggtgtcaagagagaaggaacaatacatgggagtttatggaaatgagtggttgtattgtggttgctctgcaaattggcgccgtttaagacaccagaattcctgttccatgccttttttcaagtgaaaaaaaaaaacaattacttgttatctctcagcttttcttcttgagatcttaatatacattgacttaaaaaaaaaaaaaaaagggatcaaatttaagttccttgatcttaataaagttccgtgcttttgtttgtactcatgaagagacttggcagttctgattctctgggtgctctcatgacgatttgtccaccaacagacgaacacagtccgaggaacaaccacgcgtatgggagggagtttcagtccatgctggaaggactcgacgaagaagggtgcgtggaagaaccagggcaccactctgagaagaaacgacgactaagcgtggatcaggtgaaggctttggagaagaacttcgaagtagagaacaaactcgaacctgaccgaaagttgaagctggcacaagaacttggcttgcaaccaagacaagttgcggtttggttccaaaaccgtcgtgccagatggaagacaaagcaattggaaagagattacggcgtcctcaaagccaattatgaatcacttaaacttaactacgacaccctccaacaagaccacgaagccttactcaaagagataaaggaattgaaatcgaggctggtgcaagaagagaacaacaacaacactgaaagcgatgtttcggtgaaggaagagatgctgaccaccacgctctgtgaaaccgccattcctggatcggacacgaaggagttgagttacgagtgttttaacaagagtgatgaggtgggagggggttcttctgtgttccatgtggatttcaaagatggctcttctgatagtgactcaagcgcgatcttgaacgaggagaacaacaaccacagccccaacaataacgcggcgatttcgtcgtgtggggttctgcaaagtcacgggcttttgttgtcgccttcttcgtcgtcgatgaacaactgtttccagttccagaaacagtaccagacgacgacgacgcagtacgtaaagatggaggagcacaattttcttagcgccgacgaggcctgcaatttcttctcggatgaacaagcaccaactctgcagtggtactgttcagaggaatggagttaagaggaagaagcttaatgaggtttaattaattgagagcgagggagggcattttgcagggtgtatagtaatgggattgagagagaaactttgtaaaaatgaaatgctgaagattgaagaagagagggaatgaattgaagagcttgagagagagagaggggagggggttgaagcacacgcatggcttggggtcagagatgagaggttgatgacgataaaaaggggtaataataatactaataatcatcaatctctcggccgtgcgggggtaatttatgaataataatgatgattaggtcctaatgaaatctatctatctagtgagtaatgctgtaaaaatcagtccacaattcacctctgcttccactccttcctctcccaccacttttatcggcttttgtaattttatccagactttaactagattaatttgtcctttttttatttatcaaaatccccaattcataagtttttaagattaaaactaaatttctgtaaaaaaaatnnnntttat

SEQ ID NO: 7566 - DNA, 1612 bp, Glycine max
tttttccgataactctctctcctcgttcctacctacgctcttctctctctctctctctttaatttgaaaatctttgatcaactcgcaatcgcgcattcttcatttattatagtttgatgtaaaaccctccaaaaccaaacctctctctctctctctctctctctctctctctctatatatatatatatatatatatatttggtttctttaattttcttcttctgtaatgcccttttgatcaatccatcattccagggcagccaatcattgcttttactagcatggcatcaagcaatctattctttgatgatatacggagcaaagttgatgttgatcctcctcaaaatgatgagtcaacagatgttggtgaattagtaaatgatcctgcacaaactgctcttaaacctaatgggactgtttcaagcagtgttcgtgagcttttagagtgccctgtatgcctgaatgccatgtaccctccaatccatcagtgttcaaatggtcacactatatgctcaggttgcaaacccagggtccataaccggtgccctacttgtaggcatgagcttggcaatatcagatgcctggcactggagaaagtggctgcgtctttggaacttccctgtaaatatcaaggttttgggtgcatcggtatatatccatattacagcaagctaaaacatgaatcgcaatgtgcacatagaccttacaactgtccatatgctggttcggaatgctctattatgggtgacataccctacctggtggcccatctgaaagatgaccacaaagtggacatgcacaatggtagcacttttaaccatcgctacgtcaaatcaaatccacaagaagttgaaaatgccacatggatgttgacggtcttcagctgctttggtcagtatttttgtctacattttgaagcttttcaactaggaatggctcctgtctacatagcctttttgcggtttatgggtgatgataatgaggcaaagaattatagctacagtttagaggtaggtggaaatgggaggaagatgatttggcagggggtgcctagaagcatcagggacagccaccgcaaggttcgcgacagttttgatggtcttatcattcagaggaatatggccctctttttttccggcggtgaccggaaggaattgaagctaagggttactggtaggatctggaaagaacagtgaatggagagagatgtccttccgctagcaattatatttaggctgatagtttgtagtgaaacttgtttcttgtagtgatatgtgtaccttctggtcatgtatctgttttgtaatttaggaggcaaactctctttgcttatcctcatcaaattcatgaagttgttcctcttatcattatgatgattacggaatagagatgtggaaccttaacgtgtcctatatatattctttttgttctatgaatgccaatgattgagagcacttaagaaaaaaaaaaaaaaaaacaagctacgattaagaacatgaaaattacactctgtagatctgttttcccacattattcaggaagattaaacaagaacaagtatttgtacattctcttagttggtataatttgtcaatttgctgcttgtctttgg

SEQ ID NO: 7567 - DNA, 1535 bp, Glycine max
gtctagacagatgttaacgactgatatcacattgtcgcatcccgaattgcaagagcccagttgtaaacgacacctcccgtgtagttgttgctgaccaaaacgaccccacgccccatccccagtacaaatcaggtctcaacccctcgcccccaacttcctgtcgcttccccttcttcgctccccccccgctcgttgacctccgattctcccctcatcggagctcaaatctccgatccctcccttcatatcgcttcacggcaaccttctcttcacccatcgcaagatctagttgaatctcgaccggttcgaagctctactcactcaaatcctcttcagatctggggggtttgattgcaattctcactctgctgctcggatttgttcgtttgaaatgtcgattttaccgaaaggcgattcggttcaaatcagggaggtttggaacgataacctcgaggaggagttcgcgttgatccgcgaaatcgtcgacgagtataactacgtggcgatggataccgagttccctggcgtggttctccgtccggtggggaatttcaagaacatcaacgactacaactaccaaaccttgaaggacaacgtggacatgttgaagctgatccaattaggtctcaccttctccgacgaaaacgggaaccttcccacctgcggcacggagagcccctgcatctggcaattcaacttccgcgagttcaacgtcagcgaagacatcttcgcgagcgactcgatcgagctgctgcgccagtgcgggatcgacttcaagaagaacagcgagaaagggatcgacgtgaaccggttcggggagctcctcatgtcctccgggatcgtgttgaacgacgccgtgcactgggttaccttccacagcgggtacgatttcgggtacctcctgaagctgttgacatgccggagcttgccggagacgcaggccgggttcttcgatctgatcaagatgtattttccgatggtgtatgacatcaagcacctgatgaagttctgcaacagcctccacggagggttgaacaagcttgcggagttgttggaggttgagagggttggcgtgtgccatcaggctgggtctgatagtttactcacttcttgtacatttagaaagttgagggatgcgttcttcagtggctccacggagaaatatgctggtgtcttgtatggtttaggtgttgagagtggacagactaattgaaatgaaaagaaaaagaaaagaaacgaaagaagaaggatataattggttgtagagtacgtcttaagtgtgagtctctctttttactttgtgtacacttctgccaaaagaatggttgttgtttacttgtaacattttcatcatcatcatcatccttgcttgaactgtaacttgaaaccgtagctggttttgttagcttgagttctttgtaaatcatcaccttcagtttagtgtcttcaaatttcaaataataatttatgatgattcctttagtttgctttgctgctgcagctgggaaaaaaaataaaaaaaaaaaaaccccaaa

SEQ ID NO: 7568 - DNA, 1456 bp, Glycine max
  misc_feature (29)..(29): n is a, c, g, or t
  misc_feature (31)..(33): n is a, c, g, or t
gggggaagtaggctttccctctcctcccncnnnggggggggggggggggaaaaaaaaaaggggggggggtggtgccccccccccccggggggggggggggcccccttttaaaaaaattatgggggaatctccccccggggttgccgggaaattttcccggggggccctttcctagaacatcctaatcgaaaaattaaattcaaaattgaaaacggaaggaaaactcagcgtgtgattgaaatttgaagagtgtgaagatggcgatggaagtggagcagaatcagaatcatcaattagggtttcccttctggaaaccgctccgtcgcaggttcggacccgaatctcctttcttcgctcatggcaacctcgaacgggaacttctcgccaaacagcttgctttggaattaacagaagagaaacaacagcttgagaaatggatgcaagaggaagaaggaagggaagtcttttgtcccattgtgggttgtggtgcacgcttgacctcaatggaggactttgaaaatcactataatgcaaggcatactgcatcctgttctgtgtgctccagagtttacccgacatcttggttgctcagcatacatgtatctgaagtgcatgattctttctttcaggcaaaagttgcacgtggctatgatatgtatgaatgcttggtggaaaggtgtggattgaaattcaaaagctacaatagtaggcagcagcatctggttgacaagcataaattccccacctcatttgagtttttcaagaaggctaagccttcaaagaaacataggttgaagtcccaacgcaaacaagctgtttgtaaggaggattcttcaggaatgatggaagtggaaaatgcatccatggatgaccttgtttcagcagtctctaaattgaacacttctgactccaccccttcatctatcagttttggtcgccgccacaaaggcttgtcatttgtccctcgagctgttcagcgtggaggtggatcaaactcaacagcatctgtgacaaagaaataagcttggactcaaacaaatctgcattcttaattgctgaatgatcaacatgcagatgcagctccattataaaatccgtgtggacgtcttgcattctaagtttgaagaagccaattaagttgaagatggaaaattagaatcatgctggaggatgtaataacagcatttgtcagtattatctttttttgctcccacttggggctgtaagtttgcccaacacaggcaatatgagcatgcgaatatgcctggcttgtataatgtggagattttgagcttctttttctatgatattgttctgttaacatctaaccactttactgaatagccacattgtaattagagttgaaagaaatcactcttaaagcttgtcatacgtttgtggcagcacatgaataagaaaaaaaaaaaaaaaaaagcttatcgataccgtcgacctc

SEQ ID NO: 7569 - DNA, 937 bp, Glycine max
  misc_feature (1)..(7): n is a, c, g, or t
  misc_feature (9)..(11): n is a, c, g, or t
  misc_feature (16)..(16): n is a, c, g, or t
  misc_feature (33)..(33): n is a, c, g, or t
  misc_feature (36)..(36): n is a, c, g, or t
  misc_feature (51)..(51): n is a, c, g, or t
  misc_feature (54)..(54): n is a, c, g, or t
nnnnnnngnnnttttncaaaaaggggggggggntgnaggattttccccaanagnttacctagaacatcctaatcgaaacaatttctcgtcactcctaaatttccgcgttgaagtgcgattagaacttagaagcatcaattcaagctccaatcttcgactctgtcacttaatacattgaaagcagagtatgccgagtaggaatagtgccaaaactccaaagaaggatggaaacaactcaaattccagtcttgcttctctagaaaataattgctatgaaggagaacgtctcaccagtctgctccaatcaatccgtagggggatccaatctgctagacatttggatggaagttccttgccagagaagatatggttaaagcaacaattttctattggggtcaacgatgtaactcgtgtccttgagcgcatgaaaccttgcacggagttagaaagctctactgaactcatctctttgagaagcaaccatacagcatcttcagttaagcttcaggctgtgcttgtagcttctgactgtaacccacgttggctgacgaaacatctcctaagtttggcttcatcaaggaatgtgcccctggtatttgttagagatactaaacaaggttctttgagactaggtgaacttgcgcaattaaaaacggccattgctatcggaattaaggttaaaggaagccccataaataaaattattcagcaagttattcaaggggatggatttgaactttcccctgaagggtaaaattcagcaagaatattttatgcgccaagtaactttcagggccctgattaaaaaaaactgtcaaaagtaatttaatcaaaatattttgtttataaaattattgcccttgcattttaaggggcagtttttttttttccttgggagaggggttaaaaaaaaaaaaaaaaaaaaaaaaaaaaaaag

SEQ ID NO: 7570 - DNA, 927 bp, Glycine max
atttctcgtcactcctaaatttccgtgttgaagtgcgattagaacttagaagcatcaattcaagctccaatcttcgacactgttaattgcgttgtagtcacttaatacattgaaagcagagtatgccgagtaggaatagtgccaaaactccaaagaaggatggaaacaactcaaattccagtctttcttctctagaaaataatttctatgaaggagaacgtctcaccaatttgctccaatcaatccgtagggggatccaatctgcaagacatttggatggaagttccttgccagagaagatatggttaaagcaacaattttctattggggtcaatgatgtaactcgtgtccttgagcgcatgaaaccttgcacggagttagaaagctctactgaactcatctctttgagaagcaaccatacagcatcttcagttaagcttcaggctgtgcttgtagcttctgactgtaacccacgttggctgacgaaacatctcctaagtttggcttcatcaaggaatgtgcccctggtatttgttagagatactaaacaaggttctttgagactaggtgaacttgtgcaattaaaaacggccattgctatcggaattaaggttaaaggaagcaccataaataaaattattcagcaagttattcaaggcgatggatttgaactttcacctgaagggtaaaattcagcaagaatatttgatgcgcaaagtaactttcaggaccctgactaaaaaatgctgtcaaatgtaatttaatcaatatattttgtttataaaattattgaccttgcattttaaggtgcagttctttttttcccttgggagaggggttaaaaatgtatttgtaaatttttttcgtttgagcatcataatttttattttaccataaattacgacttgcataaaaaaaaaaaaaaaa

SEQ ID NO: 7571 - DNA, 2422 bp, Glycine max
  misc_feature (2288)..(2288): n is a, c, g, or t
  misc_feature (2348)..(2348): n is a, c, g, or t
ccacgcgtccgatcgatgattctggaaccttcatgtgtctccctcttctgcatgggtcagctccgtaggccccccccccgagctgcgttcctggccacgcagaaacggccttgtagacaacgcaaacgccaatccgatcacttaggcaacctcgccgccggccgccggaacccgtcggagggagccagccgccgccgctccgaccgggaggatccgcaggcagaacaacgcgtttgccatcgccgccgacgaaatcgtgaacgccaacgccgacaacgttcgtggaacgagagcgaggaaggtgaaagacgatcaaggagtgaaggagaatattaataagaagaaggtttcgggtagggttttggaagcaaaaggtatggatgagtttgatagtggaggccgcagtggcgataaggctcctggagctgaagacgaaggcaccacacctcccattccagagaaggttcaagttggtggttccccgttgtacagagttgagagaaaacttgggaagggaggatttgggcaggtttatgttggtcggcggttaggagctgtgaattctagtgaacgaactggttctggtgctgttgaggtagccttaaaatttgagcatagaagcagcaaggagtgcaattatggacctccatatgagtggcaggtttacaatgcattaggcggtagtcatggtgttccgcgagttcattacaagggacggcatggtgactactatattatggtcatggatatgcttggccctagtctgtgggacgtttggaataacaacaatcctcacatgatgtctactgaaatggttgcatgtattgcaattgaggctatctccatattagagaagatgcattctagaggatatgtgcacggtgatgtaaaacctgagaactttttgctgggaccccctggaactcctgatgaaaagaagttgtttctggttgatcttggattagcaactcggtggcgtgatagttctactggccttcatgttgactatgatcaacgtccagatgtttttaggggcacagttcgttatgctagtgtgcatgctcatcttggtcgaacaggtagcaggagagatgacttggaatctcttgcttacactcttgtctttcttcttcgtggtcggctaccttggcaaggatatcagggagaaaataaagggtttcttgtctgcaagaaaaagatggccacgtctccagaaactttgtgttgcttttgtccccaaccatttcggcaatttgtggaatatgtagtgaatttgaagtttgatgaagaaccaaattatgcaaaatatatatcccttttcgatggaattgtgggcccaaatccagacatcaggccaataaacactgatggtgctcagaagcttatatgtcaggttggacataagagggggcgattgaccatagaagaagatgatgatgaacaaccaaataagaaggttcgaatgggaatgcctgctacacaatggattagtgtttacaatgctcgtcggccaatgaagcaaaggtatcattataatgttgctgatgtgcggctggcccaacacattgataaaggaaatgaagatggtttatttatcagcagtgtggcttcttgttctaatctttgggcactcattatggatgctggcactggtttcaccgcacaagtttatgaactctctccccacttccttcacaaggaatggattatggaacagtgggagaagaattattacattagtgccatagccggggctaataatggatcctcattggttgtaatgtctaaaggtacccagtacttacagcaatcctataaagtcagtgattcgtttccatttaagtggatcaacaaaaaatggagagaaggattttatgtcactgctatggccactgccggctctagatgggcaattgttatgtcccgtggggctggtttttcagaccaggttgtggaacttgatttcttgtatcccagtgaaggtatccatcgaaggtgggatagtggttatcgcatcacctcaactgctgcaacatgggaccaagctgcttttgttcttagtgtcccaagaagaaaaccagctgatgaaactcaggagacactccgcacatctgcttttcctggtactcatgtcaaggaaaaatgggcaaagaacctctatattgcatctatttgttacgggagaacagtgtcttaaactgatcaaattgagatttctggctgacatcattttgaccgctgacactatcctgcttgctcttacatagttgggaactgaagatcctctntgacaattttctgaacaatgcagttcagcattaattctacatgatgggggttcttctggntcagtcgttctacatgactggatgctcattgtatttattccttacaccaatattgcagttgcacgtttgattct

SEQ ID NO: 7572 - DNA, 1576 bp, Glycine max
gtcgacccacgcgtccgcccacgcgtccgtacggctgcgagaagacgacaccttatcataactctctgtagcgaaaagtcagcgccttcttttgtctctctctctcaaaaaaaaaattccacacactgcagagtttgtctctctatggcggaagattgggatctacatgcggtggttagaggctgctccaccgttacatcatcctcagtgtcttcttcttcatctccttcttcctctggttttgcctcttcttacttccaccctgaagctgcagtttcttcttcttcttcttcctattctggcttcaacatcttcaagggtgaacaaggaataagccaagttttgtcgctctctgcgtacccctttgaggcaaggagctccattgaggaattgcatgagctttgcaaacctttcttctccaaatctcagcctctaacgttgcaagcctcttcacctttgtcctcactctcttcctattcctctgcgccacccaaatctgtttcaacgcaagagaaacaacaacagaggagcaagcaggcacatgctgtcaccaccccacgatctaaaagaagaaagaaccagcttaagaaagtttgtcaagtgccagttgagaatctctcctcagacatatgggcatggaggaaatatggccagaaacccataaaggggtctccatatccaagggggtactatagatgtagcagctcaaaggggtgtttggcaaggaaacaggttgaaagaaacagatcagacccaacaatgtttatagtgacttacactgctgagcacaaccaccctgctcctactcacagaaactctcttgctggctccacacgtcagaagccattggtacctcaaacagccaccaccactgaagaagactctgacaagagcaagagcctcacaaaacccacttcccctgccacctcaggggcagaagaagaggctccaacaccatcacaaggggaaaagtctgagagcagagaagagaaagaggatgtgatggatgatgaggaagaagatgaatttggcttgtctgatatggtgctttcagatgacttctttgaaagtttggatgaactgagccaacttacggctccttctgttgtcactggagactgtttcagtgaccccttttcagcaattgcaatcccttcttgggtggctagtggtgctgctactgctagtgggtgtagatgattctttcgggcaaatcatcacaatgcttttcattgatgacaatagggaccttttctttttggtttttgtttgtagaggaaatggaacattttggaggaatctttactaacaatggtttgtggatgggaggaaaagttttccttagtagagtagtagtgactagtaaggtagatcaagcattaatcttgttaaaaatcaatgattattattaggcattcatagttttattatttatgtcatacctatgttaatgtaaaaacaatatattttagtaagctttttgtatgctccttgagttgtggttgagttcattgtatttgacattggttttgtgatataaattggcagaagcacttttgggttgacttgcggccgc

SEQ ID NO: 7573 - DNA, 667 bp, Glycine max
attttctttatcgctcaattcaattgggatctcttgcattctctctctctggtgtctgaattcaggtcttgatcttctctccactggggttccctccgtttcttgagccccttttttttcttttccgggcctttgccaattctcaatggaggttccagaaatggaaggcaagactgaaagtcatatgacatcagcagcagcctttgtggaagggggggttcaagaagcttgtgatgatgcttgcagcatatgccttgaggatttttgcaaaagtgatcctgccactgtcactaattgcaagcatgagttccacctgcagtgcattcttgaatggtgtcagagaagctcccagtgtcctatgtgttggcaacctatcagcttgagggatgctacaaggttagttcagtatttttcttctggcacgagtgacctactttataattcatttcatgattatgttctttaagttgtatccatttcatcacagtcaagaactgcttgaggcagtagagctggaaaggagcttgagggataccccatctagaaatgctgcgatttttcatcatccagcacttggtgattttgaattgcagcatgtccccttggctttgattgtccctcatcttgactcttagcacatcttattcccaccatcttatgctaacaa

SEQ ID NO: 7574 - DNA, 647 bp, Glycine max
ccagtccctcctatataatggatgagatccctagctcttcttccatcaaactttggctgtggagagcttgtgtttttctgatcccttatcttaattaatttaatcaccaatggctcgttctatcgctaacgccaagactttctccgctctcgtgcttgacggattctccagacgtggctactctcaaagcgcaacaaggggaggagtggcctccatagcacccaaatcaggggaagacaaaggtgtctcatcatacaaggtttcctgggtgccagatcccgtcaccggttactacaaaccggaaaacatcaaggaggttgatgttgccgatttgcgtgctacccttctccgcaaaaaattcaacaactaatttcaacaattttaattttttaccaaaccttgggtgattgattcgttatggaattaattttgatactcatatgctctgcccaccttcattatacgattgctatagttttaccagtcagtagaataactattagcagctaataagaattgtaatttcttttaatcttattcattacttcagtttttttttcttttcttttcaattgccttcaatgtgattggatgtgtttctagcttgcacaagcacaacaaaacatatttaatcatgtaattcatgt

SEQ ID NO: 7575 - DNA, 1581 bp, Glycine max
ccggattccgcctcgaccacgcgtccgggaaatgttattagtggagaaatacgacaacacgaatccgtcgtttgttcaaaccgaaacgacaaggcagttcgctttccctttctttctctgagaaggcgtcgtaacagaacacgacgattccccaaggaagtgggcaaaaattgaagatagggatcagtgacagagagagataacaaatcagctacgtaggcccccccccccccaaggatacattttgatcttctgctgacatctgctgggtacaaaattgaaagcagacaagttttggcttccaaaagtacaaggctactagtagataaggcctgaagttgaaccaatggattgttcagctgctagaaaaacacaaaaggctgaccgagaaaagttaaggagggatcgaatcaatgaacagttcgtagaattgggtaacattttagaccctgataggcccaaaaatgacaaagcaaccattctgtgtgatacaattcaattgctgaaggacctaatttctcaagttagtaaactcaaagatgaatatgctatgctaaatgaagaatctcgtgagttgactctagagaaaactgatctcagggaagagaaggcttctcttaaatcagatattgacaacttgaataatcagtatcagcagcagctcaggaccatgtttccatggactgcaatggagcattcagttatgatggctccatcatcgtatccatatccagtgccaatggcagtacctcctggtccaattcccatgcagccataccccttctttgctaatcaacatcctgcagtcatctccaacccctgttcaacttatgttccttatttagcccccaataccattgttgaacaacaatccaccctgtacgtatcccctccacttcatccaggtgctcggcccaatgtgtcaggaaaacaagagtccaagagcaagtcatccagggagagcatggttgaaaagaatgaggaatctaatgatgtcactacagaccttgagttgaagactcctgggtcttctgcagatcaggatttatcatctggacaaagaaaatctagcaagttgtcaaggagggaaagcagctgcactgaatggagttcattaggtaggtgttcttcttgtagcgttcaggacagctcatcaagcagtgtggtggcaagcagaaaggataatgaatgaaaaagtagacaagttagtcaagttcttgtgccttgaagctgctgaagtttttcattgtgcatctgctgcaactctggagaatcgagattcggcacaagttgtcgctcatacaatatatgcaccatttggctacatgcacctcacaatattatgtggctcctaaaggcaaagaaaaaacagaagaatgtgacttgagaacactgtattgtccaatgtctacaatgtgagtgaacttaggatgttaaaaatgtgagaaccttgtccttcaccgcaaaatctctcaaaagatccatatatgaaaaaatgttaacaatgcatttttttatccaatattctctaactaattagagtaaaaaaaaaaaaaaaaaaagaaaaaaaaaaaaaaaaaa

SEQ ID NO: 7576 - DNA, 2383 bp, Glycine max
  misc_feature (2366)..(2366): n is a, c, g, or t
  misc_feature (2368)..(2368): n is a, c, g, or t
tgtgtgtggagcacatataacgatgagtttggttggtagaggagcaagttttgcattgtagttgtagcaatagcggcacagcacaacaaaacaaaggcggagggtgcatcatcttcatatgcagagattaacatgatgattagattatttgccaagcaatgccttccttagcgagatataaactgctagcaatttcaaatcttttcgagtaaccaaaaagaaaaaaacaaaaagcaagaagatgaagcgcataaatgagagtagacaacaccgatgatggaaacaatcataactggttggggttctctctctcaccccacatgaaaatggaggctacttcagcagccactgttccgacaaccttctacatgtccccttctcaatctcacttgtccaacttcggaatgtgttacggtgtcggagaaaatggtaacttccattctccacttacggttatgcctctcaagtctgatgggtcactttgtatcttggaagctctcaaaagatcacaaacgcaagtgatggtgccaacttcgtctccgaaattggaggactttctaggtggtgcaactatgggaactcacgaatatggaagccacgagagaggtttgagcctagacagcatctattataactcccaaaacgcagaggctcaacccaacagagaccttctttcacaacccttcaggcaacaaggtcatatgagtgtccaaacacacccttattactcaggccttgcttgccatggtttatatcaagcaccgttggaggaagaaacaacaaaggaaacgcacgtgtcggattgcagctccctaatgcctcaaatgacagaaggcttgaaaaactgggtggctccaacaagggagttttccactcaccagcaggttttggagcagcaaatgaattgtggcatggggaatgagagaaatggtgtgtctttaggatctgtggggtgtggagagttacagtctctaagcttatctatgagtcctggttctcagtctagttgtgtcactgctccttctggaacagattctgttgctgtggatccagtcagctgcgggcatgccccccccccccagaagcagcctgtgcatagaaaatctatcgacacatttgtggcaaagaacctcgcagtatagagtgtgtcacaatggcatagatggactggtaggtatgaagcgcatttgtgggataatagttgcaagaaggaagggcaaactatgaaaggacgacaagtgtattatggggggtaatgatatggaggagaaagctgcaagagcctatgatctcgcggcccttaagtactggggaccttcaacgcatataaacttttcgatagagaattaccaagttcaacttgaggaaatgaagaacatgagcagacaggaatacgttgcacacttgagaagaaaaagcagcgggttttctagaggtgcttcaatatacagaggggtcacaaggcatcaccaacatggaagatggcaagcgaggataggcagagttgctgagaacaaagacctttaccttgggacgttcagcacccaagaggaagcagcagaagcatacgatgtagcggcgatcaaatttcgcggcgcaaatgcagtcacaaactttgacatttcaagatacgatgtggagagaatcatggccagtagcaatctcctcgctggggagcttgcaaggcgtaagaaagataacgatcctagaaacaaggacatagactacaacaagagtgtagtaacaagtgtgaacaatgaggaaacggttcaagttcaagcaggaaacaacaataatgaaaacgactcagagtggaagatggttttatttaaccacccttcacagcagcaacaggcaaatggcaatggcagtgaccaaaaaataatgaactgtggaaattacagaaacagtgcattttctatggccctacaagatcttattgggattgattcggtgggttctgggcagcataatatgctggacgagtctagcaaaattgggactcatttttcaaacacgtcatcgctggtgacaagtttaagcagctcaagagaggctagtcctgagaaaaggggtccctcgcttctgttcccaatgcctccaatggaaacaaagattgtgaaccccattggtaccagtgttacctcttggctaccctcaccaacggttcaaatgaggccttctcctgctatctctttgtctcacttgccagtttttgcttcttggactgatacttaaatggagataggcacggtccatttttcatgttatgttatgtaactaaaatttacttttttccttcatcttttatttctaatttgatttcctaagtttaaaagcttttattttgatgttagattaaaaancnaaaaaaaaaaaaaaa

SEQ ID NO: 7577 - DNA, 1935 bp, Glycine max
  misc_feature (1923)..(1924): n is a, c, g, or t
  misc_feature (1926)..(1926): n is a, c, g, or t
cccacgcgttcgcacgaagaaaaaaaggcattgaaagcaagaaaagaagcaaacattattctcgtgagtgcatgcctgagtaactgagtgagtgagtgagtgagtgagtgtaacatcgttttctcgtttgtgttttttcctttaaaatggaaaaccacatctacgcctcctcttacagcccttccaccaactacagatccttccgtgacccccccgccgacaccatgttcctctcccaccacctgcaccaccatcgcaccgacgcctcctccgccgccgccctccgcttcccctcctcggccctctctgccgtcgaagccgccgatattgccccgcctggcgtcacctcccgaatcgcctcctcctccgccgccgccgccgccgcgaatttcctttccacctggccccctgccgccgccgccgcgcccttcgccctcgacctcaaacgctcttccgaagctctctaccatccaaccattttgggtacaattgggcaaagtgaagcttggtattctacaaacccactggccaagcgccctagatatgaaagtgcttccaatatgactatatatccacagaggccaggcgagaaggattgtgcccactatatgctcacaagaacctgtaagtttggagatagctgcaaatttgaccatcctgtttgggttccagagggtggaatcccggattggaaagaggctccaaatgttgttacaagtgaaactcctcctgcgagtccgggggaaccggattgtccatactttctgaaaactcaaagatgcaagtttggttcaaagtgcaaatttaatcatcccaaggtttcctctgaaaatgctgatgtttcttctggcttacctgagaggccatctgagcccccttgcgcgttctacatgaaaactggaaaatgtagatatggcactgcttgtaaattccatcaccccaaggatatccagattcagttgtctgacgacttgagtcaaaatgttgcacagacacaaacaaattctatgatgggtggagctacaggagatacacagccaattaaatctcttatatctccgtcgttgcaaaatagcaaagggcttccagtaagactgggggaagttgattgtccattctacatgaaaactgggagttgcaagtatggtgtcagttgccgctacaatcatcctgacaggaatgcaattaatccacccattgctggattaggtgcctctattttgccatcctcggctgctaatctgaatattggacttcttaatccagctgtttctgcttatcaagcttttgaaccaaggctgtcaaatccaatggtgggaattgcagaaactatctatcctcagcgacctggacagattgaatgcgatttttatatgaaaactggcgagtgtaaatttggggaaagatgcaagtaccatcacccaattgaccgctcagcactgtcactgtcaaagcaggctactgttaaactcactcctgcaggattaccaagaagagagggtgatgttatctgtccttattatttaaaaactggaacatgcaagtttggtgcaacctgcaagtttgaccacccaccacctggagaagttatggagatggcaaaatcacaaggaacatcagccaatggagaggaagctgaaggcgatacttctgctctggaacaactttgagatctttcatgaaaacttgactctgtatttgatgagcccttttatttcttccttatatgttttttctgatcatgatatcaacagctgtggctgaagacctgctttgtttaatttagtgactaatttgtctcttgattggtatgagtgctgttttttaatggagtgttgctaggtgcacccagcccaatttatcaatggccgcaatgcccctggctttttttttgccataaaaaaccttttttttccggaggtnncnaaaaaaaaa

SEQ ID NO: 7578 - DNA, 2726 bp, Glycine max
ccacgcggcccgcaaagaaggcgaagaagaaatgggttccaaggcgaagaagaagggttcaccggaggacattctggaaaccctaggagacttcacgagcaaagagaactgggacaacttcttcaccctccgcggcgattccttcgagtggtacgccgaatggccccatctcagggacccactcctctccctcctcaaaaccatccctctccctctcccgcttcagctcctcgtccccggctgcggcaactcccgcctctccgagcacctctacgacgccggccacaccgccatcaccaacatcgacttctccaaggtcgtcatcggagacatgctccgccgcaacgtccgcgaccgccccctcatgcgatggcgcgttatggacatgaccgtcatgcagttcgaggacgagagcttcggtgcggtcattgacaaaggtggactcgatgctttgatggagcccgagcttggccccaaattggggaaccagtacctatcagaggtgaagagagttttaaagcctgggggcaagtttgtgtgccttaccttggctgaatctcatgtactaaatctacttttctcaaagtttcgacttgggtggaaaatgagtgttgatgccatacctttaaagtcttctggtaaacctagccttcaaacgtttatggttgttgtggagaaggagctgtctactttagtgcatcagattacatcattgctccataattcttcacttcatagtaattcaaaacaggtttctggactccacgaggctcttcaaaatgagaatcaaattcgtgaaaaatactccagtggctctgatatattatattctgtggaagatctgcaagaggagttgacaaagctttctcaaggtcgacgattgcagctaactttggggggacaagggtactccactttttcttacagagctgtaattcttgatgctgaggaacaggctgacccatttacctatcactgtggggttttcattgtgcctaagactcgtgcacgtgaatggcttttctattctgaagaaggacagtggatggtggtcagaagctccgaagcagctcgtctcataatggtttacttggatgccagccattcggataccagcatggaggagattcagaaggatttgtctccattggttacgcagttggcacctgcagaaaatgagaatggagctaaaatacctttcatgatggcaagtgaggggatcaaggagcgaaacatcattcacaaggtcacatcttcattaactggatcaattattgttgaagatgtaatttatgaaaatgttgatagtgaagtcagttgtatttttccttctagagagttggtgtttcgacgccttgtatttgagagagctgcaaatttggtgcagtctgaagctctgctaaaagatgaacagtcacctactaaattggttagtgagacaggcaggaagaaaaacaatgcatcttccaaatctagaaaaagtggatctcagagacacagtattggagcaagcagccagttgaccgtctatcatggctatgtagctagttcttatcatacagggattatttcagggttcacgctaatatcttcttacatggaaaatgtggcatcaagtgggaaaatggtaaaagcagtaataataggtcttggagctggtttactttccatgtttcttcacgggtgtatcccctttttggaaattgagactgtggagttagaccccatgattgttgatattgcaagggactacttcagttttgttgaggataaacgcctaaaggtgcatgtagctgatgggatccaatttgtccgagagattgacagttctggagcacctcagattcatggaaaaagtaatgatcctagtaatactgagtctgctctaaatgcaagttcaactgtgtctcatgctggtgtaaaagtgacaaaagttgatataattattgttgatgttgactcttcagacccaagctcgggattgacatgccctgctccggattttttggatgagtcttttcttgagaccgtaaaggataaactttcagaggatggtctctttgttgtcaatttggtgtcacggtcccaagccattaaggatatggctctctcaaaaatgaaaaaggttttcagccacctcttctgcctccagcttgacgaggacgtcaatgaagttcattttgccctcaaatctgagtcctgtattgaggatagctgtttctctgaagcttctcttaaacttcataaattgttggagtttaaacacccggagataggtcaaaacattatcaatgcgaccaaaaagataagacatttgaagtgaaacttgctctccttccttgccatagttatgagcatgatattcttcgtctgtgtgatgtgaatgcttgctatctcaaattcggaagtgatttcagccaaatgtttgtcattgatctgcggactgaactgtctagtactcatcaatagtacttaatggttgagtgatgtataaataaatgacttgtgagttgtgatgatattgtagcgcattcaccctttatttcatatgggtgtctgcttcaacgtttaagggttatggataacattccctggaataattcgctgtgaatactatcctctaggaattttccttcgttaagatttgtttgactggtctttaaaaaacttactggaaagtttacaattcttggaaaagtaatactattttcttctttatcttcccc

SEQ ID NO: 7579 - DNA, 2785 bp, Glycine max
  misc_feature (578)..(578): n is a, c, g, or t
  misc_feature (649)..(649): n is a, c, g, or t
  misc_feature (665)..(665): n is a, c, g, or t
  misc_feature (737)..(737): n is a, c, g, or t
  misc_feature (817)..(817): n is a, c, g, or t
  misc_feature (844)..(844): n is a, c, g, or t
cgacagaaggggaagcagagaagtctgatgaatgggttcgaaggggaagaagaaaggttcaccggaagacattctggaaaccctaggagacttcacgagcaaagagaactgggacaagttcttcacccttcgcggtgattccttcgagtggtacgccgaatggcccaacctcagggacccactcctctccctcctcaaaaccgttcctctcccgcttcagctcctcgtccccggctgcggcaactcccgcctctccgagcacctctacgacgccggccacaccgccatcaccaacatcgacttctccaaggtcgtcatctccgacatgctccgccgcaacgtccgcgaccgtcccctcatgcgatggcgcatcatggacatgaccgccatgcagttcgaggatgagagcttcggtgcggttattgacaaaggtggactggatgctttgatggagcccgaacttggccccaaattggggaaccagtacttatcagaggtgaagagagttttaaagcctgggggaaagtttgtgtgccttaccttggctgaatctcacgtacttaatctacttttctcanagttccgacttgggtggaaaatgagtgttgatgccataccttttaagtctcctggcaaacctagccttcancatttatgggtggttngggagaaggagctgtctactttagtgcaccagattacatcattgctccataattcttcacttcattgcaatnccaaaacaggtttctggacttcatgaggctcttcaaaatgagaatcaaattcgtgaaaaatactccagcgctccaatttnttatattctgtggaagatctgcaagangagttgacaaagctatctcaaggtcggcggctccggcttccgctcgggggacaagggtactccactttttcttacagagctgtaattcttgatgctgaggaacaggctgacccatttacctatcactgtggggttgtcattgtgcctaagtttacacctaggccatcaaattaggcagttattctgtttgaatttcatgactgaatgttaaatctcagactcgtgcacgtgaatggcttttctattctgaagaaggacagtggatggtggtcagaagctccaaagcagctcgtctcataatggtttacttggatgccagccattcagataccagcatggaggagattcagaaggatttgtctccgttggttacacagttggcacctgcagaaaatgggaatggagctaaaatacctttcatgatggcaagtgaggggatcaaggagcgaaacatcattcataaggtcacatcttcattaactggatcaattattgttgaagatgtaatttatgaaaatgttgatagtgaagtcagttgtatttttccttctggagagttgatgtttcgacgccttgtattcgagagagctgcaaatttggtgcagtctgaagctttgctaaaagatgaacagttgcctaccaaattggttagtgagacagggaagaagaaaaacaatgcatcttccaaatctaggaaaagtggatcttggagagacagtgttggagcaagcagtcagttgactgtctatcatggctatgtagctagttcttatcatacagggattatttcaggattcatgctaatatcttctcacatggaaaatgtggcatcaagtgggaaaatggtaaaagctgtaataataggtcttggagcaggtttacttcccatgtttcttcacggatgtatcccctttttggaaattgagactgtggagttagaccccatgattgttgatattgcaagggactacttcagttttgttgaggataaacatgtaaaggtgcatatagctgatgggatccagtttgtccgggagattgacagttctggagcagctcagattcatggaaaaagtaatgatcctagctatacagataccgctttaaatgcaagttcagctgtgtctcatgctgatgtagaagtgacaaaagttgatataattattgttgatgttgactcttcagacccaagctcgggattgacatgccctgctccggattttttggatgagtcttttcttgagactgtaaaggatagactttcagaggatggtctctttgttgtcaatttggtgtcacggtcccaagccattaaagatatggctctctcaaaaatgaaaaaggttttcagccacctcttctgcctccagcttgacgaggacgtcaatgaggttcattttgccctcaaatctgagtcctgtattgaggatagctgtttctccgaagcttctcttaaacttgataaattgttggagttcaaacacccggagataggtcaaaacattatcaatgcgacaaaaaagatcagacgtttaaagtgaaacttgctctccttccttgctatcgttatgagcatgatactcttcgtatgtgtgatgtgaatgcttgctatctcaaatgcggaagtgatttcagccaaaggtttgtcattgatatgcggattactggttgagtgagtataaatgacgtgtgataatattgtagcgcattcaccctttatttcatatggttgtttgcttcaacgtttaagggttatggtcttatggataacattccctggaataattcgctgttaatactatcccgtaggaattttttttcgttaagatttgtttggctagaattaaataacttttactggaaactttttagaattcttggaagtgtaatgctattttctttatcttactaatcctcttaatactttaaatagtattaagt

SEQ ID NO: 7580 - DNA, 682 bp, Glycine max
gggatagtgataatgaggcagaaaatgctagtaccatgggtaatgaagaacatttgatggggaaaatgaccaagggtcttcctccagtcgatttagaggagccattttgctggcaggcatacaattatgctaaagtatcgttcaagattgttggggcatcagtatctggagttgccgttgatcctaaatctgtgagcatctatccagctgtaaaagcacctatggagttttcaactcaggttacttctggggactacattctgtggaatactcttggtaagtgcccacatgttgccacaataaaaaggtgaagtatgaatggccaccgagggatatctaaatgtgacgggaacaccatcagatatctgatggcaagaaaactctggaatgatgttttttattcgttgccaagtattgtggagacacatgattgaatcttgctccctagtggctaatttagaaaataagaaatgtttttggtattgtaattagtgacgggattcgttgccaaacatttgcacatttcatttgttgtaaagtttaccatagaagcatagcatttttgttaagtgtttttttttattccttagctatgatttgggagcacaaaataggaaatacgtttttattattccaattgaggcattcatggttagtatcggaaataaaattgtattgctta

SEQ ID NO: 7581 - DNA, 888 bp, Glycine max
tttgggttcgggcccccctccgcgtcgcacggtatcgcataagcttgatatcgcaattccgcaccacaaccctctctctatattccattgccacccagttttgaatatatttttattccttctttgtttcttcactttcttccatacacataaccatgtcttctcagactgttgtcctcaaagttggtatgtcatgtcaagggtgtgctggagcagtgaacagggttttgggaaaaatggaaggtgttgagtcatttgacattgatctgaaggagcagaaggtgacagtgaaaggaaatgtggagccagatgaagttctgcaagccgtttccaaatctgggaagaagactgcattctgggtggatgaagcaccacaatctaaaaacaagcctttagaaagtgcacctgttgcctcagaaaacaagccttcagaagctgcaactgttgcctcagctgagcctgaaaacaagccttcagaagctgcaattgttgattcagctgagcctgaaaacaagccttcagatactgttgttgaaactgttgcttaaggcatttgtggttctatttttctatgtggaagtaggtctgtttcatatagtatttcatgtgctttgtgcatgtcagctattatatttggtgtgttgttactggtatctaagctacaataacttgtggcctatttttcacatgagatacatttcatgggtgctataatttagaatttgaacctgtcactcttgttactactgtttttgttcagtcttttatattcttaccacaacttgatcatattggaaagagcttattttccgcttatttggacttgtgctcttcttatgcagcattcaaggatgacaattgatgaataattttctttgcttttgagac

SEQ ID NO: 7582 - DNA, 946 bp, Glycine max
cggctgcgagaagacacagaagggtacggctgcgagaaggcacggcagggtcccgcttcatccgattgaacaacaaacaaagcgagaaaaacgagccaattcatcattttctctcttctctgcttcttcttgttcaaatcttaggagctgaggagaatcaatcgagagaaatatgtctggtatcgctcgtggacgccttgctgaggaacgaaagtcatggcgcaaaaaccatccacacggtttcgttgccaagcccgagactctacctgatggcaccgtaaatttgatggtctggcattgcactattcctggcaagaccgggactgattgggagggtggatatttcccactgacaatgcacttcagtgaagattaccctagcaagcctcccaagtgcaaattccctcaaggtttctttcaccctaatgtgtatccatctggaactgtttgcttgtctatacttaatgaagatagtgggtggagaccagctataacagtgaagcaaattcttgtgggcatccaagacctgcttgatcaaccaaatcctgctgaccctgcccagacggagggttatcatctattcatccaggatgcagctgagtacaagagaagagtccgacagcagtcaaagcaatatccacctcttgtctagtgttatatctgctcactttaggaactgttatagtatgttagttgttgtcagttatttcttgttctgtgttaaaactgttatgtgattgttggctgccataatatgcagactccatggttttaacaatttctgcttactctcaggtctggataacgtgttaatatataacaatgtgaaagtccaccaataatacttgttggcaacacttgctatgcctgatgttcgctggtacatttctatatgaatgataaatttactgtgatggattatatgatattatgactccttccctgg

SEQ ID NO: 7583 - DNA, 2297 bp, Glycine max
ggttcacctcaagaaaaagccacttgacaccatggccacttcaaggccatatcaacccattgttcaaattagcaaagctgcttcatctgagaggctttctcataaccttcatctgagatgagtaactctacagagagaaagccacatgcactgttgacaccattaccacttcaaggccatatcaacccattgttgagattagcaaagctgcttcatctgagaggctttcacataacctttgtccacactgaatacaacattaaacgcttgctcaactcaaggggtcctaaagcccttgatggccttcaagactttcattttgagaccataccagatagtcttccccccacatatggtgatggtgatgtcactgaagacgcagtgtctcttgctaaatcagtgagagagaagatgctcgtaccctttcgcgatcttcttgctcgtcttcaggattcttccactgctggccttgtacctccaggtacttgcttggtttctgattgttccatgctttttactatacaagctgctgaagaactttcacttcctattgctctattttcaccggtcagtgcttgtgccttaatgtctgttttgcactaccgttctctttttgataagggtctcctaccactcaaaggtatccatttaatctctccctctctataattaagtatatgtgaaataagtaatcatatataatccataacgatgaatcgatattatatgttaatgcataacaacttatgcgtgtgttggaatattgaccattgattttcccatcacagactaagctttacctaatttatagaaatcaaatccaagaaattccaccgtgaatcacagtatccattaggtaagagcaatcgaatgcttaatatacatcgaaataataattgaaggcatcaaagtccttgttaatgttattttgatgttttcgatcttaatgttatatctagttgttgttaccaatggatacatggtaatgcagaaattgctggtttgtatattacgtatgtgtatgatatatggaacttaattggagcaattgtattttgtaattatgactgcagataagagttatttgacaaatgggtatttggacacaaaagtggactggataccaggaatgaaaaactttaaactgaaggacctgcctacctttataaggaccacagatccaaatgacttcttgttaaaatttctcattgaagaaggagataatatgcaaagaagttctgctattattttaaatacttttgctgaacttgagagtgatgtactgaatgctctcacctctatgttcccttctctttaccccattggccctctcccttcatttttaaaccaaagtccacagaatcacttggcttctctaggttccaatctttggaaggaagatactgagtatcttgaatggcttaaatccaaggaaccaaagtctgttgtttatgtgaactttggtagcatcacagttatgtctccagagcaacttttggagtttgcttggggtttggccaacagcaagagacccgctcgggggatcattaggcctgaccttgtcgtgggtggctcaatgattttatcatctgagtttgtcaatgaaactttagatagaggcctaatagcaagctggtgtccacaagaggaagtgctgaaccacccttcaattggtggattcttgactcattgtggatggaactcaacaattgaaggcatttgtgctggtgtgccaatgctgtgttggccactttttgctgatcagccaactaactgtagacacatttgcaaagaatggggcattgggattgaaattaacaccaatgcgaagagagaggaggtggagaaacaggtcaatgaattgatggagggagagaaaggaaagaagatgaggcaaaaggtcatggagttgaagaagaaggcagaggagggcaccaaactaggtggtctttcacacattaacttggacaaagtgatttgggaagtgctgcttaaaaaaaattagattaaagtgctatttttcccccgccaagaagtactgtgatagttcattgattttcttctcttgaatttgttgctttgttaagcaaaaaatatgtttctgttggaagtggttgttatattttaaacatatataagttatctattgcattgtgtttatgttcgtgcaatgatgcagcttatgatatctgtatattggatatctatattgcaaaccaggttgagaccacgggtatgtaaaaatatacatatactgatctaaacatgcaaatcaatttaaatgacatatttagatc

SEQ ID NO: 7584 - DNA, 2245 bp, Glycine max
  misc_feature (2166)..(2166): n is a, c, g, or t
  misc_feature (2171)..(2171): n is a, c, g, or t
  misc_feature (2218)..(2218): n is a, c, g, or t
  misc_feature (2225)..(2225): n is a, c, g, or t
  misc_feature (2229)..(2229): n is a, c, g, or t
  misc_feature (2231)..(2231): n is a, c, g, or t
  misc_feature (2234)..(2234): n is a, c, g, or t
  misc_feature (2245)..(2245): n is a, c, g, or t
ccacgcgtccgcacttttacattctcctcgcgacgaggcatcacgcgataaccatcagaatggcaccgtttccgccagagaacggcgtcgaaggagacgatgagagagaagaggaagacgaagaagaagaagaagacgacgaagaagaagttgaagatgaagaagatgaagaggaaccgaggctcaagtaccagagaatgggaggaagcatcccttcgctgcttgcgagtgacgccgcgtcgtgcatcgccgtcgcggagcggatgatcgctctcggcactcacggcggcaccgttcacatcctcgattttctcgggaatcaggttaaggaattctctgcacatgcttctgttgtcaatgaccttagctttgacacagaaggtgaatatattggaagttgttccgatgatggatcagttgttataaacagccttttcactgatgagaaattgaagtttgagtaccatcggccgatgaaggcagtggcgttggatccagattatgcaaggaaaatgtctaggagatttgctgctggtggtttggctggtcatttatatttaaattcaaagaaatggttgggataccgtgatcaggttttgcactctggtgaaggttcaatacatgctgtgaaatggagagcaagtcttgttgcttgggctaatgatgcaggagtgaaggtttatgatactgccaatgaccagcgtattacatttattgaaaaaccacgggggagcccacgccctgagcttttgcttcctcacctggtttggcacgatgacagcctcttagttattggctggggaaaatctgtcaaaattgcttcaattaggacaaatcaccaaaaagcagccaatgggtcattcagcctacgccctcgggctcgccggccccaggtggatattgtggcatctttccaaaccagctatttcatttcaggacttgctccctttggtgatgctttggttgttctagcatatattcctggagaagaagatggagataaggattttagtagcaccgctcctttacggcagggcaatgcacaaagaccagaagtaagaatagtaacatggaataatgatgagctttctacagatgctcttccagtacatgggttcgagcattacagggcaaaggactattctcttgctcatgctcccttctcaggtagcagttatgctgggggtcagtgggctgcaggtgatgaaccactttactatattgtatctctgaaggatgtagttattgccaaaccaagggatactgaagatcatatttcatggcttcttcagcatgggtggcatgaaaaagctttggctgtggttgaatctggtcagggacggagtgaactacttgatgaggtgggatctaggtaccttgatcatctgattgtggaaagaaaatacagtgaagcagcatctttgtgtcccaagttgcttcgaggatcagcttcagcatgggagagatgggttttccactttgcacatcttcgtcaactccctgttttagttccttacatgcctactgaaaaccccagactacgtgatactgcttacgaggttgctctcgttgcattggctacaaatccttcttttcataaggatctcttgtccactgtaaaatcctggccatctgtaatttattctgcattacctgtaatttcagccattgaacctcagctaaatacttcatccatgactgaatcacttaaggaggcattagcagagttgtatgtaatcgatgagcaatatgagaaagccttcttgttgtatgctgatcttatgaagccagaagtatttgattttattgataaacataacctacacgatgcaattcgtggaaaggttgtccaactaatgaggctagactgcaagcgtgcagttcctttgttaatccagaatagggacttaataagtccacctgaagttgtgaagcaacttctaaatgcggatgataagagtgattgtagatattttttacatttatatctccactcattatttgaagtaaatcctcatgctgggaaagacttccatgatatgcaggtagaactctatgcagactatgatcctaagatgctgctaccttttctccgtagcagtcaacactacacccttgagaaggcttacgaaatttgcattaaaagagaccttgtggggcagctcntctangaagatggaactcgaacagcctactgtttttacaatgggggataagnggcgaanttgncntcnctgagagactn

SEQ ID NO: 7585 - DNA, 1157 bp, Glycine max
ccacgcgtccgtaaaaaaaaaagattttcccagagcaaccaaacagatctaaattctcacttctcactttccctttgcatcctcccgtccgcgaggcatcacgcgataaccatcagaatggttccgttcccgtcagagaacggcgttgaaggagacgacgagagagaagaggaagacgaagaggaagaagaagaagaggaagacgaagaagtggtggaagatgaagaagacgaagaggaaccgaggctcaagtaccagagaatgggaggtagcatcccttcgctgcttgcgagtgacgcggcgtcgtgtatcgccgtcgcggagcgcatgatcgctctcggcactcacggcggcaccgttcacatcctcgattttctcgggaatcaggttaaggaattctctgcacatgcttctgttgtcaatgaccttagctttgacacagaaggtgaatatattggaagctgttctgatgatggatcagttgtgataaacagtcttttcactgatgagaaattgaagtttgagtaccatcggccgatgaaggcagttgcgttggatccagattatgcaaggaaaatgtctaggagatttgttgctggtggtttggctggtcatttatatttaaattcaaagaaatggttaggataccgtgatcaggttttgcactctggtgaaggttcaatacatgctgtgaaatggagagcaagtcttgttgcttgggttaatgatgcaggagtgaaggtttatgatactgccaatgaccagcgtattacatttattgaaaaaccacgggggagcccacgccctgagcttttgcttcctcacctggtttggcaggatgacaccctcttggttattggctggggaacatctgtcaaaattgcttcaattaggacaaatcaccaaaaagcagccaatgggtcattcaggcaagttcctttgtctggtatgacccaggtggatatcgtggcatctttccaaaccagctatttcatctcaggacttgctccctttggtgatgctttggttgttctagcatatattcctggagaagaagatggagataaggattttagtagcactgctccttcacggcagggcaatgcacagagaccagaagtaagaatagtgacatggaataatgatgagctttctac

SEQ ID NO: 7586 - DNA, 1845 bp, Glycine max
tacggctgcgagaagacgacagaagggttaggaaaatgggggtaacaaggatcaaatctgcgagtgcgaccacttaagctattaggtgaaaaaacacgtgaatggttttatatgtttattatcatgtcaagtgttaaaacaataattttttttatcaagacaaattttgatcgacattgaaaagcctaactgaaatttcataactaaaagactctgcgctaccagaaatccagtgcctatacatttattcacatgcaatcatggatgttgtggattttctctcgccttgagtttggtcatgtgtggttgaatccttagtttaggacacattgttttactgctctaacatcaaactgtcctatcttctttacataagaaaggatatatttgaacagaatcagcatctctaattgttgtgcaacaaagagtgtgtaccctggaactagaatctttaggtaattgtggggtattctgattcaacctaggtttactaatttgtaattgctagctattatttcaattgcaaatatgtgcttgcaatctttaaatactctaaggcaatgacccgtttgccctacttttgttatgcatttctttctggtattccggctgcagcatttgagtcttttaatgctaatagcatattaatgctgattgctgagtctctactactctactcttctcacatgtttttttcctggttgccatgatatctgccctctgttgctaaacatgaataataatggcttgtaaatgagattaaatgattttttctggcacttaatataatttgtttttggtctaatgtgcttaggtagaactctatgcggactatgatccaaagatgctgctaccttttctccgtagcagtcaacactacacccttgaggaggcttacgaaatttgcattaaaagagacctattgagggagcaagtcttcatcctaggaaggatgggaaactcgaaacaagccctagctgttattataaacaaattgggggatatagaggaggccgtagagtttgtcaccatgcagcatgatgatgaactttgggaagaattaatcaagcaatgccttcacaaacctgaaatggtgggcatattattggagcacacagttggaaatcttgatcccctttacattgtaaataaggttcctaatgggttggaaatccctcggctccgggatcggctggttaagattatcaccgactacaggactgaaacatcgctcagacatggatgcaatgatatcattaaggcggactgtgtcaatcttttaattaagtattacaaagaggcaaggcatgggatttctttaggtaatgaagatgagccgcgggttaaaatgagtgatactcgtgcttctcaggtatttgacaaatctccaagtctgagaactgtggagttgaagtcaaagactaggggaggtggaagatgttgtatatgtttcgatccattttctatacagaatgtatcggtcattgttttcttttgctgtcatggttatcacacaacttgtctcatggattcgtcttacactagtagtaaccagaaagaggtccaagccacgtccctagaggcggaaacgtatgatggttacaatggttatgaggaagatgctagtgaggatgatgaagaagccaagtctggtggtcctcgtatgcgttgtatattgtgtactactgctggctagttgagtgtgttttttgtatgtgtccacagttgtgtttgcatggttaatgttttagttcaaagttccatgcacaacgagcatgtgtggtttcctttgttgtcaatttttttttatcaaaataatcatatgcgcccctattttttttagcc

SEQ ID NO: 7587 - DNA, 1637 bp, Glycine max
tagctcatccctcaaacacagtcatgggaaacaaaactacccttttgcttttgctctttgttctttgccatggagtggccacaacaacaatggccttccatgatgatgagggtggtgataaaaagtcaccaaaaagtttgtttttgatgagcaactccacgagggttttcaagactgatgcaggggaaatgcgtgtgctgaaaagccatggtggtaggatattttataggcacatgcacattggcttcatctctatggaaccaaagtccttgtttgttcctcagtacctcgactccaatctcatcatattcatccgtagaggggaagcaaagctgggattcatatatgatgatgaactagcggaaaggagattgaagacaggggacttgtacatgattccatctggttcagcattctatttggtgaacataggagaaggtcagagacttcacgttatctgcagcattgacccctctacaagcttgggattagagaccttccagtccttctatattgggggaggagccaattcgcactcggtgctttctggattcgaacctgccatccttgaaactgcatttaatgaatcaagaacggtggtagaggaaatcttctccaaggaactagatgggccaattatgttcgtggatgattctcatgcacctagcttatggactaaattccttcaactgaagaaggatgacaaagagcaacagctgaagaaaatgatgcaagaccaagaggaggatgaggaggagaagcaaacaagtaggtcatggaggaagctcttggaaaccgtatttgggaaggtgaatgagaagatagagaacaaagacactgctggttcccctgcctcttacaacctctacgatgacaaaaaagccgatttcaaaaacgcttatggttggagcaaggcactgcatggaggcgagtatcctccactcagcgaaccggatattggagttttacttgtcaaactctcagcgggatccatgttggcacctcatgtgaatccaatatcagatgagtataccatagtgctgagtggttatggtgaactgcatatagggtatccaaacggaagcaaagcaatgaaaactaaaatcaaacaaggggacgtgtttgttgtgccaagatacttccccttctgtcaagtagcatcaagggatggacccttagagttctttggcttctccacttctgcaaggaagaacaagccacagtttctggctggtgctgcgtcccttctaaggaccttgatggggccggagctttcggcggcgttcggagtgagcgaggacacgttgcggcgcgctgttgatgctcagcatgaggctgtgatactgccatcagcatgggctgcaccaccggaaaatgcagggaagctgaagatggaagaagagccaaatgctattagaagctttgccaatgatgtggttatggatgttttttaatttgaacacttgatttggaataggggttatttggtagtgctagtgcctagtggaattctgtgttgagttttttgttctttatatttagttgagatgtgtgttgtgttcttgagttgtgaataaaaatctactttctttgtgcattgaaaataatattcgatggtgtcaacggacatgccgatt

SEQ ID NO: 7588 - DNA, 1543 bp, Glycine max
gaaacccgttctcctaaagcagtactttcaaactttccaattttgttcaagtcccatccataaatatctaactccgttctgcggcgcacggactccactcaccactgaaactgaaacaaacatggcttcttccaccatcacctcctccttcctcacatcacacccttcatccctcttcaacaaatcatcatcttcatcattcccctccttccatgccacccccactctccgcccccacaggccacgcgcctccatgtccgcggcagcgccaccgccgccctacgacttcggctcgttccggttcgagccgattagggagtcgatcgtgtcgcgcgagatgacccgcaggtacatgaccgacatggtcacccacgccgacaccgacgtcgtcgtcgtcggcgcaggctccgcgggtctctcgtgcgcctacgagctctccaaaaacccctccgtcaatatcgccatagtcgagcagtccgtcagccccggcggcggcgcctggctcggcggccaactcttctctgccatggtagtgcgtaagcccgcacacctcttcctagacgagcttggtcttgagtatgacgaacaagacaactacgtggtgatcaagcacgctgcattgttcacttccaccatcatgagcaagctcttggccaggccaaacgtgaagctcttcaacgccgtggcggccgaggacttgattgtgaagaacgggagagttggtggggtggtgacaaactgggccttggtttcaatgaaccatgacactcaatcctgcatggaccccaatgtgatggaggctaaggtggtggtgagttcttgtggccatgatggaccctttggcgccactggggtgaagaggctcaagagcattgggttgattgatagtgtgccagggatgaaagcccttgacatgaacaaggcagaggatgccattgtgaagctcactagggaggttgtgcctggcatgattgttactgggatggaagttgctgagattgatggtgctccaaggatgggtccaacatttggagcaatgatgatttcagggcagaaagcagcccatctggctttgagatcattgggacttcccaatgctttggattctgtaggaaacgttcatcctgagcttgtcctagctgctgctgaatctgctgaaattgcagacgcttaattaatgttgcaacaaatttaagttaaaatatcagtgcttgcaactagaaataatacttgtagttagggaattaagctttgaaggtgttggtagtgatctattggggtggttgatgtgactctctacgaagtttgttaataatatgaaggtttgaaggtatgggtagggtaccatccacacctttgtctcaagttttatattttgttcaatttattttattttaaatttttaaaaaagacaatgaagtaattgatgcgatattattgttctcattttatttgaaaaatctctaataaggaccttaaaaaggtattgatcgaaaatgattaaaaaatgtcctttttaattaaaggagtattcctctaaaaa

SEQ ID NO: 7589 - DNA, 1490 bp, Glycine max
tgcacgcctgcaggaccggtccgaattcccgggtcgacccacgccgtccgctgaaaccaaaactgaaaaaaaaaacaaacaataccataacatggcttcttccaccatcacctcctccttcctaacatcacccccttcatctctcttcaacaaatcatcatccccttccttccatgccacccctactctccgccccctcgcgccacgcgcctccatgtccgcctcagcgccgccctacgacttcggatcgttccggttcgatccgattagagagtcgattgtgtcgcgcgagatgacccgcaggtacatgatcgacatggtcacccacgccgacaccgacgtcgtcatcgttggcgcgggctccgcgggtctctcgtgcgcctacgagctctccaaaaacccctccatcaacatcgccattgttgagcagtccgtcagccccggcggcggcgcctggctcggcggccaactcttctccgccatggtagtgcgtaagcccgcacacctcttcctagacgagctcaatgtggagtatgacgaacaagacaactatgtggtgatcaagcacgcagcattgttcacatccaccatcatgagcaagctcttggccaggccaaacgtgaagctcttcaatgccgtggcggcggaggacttgattgtgaagaacgggagagttggtgggggtggtgaccaactgggccttggtttcattgaaccatgacactcaatcctgcatggaccccaatgtgatggaggctaaggtggtggtgagttcttgtggccatgatggaccctttggagccactggggtgaagaggctcaagagcattgggttaattgatagtgtgcctgggatgaaggcacttgacatgaacaaggctgaggatgccattgtgaggctcactagggaggttgtgcctggcatgattgttactgggatggaagttgctgagattgatggtgctccaaggatgggtccaacatttggagcaatgatgatttcagggcaaaaagcagcccatctggctttgagatcattgggacttcccaatgctttggattcagtgggaaacgttcatcctgagcttgtcctagctgctgctgaatccgctgaaattgctgaggcttaattaatgttgcaacaaattaggttaaaatagtatcaatgcttgcaactagaaataataattgtagacttgtacttagggaattaagctttgaaggtgttagtagtgatctattggggtggttgatgcgactctatgaagtttgttaatactatatgaagctttgagggtgttgctagtgatctattgtgtcttactttcctcgaagcctaatttaattgggtcttttttctattataaatggagagggtggtgtaccatccataccttcgtctccaaaaaaaaaaaaaaaaaaaattatttagtattgtagtcattttatttgaaaaattcctaataaggaccttaaaaaggtattgattg

SEQ ID NO: 7590 - DNA, 606 bp, Glycine max
attttttgaagcgtacgtcaaatgttgtttcctgttaactaacgaagacaacaaagtctgttttgctggcaactacacctcactgaagcttcctcaaccgaaccccacgccacgctacgacgcgtcgtttcattattattcatagtcttcttttgcatgcgccaccaacaccatcaattcaattccaatgggtaatatctgcgctcgtttgaagtcgaagccgccgccgcaatcctcagccaagaagcgttcctcttcccgccgagagaggaggctcgacgacgccgcgattcgcgagcaggccatcgccgccgcgattctcttcaagcagcaccagcaacagcagcaattcgatcgctccacttcgcttcggtatccgaatggagtctccaagaagaataacagcaacaccttgccaaggagttcgagttccagggcaaggtccctcaccgaccctctccttcaacctcaccagcttctcaatcagggtgtgaatgtcgatgatcttgagacaaatcatattgtccttgttcacggaggtggcttcggggcctggtgttggtacaaatccatagcacttctagcagaaagtggttacagagtagc

SEQ ID NO: 7591 - DNA, 1694 bp, Glycine max
tcagctacgtaggccccccccccagggagtgagagggtagcaattgagtgatcagtcatggcgaaagccgtagtcggagaagaaacgcgactcaaattggcggaggatcgtctcagccaatccgcagttccatccgaggtgggtcttttaatcggaaagttcagctccgctttgggccgggccttcctcttcgatctcattcccaccccacacaacgactccggcgagcccgcctgctccctcaccgagcccgacaagaagaagggccccaaatctaaatccaaatccgagctcgctgattcctcttcccttttcatcgacaaggactgggtcgccgaacatgtccgccaggtttctagaatgctcgtcggcggcatcaaggtcgttggcctatacgtttgggttagcgacgccgcgttcaagaattcaaccataatgctttgccagaccgtgaagggtgttgctgacgcagcgccgggtttggacggtaactgggatgagagactgcttcttcacatttcttatagcccgaggaggtggaattgtagaaactgctcactgtcttcgaatattacatcaagtagtttgcggccttgtgattttaagatggggaaggtcttaacttcccttcaaacgttcaagtgcatgcacaactttaacctgaggttgcccatattacgcgacagtgcctcaaagttccagacgttgagtgatgttcttcgtcatgcaatatctattcatgccaaagagcttgcaggtgcaaaggccttgattgatggtaaattggttgttgagagtgagtcatattcatcagatggtgtgcatgaagttgaattgcttctttcatttctgaacgatagttctattgaagcatgcagccaaggagatgttgttggtattctttcatttagtggcttgatatgttcgtttgcatatctaaattcaaaagagccaatttcccaagccatcactgatataaagggagatataattacgagtctgcaaagtagattggatataatctgtgatgaggtagatgctgactctggtaacaatcatgatgttggaagccaagtaagcgatgaattatcagctgaaacgcctgttccccaactagtgttgcacttattgagaaaaggatgcagtcttccatttcctagaagagtctttgcaccatggttagcagtggtgtatgtgtgtgattatttgcagccttttgaaactgttgaggttttaaaagatcattgcatggagttattgtccatgaaagctccaactgatgtctctaaaattttggagccagagaaagaagagttatctttcaaaactaaatctttctgggatgtggcagtgccctcctattcagaaattcacctcatggaagacaagagcaaacgtgatggcggaagcgagagttcaagtagtaaaactgtgaagccaggtcacattaatgttgtcgctgccggtctcattcttctattgtctgtgttagttggttttctgctattcgccctcaagggttgagggttttgtactgggaatttctcacctccagggacacacattcgcttagtttacaacattttatacttcaaaatgatacaagggcagatatgaaaaagaaaaaaaaaaaaaaagaacagcaatatcattagcctttgatgctcttcatctggaatcaactaaaagatata

SEQ ID NO: 7592 - DNA, 872 bp, Glycine max
aaaaaagatcaaaacaaaaattgagagaacggaaaaaataagagaaaaaccaaaacgcaacgattttttttctccgaaattcttaccaattcgagattaagggggaaaagccatggaagagatgtcgggtttagcaacagcaataaactcttccaacataggatttcagctattgaagaagcatgggtggaaagaagggactggtcttggagtctctgagcagggtaggttagaacctgtggagactcatgtaaagaataataaacgaggtttgggagcagataaagcgaagaaaaaggttgtcaaagcaaaacctgatcaaagcgattcctctaaagggaacaatcagcaggatcatttacctcaaaagaaaagcaaaacactttctaaacggatgagaaagatgcaggaatttgaaaagaagatgcgagagaaggaatttgagcgtgctttcttcagagagttctggcctgaaaatgtgtaaacgagaatcaaatgatccatattgtgtcagcatttcctcttgcattactttcgttgtactggtgatgatttcagaaattgtgcaaggtggatcttcagggatataggaaattgtgaaaggcgttttgcaaacagaaggaattcgaacacctttatgtgcaaattttcttcacctactatttcgtttagtgggggaaaacctccttaacctgggttccctaaacaatatattatttttgggcaccttggtagaaatactgtagctctgccgtacacatgtaaagccatgaacatttttttatggaagtgtccaatttgttcccgaaaaaaaaaaaaaaaattatgggcggcctccggatataaaaatcaccaaataaaaaatcaaaaaa

SEQ ID NO: 7593 - DNA, 560 bp, Glycine max
atccgtatccggtcgcctaaatattttcctccctgtcgccctccctccttcctttcctccactcgcgcttcgctctcagatcccttctcctccgtctcgcccgcgtgttggggtaggagccatggcggaccagctcaccgacgaccagatcgccgagttcaaggaggccttcagcctcttcgacaaggacggagacggctgcatcaccaccaaggagcttggaactgtgatgcgctcgctggggcagaaccccactgaggcagagcttcaggatatgatcaatgaagtggatgctgatggcaatggaacgattgactttcctgagttcctcaacctgatggcacgtaagatgaaggacactgattccgaggaggagcttaaggaggctttccgtgtgtttgacaaggaccagaatggtttcatctcggcagctgaactccgccatgtcatgaccaaccttggtgagaagctgacagacgaggaggtggatgagatgatccgtgaggctgatgtcgatggtgatggccagatcaattacgaagagtttgtgaaggtgatga

SEQ ID NO: 7594 - DNA, 2150 bp, Glycine max
caacgatggataatttccttgaacacagcttgtggtcaagatacttgacatctatttactggtccattactactcagctacgtaggccccccccccatttgcatcctgtgaattcaagggagatgatctttgacgtcttttatatgctctttaatctgggtttaacagcatatttgattggtaatatgaccaacttggttgtccatggcacaagtcgaaccagaaaatttagggataccatacaagctgcctcaaattttgcccaaaggaaccaattgccacatcggttgcaagaccaaatgcttgcacacttgtgtttgaagtatagaacagactcagaagggttgcaacagcaagagacacttgattctcttcctaaagccatcagatcgagcatttcacattatcttttttattctctgattgacaaggtctacttgtttcatggggtttcaaatgacttgctctttcaattgagatgaaagcagaatattttccacccaaagaagatgttatcttgcaaaacgaagcccccactgacttttatatactgggtcactgggtgccgtggaactactagttcttaaaaatggggctgaacaggttgttggagaggccaaaactggtgatctttgtggtgagattggtgtgctttgttataagccacagcttttcacagttcgaacgaagcgactaagtcagttgctcaggctaaaccgtactacgttcttgaatattgttcaggccaacgtgggagatggaaccataataatgaataatctccttcagcatttgaaagagatcaacgatccaatcatggagggagttttggtggatattgagaacatgttagctcgtggtaggatggacctaccagtgagtgtgtgctttgcggcagcaagaggagatgacttgttgttgcatcaattactcaaacgaggcatggatccaaatgaatccgacaacaatcgaaggacagctttgcatatagcggcatctcaaggaaaacagaactgtgttttgcttctgttagactatggggcggatcccaacattagagatttggaaggtaatgtgccactatgggaggctatagtgggaggacatgaatcaatgagcaagctgttatcagagaatggagcaaatttgcaatgcggggatgtgggccaatttgcatgtactgccgctgaacaaaacagcctcaacttgctgaaggaaataatgcgctacggaggagatatcacgcttccaaacagcagcaacacagggaccacagctttgcacgttgcagtctctgaaggcaacgttgagactgtcaaattccttttggatcacggggcgagtattgacatgccagacaagcatggctggaccccaagagatcttgcagatcagcaggcacatacagaaatcaaagccctttttgattccattggggagcctaaggtccattcttccgtcgctattccggtgaggaatagcaagatcaagtaccttggtaggttcacaagtgagccaaccatgacattgcctcttgatggatcgtttcatggaactgatggctcttggagccagaaccagagccaaaaccagagccggccgaggcgtcggagcaacaactaccataactctctgttcgggatattgtcagcagcacacaatggggaaaagtacctgctttcagctgttgacatgaataacaatgcaaggaatggtatgaagagtagtagtgcagttggtccaactagagttataattagttgtcctgagaagggtgaggttgttgggaagcttgttttactgcctggaagctttcaagagctagttgagattggagccaagaaatttggtttctatcctaataaggttgtatgcaaagatggaggtgaaattgaagatatagagataattagggatggtgaccatcttgtttttcttggtgcaagtggagggtgctagaatccaatcgtgcagctccagcaacaccactaaccaatggcgtgcatatataaaatgcatataaggaacgtctttactgttattgtaattgttttatttttcctgtctcatctgtgttctcattctcaattgtaaatctttagccttcttctcatggttaatgtgaaataatatatttctgcctacgtccc

SEQ ID NO: 7595 - DNA, 1658 bp, Glycine max
tgttattactgttaatgttagcatgcacatgctactgtatacaactattataggaaagatattggccagactatgatatcaaatcaacctcagaaatcccccgaagcttatttgtattctactttacgaaaccccatgaggatattgcgcttttcatgtattgagcacatccactttgctagatttcttggtttttacattcccaaccggaatcattgtcccttttgatttcctaccatcttcacctccttatattctcccccccattctcctatcctatccacaacacttctctagctatcattgctcttcagctctcttctttccaatacctcgttcaatagctccaaggttctgagttgcaagctaacatgggtgagatagctttaccaaatggcattagcaatggcaatattaatggagtcaatggacaaagccattctcttaatggttacaggaagagttgttggtatgaagaagagattgaagaggacttaagatggtgctttgctctcaatagtatattgcatacaggagctagccagtaccaagacattgcattgttggacacaaagccctttggaaaggctttggtaattgatggaaagcttcagagtgcagagacagatgaatttatctaccacgagtgtctagttcatccggctctgcttcacaatcctagcccaaagaatgtttttattatgggaggaggagaaggctccactgcaagggaattgcttaggcataagactatagacaaagttgtaatgtgtgacatagatgaggaggtggtgaatttctgcaaatcgtactttgtggtgaacaaggaagcattccgtgacacaagacttgaggtcgtgatcaacgatgccagggttgaactagaagccagagatgagagctatgatgtgataattggcgacttggcagacccaattgatggaggtccttgctataaactttacaccaagtccttctatgagttgattgtcaagcctagactgaagcaaggtggcatatttgtaacacaggcaggaccagctggaatatttagtcacacagaagtcttctcatgtatctacaacaccttaagacaagttttcaagtatgttgtgccttattcagctcacatcccatcctatgctgatatttggggatgggttatggcttcagattctccattagacctgagtgcagaagagctagacctcagaatgagacataggattaagggggagaatggatatcttgatgggaaaacattcacatcagcctcaactttgagcaaaactgttcgcaactcgctggacaatgaaactcatgtatacacagaggaaagtgctaggttcatatatggccatggcaagcatgcataaccaagcttgagaagtaaaaccaaatagtaacgccaaaagagacacacaatgcaagtgaaaaaggctttccaagactttattttatttcatcttttatgcatttccctttgtttgttttttttttctttcttttggtgtgtagttcacctgaaaaggcttacatgatatatgaatgggctacaagcgggtcctatcttgtgcttctctatgaatctatcaatattctgaatctgaatcacttagtcaactacttaaaaaaaaaattacggttgagttaaaaaa

SEQ ID NO: 7596 - DNA, 505 bp, Glycine max
ctcccctctattgccgccgccgccgctcccagctcgcgctccctcgcccagctgccgccgccgccgcctcgtcggagttcttcctacccctttcgccaacatgggtaagacacgtggtatgggagctgggcgcaagctcaagacccaccgcaggaaccagaggtgggctgacaaggcatacaagaagagccacttgggtaacgagtggaagaaacccttcgccgggtcatctcacgccaagggcattgttttggagaagatcggtattgaggccaagcagcctaactctgccatccgtaagtgtgctcgtgtgcagcttgtgaagaacggaaagaagattgctgccttcgttcccaatgatggttgcctgaacttcatcgaggagaatgacgaggtgctgattgctggattcggtcgtaaggggcatgccgtgggagatattcccggtgtccggttcaaggtcgtcaaggtgtctggtgtgtctctgcttgcctcttcaagagaa

SEQ ID NO: 7597 - DNA, 1481 bp, Glycine max
tcagctacgtaggccccccccccgatcaaaaaatgactaacattcgaaattgagatctaccacgatgctgactctttcacacagtccaaatcaggcatttccatgtgatctctagaggttgaaaaaatcaatgcgaggtcgacaggaaatcctcgcctccctcgcatgatgttcctgagtttcaacatgattagcggcggcaacacactccaaaggtttgaccctgtcgcttgcgtttcttctgtccctcttctcctcgcacccaccacacgacctactttccattttccttccccttttctctccaaacccaaacccacttacctcttcacttctttttcttcttcttcttcttcttcttcttcctttttctcttccaccacgccaccgcgatccaccatgctgcaccacgaccctcttgtctctgacgtctacgccaccgccatttccggcgtcgttgccctgtccttcctcagattgttccaagaaactgcaaaacgagacctcttcgaccagaaattaaataggaaacttgtacatataagtattgggctgatattcatgctctgctggccgctattcagtactgaaacttgggcatctttctttgctgctctcattccgggaatcaatatatttcggatgcttgttattggacttggaatattgaaagatgaggccacagtgaaatcaatgagcagatttggagattacagggaacttcttaaaggaccactgtattatgccgcaactattactttggcagccataatatactggagaacttcacctatttccattgctgcaatatgtaatctgtgtgcaggagatggcatggctgacattgttggaaggcgacttggcggtgaaaagataccttacaacaaaaacaagtccttcgctggttcaattgcaatggcaactgctggattcttaacttccattgggtatatgtggtatttttcctcatttggatttattgagggaagctggaaattggttctaggttttctgttagtgtctattgtgacagcatttgtcgagtccctgcctatcagcacagagcttgatgacaacctcacagttcccctcacttccatattggtgggcagtatcattctttgatatgaagcatattgcagtaaaacaaatcagacactaggaatcagttctctacatctttcaatctagttagaaaatgtttattatgcatctagttaaagtagtctgttttgttggcagaaaaattgactgatgtttgtagtgtatgctctcgatcaatatggaaacagaacaatttgcagtcttgtgttctttctattggatgaatgctcacaatttttgttcacaaacaaaaaaaaaaaaaactgaaagaatgagacaagatgatacttgaatagctacccaagctgtgtgccgtcattagtgctatcgcgggtactgccactgggggcggccgtttttaaggttccagagttcca

SEQ ID NO: 7598 - DNA, 1594 bp, Glycine max
tcagctacgtaggcccccccccccccggcgctacattacacgaaccaaatcatgcaataatttcatttattctcttccgatccaatacaacacaatccctctgattccgtatccgccgccggcgatggccaccctctccgatcatcgccgccgcatgctcccgccggagaacgttgacgcgcagccaataacttcggactccgtctctaacaaccaccgcaccactcatcggcgcgatgccggaaataacggcctccggcatcgcctcgttcggcaagaatctttgcgcagaaatatcgaacacgtcgccgcggaaacctacttggtttctcgtctcgccttcacgcttcttcgctatctcgggattggttaccgttggattacacaattacttgccctaggatgttatgccatgctacttatgcccgggtttttacaagttgcatattactatttcttcacaagcaaagtaaagcgaagcattgtttatggagatcagcctagaaacaggttggatctgtatctacctgccaatattggtgaacctaagccagttttgatatttgtaactgggggagcatggattattgggtataaagcatggggctcccttttaggactacagttggcagaaagaggcattatggtggcatgcattgattacagaaattttcctcaagggaccatcagcgacatggtaaatgatacttcgcggggaatttccttcatcatcaacaacatagctaattatgggggtgacccctataggatttatctaatggggccatctgctggtgctcatatttcttcttgtgctttactggagcaagcagccagagaatcggaaaaagaagatagtgtttcttggagcatttcccagttaaaagcttatcttggtttatctggaggatacaacttactggatttagtggatcacttccacaatcgtggcttggatcgttcgattttcttaagcataatggaaggtgaaaattctttgaaggaattttctcctgaaatcaaaattcaagatccatgcctcaaatcttccattcctcactttccccctgtatatctggtccatggaactgcagattattccataccatcagttgccagtgagcggtttgcggaagctcttaagaaggcaggggtaagagctgagttgattttatacgaggggaagactcatacagatttgtttctccaagatccgctccgaggtggtaaagatgacctatttgatcttgcagttgccattatgcattccaatgatagtgatgctcttgcaaacgatgccattgcacccccaagaagacggtttgttcctgagattttattaaagttggctagaaagatcagtcctttctaagcttgtaactgtcagggaaaatgtcatctctataagcttgtaagcatagtgattagaattttatgattcctgattcgaatcctacattccgataaaattcagctacttattgattcatattattaatattagacgaatctcaatttttgtatcttatggtacatgaatgaatctgcacaatttcatatcatcaaaaaaaaaaaaaaaaaaaataaaaaaaaa

SEQ ID NO: 7599 - DNA, 2207 bp, Glycine max
tttttggttagggcgaacaacaagtggggtattatttttaacacctaactgtggcacgctaaaactcgtctttacagaaatgggtttaagtttaaacccggccttgaggagatgcaacaacttttccgtttagaaaaaccaaaacttacttgataattgaacaatcactcttcactgacaattaacaaataaaatacatcaatttccagtcccacgggctataactaatatagttcttcatgtcttcgaattacacctttttttttcatttttgttgagataactttcatattacacacatccttaaataccagccaattttcccaacctgtcccttaaaatcttcagtcccatgtacctgcccatcatcatcacagtagcttgagggttggttcctggtgactcagaaaatgttgagccatcaaccacacggagtctatcaacaccaagaaccttatgctcagagttaaccaccttccccacatggcacccaccatggtagtgccaaatagtgatcacggagtctctacaaaactgttctactgactttgtgtcattggggcgcttgggaatgaggttgatattggccttcacactgaggttaagcattttctctgcagtttctctctcacacaaagtgtagtttgtgacgtgttctgactggacaacctttatcgccaagcgaataccctccacacagcgcctaagatcataagggtggctgaagtagttgaaggtaacagcagggttgtcctctacgttggtgtttatcaacttgagctcacctgttgaccaagggttcgcaacttttgacaatatgaaccctcccctgaatgcttcaactggtatgtctctcttgctcttcacataagcttttacagcttctcgtgatctttgctttggtggaattgtggacaactgcccaatctcagctgacaagataccatggtggcagtgaatgctgtctttggactggccaaacccactgctggtctcaatgtagacacccaaattggtaataccaacagtttctatgagtgactgctgaactggtctcttggaaggaacaaaaattgtgttcatggggttatcagccatgcctttcccaacaaattgattatcaagcacaacagggatgttcaatttctgaagctctgcttttgggccaattccactcagcaatagcaattgaggagtcccaagtgccccactggacacaatcacctcactctgcctgtcatttcctagatatgcctcatgctgcttcccattttcatccttgaaaataacccctgtagcttttggtctttttccttttgtatcaaaaacaatcttttggacagtggcatggatcaaaacagtaagtttgtgagggttggcagaagcaagcaattcagcagctgtgtggcgacggccaaatctgtcaaaaatggttccaccaactttggttccgtacttgtgatcataggtgaagccattgaaaggagacacaccagctgctagaagcccgtccctaactgctctctgccaatctgaaaactttggccggtgaacaatctgcttctcaacccaaggatatgactcattcactagctttgtatcccaccccaccttccttataaatcttgggtctgctctagtgtagaagccagcgttaatggaactgccaccacccaaaacccttccccttgcattgaggactccatctgttgaaatgaagtactgagaagccgaagttggtgaagtgtctgccaatgtaatgtgaaagttgtgcagaaatgacacattagggttgttgaaagggactcctcctctttcaagcagcagaactttgaacttctgagacagggttgcagccaatggacaccctgctgttccaccccccactattatataatcataccctccacttttcccattataacccaatgaacttgctcttcttataaatgggtacccttcattccagttctgcttaccttgagaaagaggtagatagttgaggaggcataatagaactaagtactgcagcaagaatttgactgcaccaatgaacgccattgaatctcagaaaagcactcactaagaagccgctgcttcaacctctaaatggccggacgcgcgcacgcgtccgtaaatggctgcctctggttggcctcccctgtctgtcgtcttctcgcagccgtactcgagccgattcgctcgat

SEQ ID NO: 7600 - DNA, 1613 bp, Glycine max
  misc_feature (1557)..(1557): n is a, c, g, or t
  misc_feature (1560)..(1560): n is a, c, g, or t
ggaaaataaccatgataaaatagaaaatctagagggttctcctgcggatcaggatgaagcaggggacaaattagcagatgtacttgatgatgatgatgatgatgatgatgatgaagccagtgatagtcatgggagtgaaggatctttgcataataaagtggaagagaatgcaaaagaagctgaggaagaacctattgttaaatctgaaactgatataaaggtcagaaacaaagagtcttctgatgaaatcatcaataaggggaatgatgcatctgaaaatactgagggattatcaagggaagaattgggccggcttgttgcttcacgttggacaggagaaaatactgataagccaagtgctgtacctgatacaacattagacaatgaagatcgggaagatccaaaggggagaaataatgaggaatatgaaggctatgcttctgaaactgatgatgacaacaacaaatatgatgatgacagccacaaatacgacgatgaagatgaagttgatgatgagtatcgagaggatgagcatgatgaccttacttcctcctacaaatctgattctgataatgaaccagacttgtcagataatccttcttggttagagaaaatacagagaactgtgcggaatatttttcaggctgttaatttattccaggctccagtgaaccagtcagatgctgctcgtgttcgcaaggaatatgatgaatcaagtgccaagttgtctaaaatacagtctagaatatcaagtctgaagcaaaagctaaaacatgattttggtccagcaaaggagttttattcattctatgatcattgctttgagggcaaggagaacaagtacacttacaaagtctgcccctataagcaggcttctcaggaggagggttattccaatacccgtttggggagctgggacaaatttgaggattcgtacagagtaatggtgttttctaatggtgataaatgctggaatggtccagataggagtttgaaggtcaagttaagatgcgggttgaaaaacgagattactgatgtagatgaaccaagccgttgcgaatatgtagctgtattatctaccccgaccctttgccaagaggaaaggctgaaggagttacaactcaaactagaccttttgaattcggaaataccagcaaaccatgacgagttgtgaacaaccgggacagattttaactggtagtatgatgatcatagagcaaatgaagaagtggtgccctaagttttgtatgctagagcttacacaaatatgatatcgggtgaggttagggagaggctagaagctgatttgacttggggttggtaatccttgtggttgtccaagtttgcaacattctaatatgactcatcccgcacatttttcctttattgaactcaattacgaaatggtctgtgtgcctctccttgaaattgtccattccataccaaaggatggatatttatactatgcaagatactggacagtcagaatttcttgagccaaaattatttgttggaatgagttcacgttattattgattcttacatggatttgtgccntanaaaaaaaataaaaaaaaaaaaaaataaaaattaaaaaataaatttaataatgg

SEQ ID NO: 7601 - DNA, 1885 bp, Glycine max
cctcgcctccgcgggcccccccccccccccaatcatcacgcgtcactagcaatcgctagtcggaaaaccgcaaggtcgctccgctcgcgtcgttgctcaacatgaagctgctcattgctctgcttctggtgttgtgcgcgccgttttcatcttcttccaaacccaaagacccgttcctcggaatctcccccgaagatgacaagtattacaaggcttccgatgtaataaggtgtaaagatggatccggaaaattcaccaaggcgcagctcaacgacgatttctgtgattgcgctgatggcaccgatgaacctggcacatcggcatgtccgggtggaaaattttattgtcggaatgcaggacattctcctgtttacttgttttcatctagagtgaacgatggaatttgtgattgctgtgatggaactgatgaatatgatggtcaagtaaagtgtccaaatacctgctgggaggctggtaaagttgctcgagatagactggaaaaaaagattgccacttatcaagagggcgtcaaattgcgaaagctagaaatggaacaagctaaagtagctatggagaaggatgaggcagaactttcaaaactgaaaaaggaagaaagtatacttaaagggattgtgaaacagctaaagggatcataaggaacaaatagagaaggcagaggagaaggagcgtttacagaaagaaaaagaagagaagcagaaaaaggagtctgaggagaaagctaatgaagcaaaagataaagctgatgaagatacagggcatagaaatgaagctgaaaagcattcagatgttgaagacaattctgtagaaaataaccatgataaaatagaaaatctagagggttctcctgccgatcaggatgaagcaggggacaaattagaagatgtacttgataacgatgatgaagccagtgatagtcctgggagtgaaggatctttgcataataaagtggaagagaatgcaaaagaagctgaggaagaacctattgtgaaatctgaaactgatataaaggtcggaaacaaagagtcttctgctgaaatcatcaataaggaaagctaaaacatgattttggtccagcaaaggagttttattcattctatgatcattgctttgagggcaaggagaacaagtacacttacaaagtctgcccctataaacaggcttctcaggaggagggctattccaacacccgtttggggagctgggacaaatttgaggattcatacagagtaatggtgttttctaatggtgataaatgctggaatggtcctgataggagtttgaaggtcaagctaagatgtgggttgaaaaacgagattactgatgtagatgaaccaagccgttgcgaatatgtagcagtattatctaccccagccctttgtcaagaggaaaggctgaaggagttacaacacaagctagacttgttgaattcggaaataccatcaaaccatgatgagttgtgaacaaccgggatggagtttaacaggtagtatgatggttataaagcaactgaggaagtggtgccctaagttttgtatgctagagcttacacaaatataatattgggggaggttagggagaggctagaaactgattcgacttgggattgataatccttatggttgtccgagtttgcaacattctaatatgcttatcccattgcacatttttcctttattgaactcaattacgaaatggtctgtgtgcctctcctagaaattgtccattccattaccaaaaggcggatatttatactatgcaagatactggacagtcagaatttcttgagccaaaattatttgttaaaatgagttcacgttattattgatttttagatggaaaaaaaaaaaaaaaaaaaaaaaaaaaa

SEQ ID NO: 7602 - DNA, 2584 bp, Glycine max
attcattgattttcagaggaattcccttgaattgagcaaagaggacccatgccgtggagaagaattgaagcctccgcttcctctctccatgaaatttcttcactttgcaaaaccaaaacagattgaattgctattatccaaattcatctacttcttcttcttcttcatagccatgtacaggttttaattttaacgcctttttttattattagcctaacgaatcttcttataaaccctcaaacctcttgtgctgttcgcattccgataaacaaacacgcagatttgaaggaacgaaagaacgaccggccgttttgtttttgtttattaagaatttattggtttgcaaggaaaaataggacaaagttggtctgaagcttagatctttgtttgggaatggcgagagggagcagatcagtgggtagcagcagcagcaaatggaggtactgcaacccttcctattacttgaagcgcccaaagcgtcttgctctgctcttcatcgttttcgtttgtgtctctttcgttttctgggaccgtcaaactctcgtcagagagcaccaggttgaaatttctgagctgcagaaagaagtgactgatttgaaaaatttggtggatgatttaaataacaaacaaggtggtacctctgggaagactgacttggggagaaaagctaccaagtccagtaaagacgtcctagatgatcccattgatatcgagaggagggaaaaagtaaaagaagcaatgcttcatgcttggggatcttatgagaagtatgcatggggacaagatgaacttcagccacaatcaaagaatggtgtcaatagctttggaggtcttggagcaactttaatagattctcttgatacactatatattatgggtctcaacgaacagtttcagaaagcacgagaatgggttgcaaactctttggattttaacaaggattatgaagcaagtgtttttgagacaaccataagagtagtaggtggtcttcttagtgcatatgatctttcaggggacaaagttttcctcaacaaagcaatagaaattgcagacagattattgcctgcatggaatacgcctacaggaattccttacaacatcattaatttgtcacatggacgagcacacaaccctagttggactgggggtgagagtatcttggcagattctggcactgaacaactggaattcattgttctatcccaaaggactggagaccccaagtatcagcagaaggtggaaaatgtaatagcccagctaaataaaacatttcctgatgatggattacttcccatctacattaatcctcatagtggggcagcaggctactctcccatcacattcggtgccatgggtgatagtttttacgagtacttgctcaaagtttggatacaagggaataagacttcatccataaaacattatagagatatgtgggagaaatcaatgaaaggcctgtcaagtttgattaggagatcaacaccatcttcatttgcttatatatgtgagaagaatggaggatctctaacagacaaaatggatgaactagcatgctttgctccagggatgattgctttgggatcatttggttacagtgctgctgatgattcacagaagtttctgtcacttgcagaagagcttgcttggacatgttataacttctaccaatcaactccaacaaaattggctggggagaactatttctttcattctgggcaggacatgagtgtgggtacatcatggaacatactgaggccagagacagttgagtccctcttttacctttggcgtctaactggcaacaaaacataccaagaatggggttggaatatatttcaagcttttgagaagaactcccgcatagagtcaggctatgttggactgaaggatgttaatagtggagtcaaagacaacatgatgcaaagcttctttcttgcggagaccctgaagtatttttatcttctcttctcaccttcttcagtcatctcattagacgaatgggtattcaacacagaagcccaccctctgaggattgtgaccagacacgaagagggacttgttaagaatttaaatgagaagcaaaaacctttttctagaataggtggcagaaaggaaggaaggtcaggttagatatccattcttctctaccattgctgatcgaaccccttttaccaaaattaaagaagagcagtttgttccactatggagcttgtaagatgtcaggatttcctcattggggaggggtaaggggttcgttcattcagccacagatggtatctaatataggaaatagttcttcactgaagttcttaaaatgggtttattcaaggtgatctgaccttttattgatgaatgacccttttgaaattcacggcttataggttgttgtcctttatttttttctggaaccaaatattcagagcattatatataactgaggcatatatctgcgcattgaatagaagatacttcctgcctattaacatttttctttatattgcttttatttattacggaattttatggagcgcgttagtgttgtaaaaaaaaaaaaaaaaaaaaaaaaaaaaaaaaaaaaaaaaaa

SEQ ID NO: 7603 - DNA, 2115 bp, Glycine max
cagcttttgaagacatgccttggtgttttgctctgttgaaagtagaacgcatggttttgagttttggtagctgagtagcgaatagttgtgggcaaatgctgctgtgactgtggttacaatgattttgtgagactttaagaagctcaattcactgcaattttaaaccatggaacttatacgtgtgcgcagttacaaaggaagggaaacataaagagaattgaagttatttgaatttttaagtgaaatagagagaatgggaaagcagaatagattaaatgaaagaaaatggaaaaaaaatgatacgacaatgggttagggaagaagacttggcaaaggacctcaaattacacacaaaacaacttcgtcgaactctgcggttttttgaagaagaaaagatcattactcgggaatcataggagaagagacagcgaaaggtgcaaaaatttatggtgctgctgtagctgctacagctgatggtcaacagaacagcaaaagagggagaagaaaaggtcaagctgcacacacactcttactgttgtctagattatgcacagatatacgatgtgattaggtacagactacatcgcatgaagcataagctgaaagatgagttggagaacaaaaacacacttcaggaatatatatgttcaaactgtggaaaaagatacaatgctttggatgctctgcggttagtatcgtttgaagatgaggacttccattgtgaaagttgtaatggaagactagaggttgaaagtgataagatagctgctcaagaaaggggagatggagatgataatgcaagaagacgacggcgcgaaaagttaaaggacatgcttcaaaagatggaggtacagctcaagcctttaatggaccaactcagtcgggtaaaagacttgcctgtccctgaatttggcagtcttcaagcatgggaagctagagctagtgctgctgtccgtgcagctaatggagatatcaatgctggtgattctaaaatttcgcagccaggatataatggagtgccttacagtggagacactaaggttgtagttgacttcaatactgaaggcaaaggagagggtgttaagtctgaaactgacagtacatctttaaaggttttgcctccatggatgattacatcaggtatgaatcttacaaaggaacaacgtggagaggtgaagcaagaaacaaagatggatgggacttcaacttccacagcagcacagtacacagatgacaagaagtcaacaattggacatgacaacaatcaaaatatacaggatgagtatattaaggcttattatgctgctttacttaaacaacaacacgaattggaagaagctgcaaaaaaacaattgtcaaatacacttgctgctgctaatccttctagcagtacttccattcgccaggttggcatgaaatcaaaacgtgaggaagacgatgatgatactgaatgggaggaggctccaattgcaggcaatggaaatggaggttacacggttgatttgaatgttgaagctgaggaagttgcagcagatgacgacgatgatgacgatgttgactgggaggaaggctgatgaaaaattatctgatcagtataatgtaatggtctattctgatttgcaatggccagtgctcattaataataccgcttcaaattatgtaccacaaaaccagaattagctgctcctattattgcctgtgcatcttattgtggtgttatgcgtcaacggcttcagataaggtgcgcagttgactttttagttgctaatcatcagtattcgtcacatattgaatgaacaacagctctactttgacacttagccgtccaaaaatagtgtctctaactttatttcattgtgatcacatactatttaccaatggatacctagatttgtgagtaatgagccatcccaacgttttacttacctgtggtgtcgctcacaccaatgaagaaaatggtgagccctgaattatatctcctctgctatttccaacaaggctatttccaactcatcctagttgtccatttcccgaaaatgtacaaaaagctgtaatgagagatgggcaatgtgttcgttgcctggcatcttcaattaaagtcaaagtttatatccc

SEQ ID NO: 7604 - DNA, 1649 bp, Glycine max
tacggctgcgagaagacgacagaaggggattccaatcctctctttctttccctcttgttctatgctttcaagtagtaccattaggcactttgttttgtgtcttcaatttttttttcctttcaaccttatcaaattaaccccctacacatttatttagctagctagccaatttattaattaggcacataatgggaagcccagaatccaatttgccacccggttttaggttccacccaaccgatgaggagctcattcttcactaccttagtaaaaaggtagcatccatacccttgaccgtttccattattgctgaggttgatatctacaagttagatccatgggacttaccagctaaggccacctttggggagaaagaatggtatttcttcagtcctagagaccgaaagtacccaaatggtgcaaggccaaacagggcagctgcttcagggtattggaaggccactggcactgataagaccatagtgacatcattgcaaggaggagcacaagagagcgttggtgtgaagaaggctttggtgttttacaaaggaagacccccaaagggtgtcaagaccaattggatcatgcatgaatatcgccttgtagacaacaacaaacccatcaagctcaaagactcctccatgagattggatgattgggttctttgccggatttacaagaagtccaaacatgctctaacttcaacagaggcatcaataggggtgggtgaggtagatcaagcagaggagcacttattccaagagacccttttgccaatctcaaaatctccagcacctccacctcaaaacacattgatatctcagaaatctgtgtccttctccaacttgttggatgccatggactactctatcctaagtagtttcttatctgagaatcataccaaccacccaccaggggttggatcaagtgctggattcaacactgggaatttggatcagcaatgctctccaatcaataacaacaaccctaccaataattacatgtttcagaagaatccccaattgaacccttcagtctccaacatggaaaacatgatgaggccaaagcgccaagtttcaaacatggatgaggaaacgttgtacccatcaaagaaataccttagttcctcttgcaacttccctactaacatcagcaaccaatacgagaacccacaatggaactacctcatgaagcagtctttgatgaatcagcggttaatgcttggtcctcatcttcaatttcaaggataatccaaaaatatcaaaagattaaatgaaataggaaaattaaagtaaaatattcagaagctgagcacaccaaagaataccaccaatttgatcattagataaggaatagtagctaggggtttagtacatagcaattatagtgttttctttttttatttctctttaattaatttgtgattgaaaatgaagaatagaatgttagcttggaagcaagaactatttggtagggaatcaaagaaagattccaccattcaaggatcaagaaactgttaaaacaaaatatccaagtttctatgacaaattagaaacaatttgtgtacaaaaatgttaatttgtacatgttgttggggtttgtttggaggttagctttataatatactctgtagataaggtattgtcctt

SEQ ID NO: 7605 - DNA, 1393 bp, Glycine max
  misc_feature (29)..(29): n is a, c, g, or t
tcgagtcagctacgtagggcccccccccngtggtttcttttatcagctaaggccacctttggggagaaagaatggtatttcttcagtcctagagaccgaaagtacccaaatggtgcaaggccaaacagggcagctgcttcagggtattggaaggccactggcactgataagaccatagtgacatcattgcaaggaggagcacaagagagcgttggtgtgaagaaggctttggtgttttacaaaggaagacccccaaagggtgtcaagaccaattggatcatgcatgaatatcgccttgtagacaacaacaaacccattaagctcaaagactcctccatgagattggatgactgggttctgtgccggatttacaagaaatccaaacatcctctaacttcaacagaggcatcaataggggtaggtgatgtagatcaagcagaggagcacgtattcaaagagacccttttgccaatctcaaaatctccaacacctccacctcaaaacacattgatatctcagaaatctgtgtccttctccaacttgttggatgccatggactactctatcctaagcagtttcttatctgaaaatcataccacccacccaccaggggttggatcaagtacaggcttcaacactgggaatttggatcagcaaccatctccaatcgacaacagcaatggttacatgtttcagaagaacaacccccaattgaacccttcagtctccaacatggaaaacatgatgaggccaaagcgccaagtttcaaacatggatgaggaaaccttgtacccatcaaagaaataccttagttcctcttgcaacttccctactaacatcaacaaccaatacgagaacccacaatggaactacctcatgaagcagtctttgctgaatcaacggttaatgcttggtcctcatcttcaatttcaaggataatccaaaaatatcaaaaggttaagtcggacaaaaaaaaatgaaataggaaaattaatgaaaagtaaaatattcagaagctgagcccaccaaagaatgcaatcaatttgatcattagataaggattagtaattagtgatttagtatatagaaaaggattagtaattagtgatttattataaagaaagattccatcattcgagggtcaagaaacaattaaaacaaaatatccaagtttctatgacaaattagaaacaatttgtgtacaaaaaatgttaatttgtacatgttggggtttggaggttagctttataatatacttttgtagataaggtattgtacttgattgttgtgttgataaaaaaaaaaaaaaaataaaaaaacaagaaaaaaaaaaaaaaaaaaaaaaaaaaaaaaaaaaaaaaaaaaaaaaaaaaaaaaacttgggggggggccc

SEQ ID NO: 7606 - DNA, 1796 bp, Glycine max
tcagctacgtaggcccccccccccctcctctcactcgtcaccatgaactccatagccttcaaatccttcgtcggcctccgccagtcctcgccggaggccccgcatttcgccgcccagccaagacccgccactccccaccgcaaattccgcgtcttggctggaaaattcagccccaagctcaatggccggaacctccgcgtggcggtggtgggaggcggtccggctggcggggccgccgcggagacgctggcgaagggcggcgtggagacgttcctgatcgagcgaaagatggacaactgcaagccgtgcggtggcgccatcccgctgtgcatggtgggggagttcgacctgccgctggacatcatcgaccggcgcgtgacgaagatgaagatgatatcgccgtcgaacgtggcggtggacatcgggaggacgctgaagccgcacgagtacatcggcatggtgcggcgcgaggtgctggacgcttacctcagggaccgcgccaaggagtacggtgcgaacgtcatcaatggcttgttcttgaaaatggatattcctaaggataagaactccccctacgttctgcattactctagctacgatggcaaaaccaatggggctggtgagaagcgtaccttggaagttgacgctgtcattggcgctgacggggctaattctagagtcgccaagtctattgatgccggtgattatgagtatgccatcgcttttcaggagagggtaaaaatcccggatgataagatggtgtattacgagaaccttgcggagatgtacgtgggcgatgatgtttctccagatttctacgggtgggtgtttccaaaatgtgaccatgtggctgtaggcactggaactgtgacacacaagggggacatcaagaagttccaactagcaacaaggaaaagagcagaggacaagattttgggaggcaagatcatccgagtggaggctcaccctatcccggaacatcctcggccacgaaggttgttggggagagtggcgctggttggcgacgctgctggctacgtaaccaaatgctccggagaggggatctattttgcagccaagagtgggaggatgtgtgcagaggcaattgttgaaggttctgagaatgggaaaaggatggtggaagaaggggacttgaggaagtacttggagaagtgggacaagacttattggccaacttacaaggtcttggatattcttcagaaggtgttttataggtccaaccctgcaagggaagcgtttgtggagatgtgtgctgatgagtatgtgcagaagatgacctttgatagctacttgtacaagacagtggtgcctggcaatccattggaggatctgaaattggccattaacaccattgggagcttagtgagggccaatgccataaggagggagatgaacaaacttaacgtatgacaataatagtcattatcatatttatcattcatttttgctttgtgtttttcctagtggacatgatctccttataattaagtgataattaactatatatgtgtaagaaaaaggattgaatttcatgcaatcccataaccggtatttgtaccttttatctgcaatgatgtaaaatgctagagtactagcaaagatttacttctcaaaaaaaaaaaaaaaaaaatcggttatgtcagctagatttaaagatttaggctctcaagtggtgctgttagtgactcatttagtggcttaagctattccaaattgaaaatatacgtgtaaaatatgttgctatatatccatgccaatgatgaaatgccaactat

SEQ ID NO: 7607 - DNA, 1953 bp, Glycine max
  misc_feature (1919)..(1919): n is a, c, g, or t
  misc_feature (1950)..(1950): n is a, c, g, or t
ccacgcgtccggtatctttttagttcaatccattgatggagtgtggagtgtgaagtatgaagagagcataacgtggcagcaccagaagcactcaaaataaaaagcaacgcccctcatcatcccaaaatctatccactttaaatcaccaccctcgatcctacccatccaacggccacaaaccccctcaaatcccaacccatatcccctcaaacacacataaaattagagttccatagtctcactctttactcgccactcgtaacaatgaactccatagccttcaaatccttcgtcggcctccgccagtcctcgccggaggccccacatttcgctgcccagtcccgccccgccactccccaccgcaaattccgcgtcgtggccggaaaattcagccccaggctgaacggccggaacctccgcgtggcggtggtgggcggcggtcccgccggaggagccgccgcggagacgctggcgaagggcggcgtggagacgttcctgatcgagcgaaaaatggacaactgcaagccgtgcggcggcgccatcccgctgtgcatggtgggggagttcgaccttccgctggacatcatcgaccggcgcgtgacgaagatgaagatgatatcgccgtcgaacgtggcggtggacatcgggaggacgctgaagccgcacgagtacatcggcatggtgcggcgcgaggtgctcgacgcttacctaagggaccgcgccaaggagaacggcgccaacgtcatcaacggcttgttcttgaaaatggatattcctaaggataataactccccctacgttctgcattactctagctacgacgggaaaaccaatggagctggtgagaagcgtaccttggaagttgacgctgtcattggcgccgatggggccaattctagagtcgccaagtctatcgatgccggtgattatgagtatgccatcgcttttcaggagagggtaagaattccggatgataagatggtgtattacgagaatcttgcggagatgtacgtgggggatgatgtttctccggatttctatggatgggtgtttccgaaatgtgaccatgtggctgttggcactggtaccgtgacacacaagggagacatcaagaagttccaactagcaacaaggaaaagagcagaggacaagattttgggaggcaagatcatccgagtggaggctcaccctatcccggaacatcctcggccgcgaaggttgtcgggaagagtggcgttggttggtgatgctgctggctatgtaaccaaatgctctggagaggggatctattttgcagccaagagtggcaggatgtgtgcagaggcaattgttgaaggttctgagaatggaaaaaggatggtggaagaaggggacttgaggaagtacttggagaagtgggacaagacttattggccaacttacaaggtcttggatattcttcagaaggtgttttataggtccaaccctgcaagggaagcgtttgtggagatgtgtgctgatgagtatgtgcagaagatgacctttgatagctatttgtacaagacggtggtgcctggcaatccattggaggatctgaaattggccattaacaccattgggagcttagtgagagccaatgcaataaggagggagatgaagaaacttaatgtatgacaataatagtctcagtttgactctcatatatttgccattcatttttgcattgcgtgtttcctagtggacatgatctccttataattaagtgataattaactatatatgtgtaagcaaaaaaggattgaattttcatgcaatcccataccggtatgtataccttttatctacaatgatgtaagcgaagcaaggggttgattgaaatactaggtactagcaaaagtttacttctcagatacttttgccattggtttagggcggcctgnaaaaaaaaaaaaaaaaaaaaaaaaaaaaaanaaa

SEQ ID NO: 7608 - DNA, 1328 bp, Glycine max
  misc_feature (1266)..(1271): n is a, c, g, or t
ttttcctaagatgctgatcataattgtaataacaaagaccaatattttgtgtgtgccagtgagctagttaggtgttaaatatttgattgcaatattaatatgaaggcacagtgtgagtagtgagaaggggcattagtaaagaggatgggtagacgaccctgctgccccaaagagatcaacaaaggtgcttggtctcgagaagaagatgaaaccctctccaaatatgtttccatccatggagaaggaaaatggcagaaggttgcccaaaatgcagggttaaagcgatgtggaaagagttgcagacaaagatggttgaattatctcaagcccggtataaaaagaggccacatctctgtggatgaagaggatatgattataagacttcatcgtcttcttggtaacagatgggcattgattgcaaagaggctacctggacgaacagacaatgaaatcaagaactattggaacacaaatctgtcaaagaagttacaaaaacatccaacatcatcagtttcttcacttcaacacaaacgtcatgaaaaagaaaaaaccatacaaatgcatgtatcacccgaagcaccacggcctaggagagttaatgcagttgaatacagtaaaaatttggagaatggtgggtgtggaaatagacctagtacaactcccagtccctcaaataaagtagagggtagtagtgaagaagcttcttttagtgatttcctcatccacgacattgatcaaaaccaatttttgattgctgatgattcaaactcaaaggtgccacaaatggaagaagatcaccaccacaacaacaaggtggaattaataaccaacaacagtcctagctcttcatcaccttctgatcattgtcaccatctcttgccagagaaatttgacccttttgagacccttttggatgtggagctggcttcctttcttggatttgaaaatgattgatcaagagattttatttattattattgcatgcagtgagatgaatgaaaaaaggtcaagtacttagggagtgttatagataatatcccatctatatatggaatgcctaactaattatgcatctagctatagctagatgtaatatacaaatccagggtttctttttcgaaaaaaaaaaaaaaaagggttgtgaactcacgtacgaacccttatgttcctccaaaatcaataacattattccaacaagatagtacaatctagtgtttagaaaatgttggattctatctttactacaatttccgtttaccaattacnnnnnngcttccctttgatgtgtcgctgtaacgcactaggccaaaagttgctttagacaacgg

SEQ ID NO: 7609 - DNA, 1605 bp, Glycine max
tcgagtcagctacgtaggcccccccccccccgttgacgatgtcgtttaggagtatcatccttgaaaggaagggatttgaggtgaagtttggatatagcatgagatccaggtcacagtcacacagtgatgctattgcccaggatagtttggtggtgcttgatggattgaagcagagttgttgggctaacatgccccctgagcttttgagggatgtgctcatgagaattgaggcctctgaggattcctggcctgcccagaaacatgtcgtcgcctgcgccggagtttgccgcagttggagagaaatcatgaaggaaattgtcaagtcccctcaactatccggcaagctgacattcccaatttccttgaagcagcctggtccaagggactctcttcttcaatgctatattaaacgaaatcgcagtaatcaaacatattatctgtttcttggtttaaaccaagcctcaactgatgaaggcaagttccttctttctgcacgcaagtgccgacgtgcaactcacactgactatattatctctctaaactgtgatgatgtatcaagagggagtagtacctatattggaaagttgagatcaaactttcttggcaccaaattcacagtgtatgatgcacaccctccaatttatggagccaaagttacaaagtctcgttccaccaggctagttagtctcaagcaagtttctccaagagttcctgctggcaactatcccattgctcatgtgtcatatgatctgaatgttttgggctctaggggccctagaataatgcaatgtgttatggatgccatccctgcctcagctgttgaacctggaggtgtggccccaacacagactcaatttcttcatagcagaattgatacttctccatccatccctttctttagatcaaaatcaacccggatggacaatctcccaacagtacctttgacttgtcaaaatgaggggacactggtattacgaaacaagtccccaaggtggcatgaacaccttcaatgctggtgtctgaacttcaatgggcgagtgacagttgcttcagttaaaaatttccagctggttgcttctcccaaaaatggagtttctgagcaggctcaggaaaatgtaattctacagtttggaaaagttggaaaggatgtattcaccatggattatcagtatccaatctctgcctttcaagcatttgcaatatgccttagcagctttgacaccaagattgcttgtgaatgattgctggcatagacagatgttaaccagtcgtgctgctgattggaattgcagaaacagtgatgcgggtcaaataccgactatagatttttctgcttttctatttagtacaaccaagtttcagaatccccctccccttccctttctttttatctattgtatatatggttgtttgtgtgcattatatttaaccagcgctgatttgtatgttatgttttttgtgtgccagtttgcagacgaaatttctttcttttttttttttttttgagtttgtagatgaccttggttgtgattggtttgtgagctttctggctgtttttgtttgatgtctttggcttttgcaaaatacccctgcctttgaagagcc

SEQ ID NO: 7610 - DNA, 2761 bp, Glycine max
agaaaaaccacagccaaaagtcttgtggagcaaaaacaatgggcagctagtgcttccaaatagggtcactgttctctgcaatggtgttgaaggcatatattttccaagccttcatttagttgtgtgcaagtgtgggttttgcaggacagaaaagcaagcacttagtgaatgggaacgacacacaggttccaaattaagaaattggagaacaagtattagggtgaaagattctatgctacctctggaacaatggatgctgcagttggcagaatttcatgctactgctcaggttcccaccaaacctaagaaaccttctctgaaagaaagaaagcataagttgcttaccttcttgcaagagaagtatgaacctgttcatgctaagtggactacagaacgctgtgctgtttgtagatgggttgaagactgggactacaacaaaattatcatttgcaacagatgtcaaatagcagttcatcaagaatgctatggagcaagaaatgtccgagattttacatcttgggtttgtaaagcttgcgaaagacctgacatcaagcgggagtgttgtctttgtcctgtaaaaggtggtgctttaaagccgacagatgttgacacattgtgggttcatgtcacttgtgcttggtttcgacctgaagtctcttttgctagtgatgagaagatggagcctgctttgggtattctaagtattccatcaaattcttttgtaaaggtacagtatttgctgctagaaatttcccctgaaaaggaatgctagtcaccaggtgaagtgattttattctttgtatattccatgctatctcaattgtcagagaattattttcaccactttaaaaactagaagaatatctatctgatttgattattttgttcattgagtgtggtataaaggacattatctagactctgaattacttaatatttttatcattttgtgcaaatcctagaaatagcctctttgtttgcaagagtaaggctgtgttcgtctaccctccccaaactccatttggtgggagctttttgcattgggttgccttttgatgtctcttggtccactactcttaacaaatacctcgagccgaatcggctcgagtgaattttcagatttgtgttatttgcaagcaaattcatggttcgtgtacacaatgttgcaagtgttctacttatttccatgccatgtgtgcttcaagggctggttatcgaatggagttgcattgtttggagaaaaatggcaagcagacaacaaaaatggtctcttattgtgcttaccacagggctcccaatccagatacagttttgattatgcaaacccctcttggggtcatttcaactaaaagccttctccaaactaagaaaaaaactggttcgaggttaatctcatctagcagaaaaaagcaagatgactctcctgttgataacactgagcatgagccattttctgctgctaggtgccgtatctttcaaagaacaaaccataccaaaaagagagcagcagatgaagccgtttctcatcgagtgaggggtccctatcatcatcctttagatgcaatagagagtttaaatacacacagagtagtacatgaacctcaggcattttcttctttcagagaacgcctataccacttgcagagaaccgaaaatgaacgggtttgctttggtagatcaggcatacatgaatggggcctctttgcacgaagaaatattcaagaaggagacatggttcttgaatatcgtggtgaacaagtgagacgcagcattgcagatttgagggaggcacgctatagattagaagggaaagactgctacctgtttaagattagtgaagaagtggtggtagatgccactgataaagggaatatagctcggctgattaatcattcttgtatgccaaattgctatgcaaggatcatgagtgtcggtgatgaggagagccggattgtactcatcgctaagactaacgtggctgccggtgatgagttaacgtatgactacttgtttgatcctgatgagccagaggaaaacaaagtcccatgcctatgtaaagctccaaactgccggaaattcatgaattaggaaggattatacaaataaatgaacaccagatgactagtattgtttcttctccgcaaggagcactaaccccccatcccctcttctgcagggaagctcacagttacaccaaagctgtattttttatcaaaccaaaagaagagaaaacaaagtagggagaaaaaaaaaggcatagtttagtgtttttcttttacccttttgatttcctttagacattcatcgaattttaataaaaacctagatttggtagcttttggctcttggcgtctctgtaaatgtatcaccttacattttactcattttcttctacttaatgtcaaccgatttcttcccttcatgtacttttccgatgatctaccaatctaattgtattgaaagatagtaataaaaaacgtgttgcacccagatgatgtacatttgatttaaaagtagtgtttcatccatctacgatgtttctcctaataatattagtattttatataaaataaaagtcatttaatattttaaaaacatacaaagtttcttatactgttttatttgataatcaataaaatattagtggaggatttaaaattgttcaataaatttttaattgttggatacgttagtgtgatcctttgaatgaaatttcgtcacttaaaagctctcgagtgtttttttgttttaggtaaactgc

SEQ ID NO: 7611 - DNA, 1024 bp, Glycine max
gaacaaaccataccaaaaagagagcagcagatgaagccgtttctcatcgtgtgaggggtccctatcatcatcctttagatgcaatagagagtttaaatacacacagagtagtacacgaacctcaggcattttcttctttcagagaacgcctataccacttgcagagaaccgaaaatgatcgggtttgctttggtagatcaggcatacacggatggggcctctttgcacgtagaaatattcaagaaggagacatggttcttgaatatcgtggtgaacaagtgaggcgcagcattgcagatttgagggaggcacgctatagattagaagggaaagactgctccctgtttaagataagtgaagaagtggtggtagatgccactgataaagggaatatagctcggctgattaatcattcttgtatgccaaattgctatgccaggatcatgagtgttggtgacgacgagagccggattgtactcattgctaagactaacgtggttgccggtgatgagttaacgtatgactacttgtttgatcctgatgagccagaggaaaacaaagtcccgtgcctatgtaaagctccaaactgccggaaatacatgaattaggaaggattatacaaatgaaatgaaaatcagatgacaagactcaagagtattgtttcttctccgcaaggagcactaaccccccatcccctcttctgcagggaatcaacagttacaccaaagctgtattttttatcaaaccaaaagaagagaaaaaaaaaaaaaaggcatagtttagcgtttttcttttacccttttggtttcctttagacattcatcgaattttaataaaagctagatttggtagctttttggctcttggcggctctgtaaatgaatcaccccatattactcattttcttccatttaatgttaaccgatttctttcccttcatgttctaccaatctaattgtatggaaaaaaataccaacaaaaacgtgttgcacccaaaaaaaaaaaaaaaagggcgaccgctcgc

SEQ ID NO: 7612 - DNA, 1146 bp, Glycine max
catagtcacgtctcagtgtgtgtatttacatgtttttgtttcatcctgtaaaagctaaatccatgatgatttcttccagtctccttcactcacgctcctctttcaaattcaatccttggcttaaactgaatcatccttctcatgctgcaattggacttagactcagactcaaaccctacccaaccaatttcacctgcaaggcagttttctccgacgatgccccctttgccgccgcaatcggtgcttgcatgttcacttctttgcttttaccagtctctacttcctccgaagacgacgatgccgactccgccgtcaccacaaccgacgcaaggctcgccgtcatggggattctcagtttcatcccttatttcaattggctcacttgggttttcgcctggctcgataccggcaaacgccgttatgctgtctacgcacttgtttatttggctccttatctcaggtcaaatctatctctgtcgccagaagaaagttggctgcctattgctagcattctgttctgcattgttcacattcagctggaagcaagcattagaaatggagatattcaggggtttcaactattcaggaatgtcgcagatcagctatcatcaaataataggaagaaagatcatttaaatctgcatcaagaaatgtctgaggagggaatcaagaaagaaaagaagaacctgccacatgcccaggaacaatcaagggatattggaggttgggaagattcacagaggcctttacaaccccggcagcacttgaatgaagacttagatgatgacaaagaaagaaacaagcactaaacatggaaaactcactcaagtttcatgcccgatgctggtaccactcagctgcatgatgattagttttgaatcgttttaatggaactattgcgttgtcttaatgttgctcagttcctatgttaccatcttggattcttttcatggctggtgtttatctcatacttgtttactagatgatattgaaggtgccatagtataaaaacagagatatgcatacacctactctacggtctctacctctacctttcttccacctcattttttttcctctgtatcttttacttctcttttcctttcattatatatctggtcatatcttttaaaaaaaaaaaaaaaa

SEQ ID NO: 7613 - DNA, 1183 bp, Glycine max
tcagtcgagtcagctacgtaggcccccccccccaaaaaaaaaaacgaaaccttgtgaccacaacggttcaacttgtgagggggatcaaaacattcctagattggaatatggcaaaacttggttgttctagtcgtaggaaagcaattgaggagctccttagagggcgtgattgtgccaaacaacttaggagtgtcatcaatgggagttgtgaagatggatcatcaacaaccccatcatttgctgaacaacttgtgaaggaggtgctcatgtccttcaccaactccctctcgttcttgaagaacaaccccacttctgaatcccatgatgtttccaatgttcaagtttgtgaatctcccaagtctgaggactcccaagagagcaattgcaagagctccatcattaaggaacgtagagggtgctacaagagaagaagaactgaacaaacatgggagaaggaatctgaagctccaattgatgacggccatcagtggagaaagtatggccaaaaggagatcctgagtgccaaattcccaaggaactactatagatgcactcacaaatttgaccaaggttgccaagcaacaaaacaggtgcaaagagttcaagaggaaccaatcctatacaagaccacctactatggcctccacacttgcaagaacttggcaaaccctgagatcatacttgaccctatgtccccttcatcctcatccaagttccttagctttgacaactccttcccaaccccatcaaagcaagagtgcccctttctctcatcttctaatttgccatcatcagtgaaaggggagtgcaaggaggaggtccctccctcaacttcctccaatcattatctcatctcttctgacctcacttttgatagctcaccaaggcatcatgtcactctatcatcaacacttgactcagagtacaagagtgtggacatttcggatgtcttgtatgattctgctcagcttgatgatgcctttgaacccttccttgaatttagatgagcatgtccttgtttggtttgtgattttttttatataatttttactttagtgaaggcagtacaaaacaaaattgtctaatatttagtagtacttttcttagataaatgtaatatccgtgcttttattgtaaattttgtcattttcaatgaatgagaaatgatcataatgtttcaatg

SEQ ID NO: 7614 - DNA, 1627 bp, Glycine max
gaaacggggggtaagcaattaataaagttagggggggtgcggttcaggaaggagcgaaagggaaatcagaaaatggcacagtcctcctcgatcgtcgttactctgaggcagcacttgtttaaaaggaacctcacctctctcactctgcctcactctccttctcttccttccttctccttctctctgagaacaacaccccacactcctctctctctctccgcttccttctcttctcacacctccatggcccacacttcccttccctccgccgatgccggcatggacgctgtccagcgccgtctcatgttcgaagacgaatgcattttggtggatgagaatgaccgtgtggttggtcatgattcaaaatacaattgtcacttgatggaaaagattgaagctgagaatttgctgcatagagctttcagtgtattcctgttcaactcaaagtatgagttgcttcttcagcaacgatctgcaacaaaggtaactttccctcttgtgtggacaaacacctgttgtagccatcctctgtaccgtgaatctgagcttattgatgagaatgcccttggagtaagaaacgcagctcagaggaagcttttggatgagcttggtattgttgccgaagatgtaccagttgataagttcacccccttgggtcgcattctttacaaggcaccttctgatggcaaatggggagagcatgaactggactatctgcttttcattgtccgggatgttaatgtgaaccccaatcctgatgaagtggctgatatcaaatatgtgaaccgtgatcagttgaaggagctgttgaggaaagctgatgcaggtgaggaaggtctgaagctatcaccttggttcagactagttgtggacaatttcttattcaaatggtgggaccatcttgagcaaggaactcttggggaggccactgacatgaagaccattcacaagttgacataagtaagttcagaggagcttcctgcatccctgtaatgaagggtggctgcattccgaccaaataagaacgaaattggacctattttgagaagaattttcggagcagtgacttataggatgttgttggtctttttgttattcgatgatagctagaacaataaacgtctgagtgtttaaattagaagaattttttgttgttgcaaatttcggattttgggatgcaggcaagtttatcggaataagaatacaagatgttagtgatttgaatcaagtttatcatggtggcggtgttagggatcgtttgtcactttgtctccaaaccacaggatcagtgtatatcccgtgatcacgtgtggaggtacagaaatatagatccagattacgatcatcctttctcagcgaagcaccagtagattgcataaaagaaaaacatttgggtagtgacctttccgattcacagaataaataatgaattgatcagccacgtagacaagtaatacaaattaaataattaagaaaaatgttaaatgaacctcccatatgttaataatattcacctaaaaaaaagaaagaaataatagagaaaagtgatggatgttcaagtatcaatactaatagtaattaaattagccggcgagcttcttttcctttcaaaaaaaaaaaaaaaaaa

SEQ ID NO: 7615 - DNA, 1402 bp, Glycine max
acggctgcgagaagacgacagcgggatgaaccggggggtaagaaattaataaagttaaaggttcaggaacgaacgaaaaggaaatccaaagatggcacattcctcgatcgtcgttactctgagccagaacttgtttaaaaggaacctcacctgtgtaaaaattcacgctcattctccttcttcttctttcggatctcgttctctttctcttccttccttctccttctctcagagaacaacacctctctctctcaccgcctccttctcctctcacaccgccatgggcgagacttccgctcccgccgccgatgccggaatggacgccgtccagcgccgtctcatgttcgaagacgaatgcattttggtggacgagaatgaccgtgtggttggtcatgattccaaatacaattgtcacttgatggaaaagattgaagctgagaatttgctgcatagagctttcagtgtattcctgttcaactctaagtatgagttgcttcttcagcaacgatctgcaaccaaggtaacattccctcttgtgtggacaaacacctgttgcagccatccactgtaccgtgaatctgagcttattgatgagaatgcccttggagtaagaaatgcagctcagaggaagcttttggatgagcttggtattgttgctgaagatgtaccagttgatcagttcaccccattgggtcgcattctttacaaggcaccttctgatggcaaatggggagagcatgaactggactatctgcttttcattgtccgggatgttaacgtgaaccccaatcctgacgaagtggctgatatcaaatatgtgaaccgcgatcagttgaaggagctgttgaggaaagctgatgcaggtgaggaaggtctgaagctatcgccatggttcagacttgttgtggacaatttcttgttcaaatggtgggaccatcttgagcgaggaactcttggggaggtcactgacatgaagaccattcacaagttgacataaaactcagaggaccttcctgcatccatgtaatgaagaagggtagctgtattccgacccaataagaacgaaactgaacctattttgagaagaattttcggagcagtagccccataggatattgttgatctttttgttatttgatgatagctagaacaataaacgtatggctgtttaaattagaagaattttttgttgaaaatttcggattctgggatgcaggcaagtttatcagaataagatgttagagatttgaatcaaaaaaaaaaaaaaaaaaatgtttgttagtggactcctatttagtactaaagaaaaaataattagggatcgtttgtctccaaaacataggatcatcgtatcccgtgatcacgtgtgaaggtacagaaatatagatcctcttttcccagc

SEQ ID NO: 7616 - DNA, 1442 bp, Glycine max
tcagctacgtaggcccccccccccccgccacaccataattttcacactcactacacctcaccaaataatgaaccatggaataccaataccacccatcatcttatggcgtctcttcctcttctcactctagccaccatcaacaagggtcaacaacaccgaaatccctctcttcacaacgcagcctcgtctcagttccctccctcaaccaccaccaccacctccacaccccgaattccaccgtctaccaccactgcctcacaaccctcaagggtcacacctcctcctacatctcctccttaaccctctccggcaaattcctctacaccggctcctccgaccgcgaaatccgctcctggaaccgcatcccagaaaactcatcaaacaacaatgacaatagcaacaccgtactcacgggaaacggtgctgttaagtcgttagtaattcagtcaaacaaacttttcagcgcgcatcaagaccacaaaatccgtgtctggaaaataagcactaacaacaacaacgataacgatcatgaccagaaatacacacacgtggccacactccccaccctcggcgaccgcgcctcgaaaatcttgatccccaagaaccaggtacaaatccgaaggcacaagaaatgcacctgggttcaccacgtggacaccgtctcggctttggccctgtccagagacggaaccttgctgtactcagtctcttgggacagaacactcaaaatctggaaaacgaaagacttcacgtgcctggagtccctcgccaacgcgcacgacgacgccatcaacgctgtcgcagtctcctacgatgggcgcgtctacaccggatcagcggacaagaaaatcaaggtgtggaagaaattcgcaggagaaaagaaacacactttaatagaaaccttggagaagcacaactctggggttaatgctttggctctaagcagcgacgagaatgttgtatattctggtgcatgcgatagggctattttggtttgggagaagaaagagggtgatgatgggaaaatgggggtggtgggtgctttaaggggacacaccaagtccattttgtgtttatctgttgtggcggatttggtgtgtagtggctctgcggatacaacgattaggatttggagaggttgtgttgattcgcatgaatactcttgtttagcggttttggaagggcacagggcttcgattaagtgcataagcgcagtggttgaccactgcaacaacaacaacaacaacacatcgcagtccgaagcattattatcttttctagtctatagtggcggtttggactgcgacattaaggtgtggcagattttacttccggctagctaaattataggacccatcataataataataataggttatttaaattaaaaaaaaaaaaaaaaaaaaaaaaaaaaaaaaaaaaggaaaaaaaaaaaaaaaaag

SEQ ID NO: 7617 - DNA, 2272 bp, Glycine max
atcagcatcttattctgtttattaatttcttttgctgttgtatattttatagtgcaacaccaccacctctccaggcaggaacattctcacgtggtgtagtgactatgcgttgtgatatatcaacatgtagttctgctcatatatcacttttggtgtctggtagtgcagacacttgttttaatgatcaggcatgggtgaatttgctgccagtgtttgacattttacatatatgatcttttaaactttttacttacctatcacttattttgggtatatcctcagcttttggagaatcatattaaaaaagagctgattgagaagagtcaacttgtccaggcatttcctaatcatcaacaaagtaaagcaccttcatccgagcctcgaagatcagcctcagtagcgtgtggatctagtgtgtttgaagtttgtatgcgagttcctgcatgggcttcacaggttaattgttgtttctcaaggtttcgtctgtcggatatagctttctaaaatataatttaatggatcttaaaaattatttttaatcaatgaaagggcctagatggaggcttttgctaaagatatttgtgacttctgctttgccattatattttccagttgactggtttatgtattttagtccaattgttaggcctataacagtagtttgtttactttgttattgttccaattgttctgtttttcacggaagtgacggaacatatgaaaatagcctccacattgtattggcttgatcttttagcaatttcatgctgtaatgacatgacccttgttagttccttttttctttttgaataatgaaaccttatcttttgattaatggtttttgatatttgtgcacaggttctgagacagcttgcacccaatttggcataccgcagccttgttatgttgggaattgctagtattcaggcattgccagttgcatcttttagtaaagatgatgccgagcgccttcttttcttttgtactaggcaggagaaagaaaactgtcctaaggatcatgttttctctggtattccaagttggctgaagcctccaccacccagtcgaaaaagatctgaaccatgctctagttcaaagtctattaatgctagtggccggggagttgaagctattggcagtcatagacagaaatttattgttgcttctatgaggccaatccctcactctaatagacacaagattctccccttttctggattgtctgagggtacaagatatgatggagaccatggaaaatcaaatctaccacttgctcttattaagcataatgtttcaggccctacttcagttacaaataggaaatctgtgtcgaattcatttcaagctcaccagattatttctttgaatccactacctatgaaaaagcatggttgtgacagagctccaatacgagcttgctctgaggaggaattcttgagggatgtaatgcagtttttgatacttcgggggcataatcgtctaattccgcctggtggacttgctgagttcccagatgccattttgaatgcgaaacgccttgacctgttcaacttgtatagggaggtggtttcaagaggaggctttcatgttggaaatggtatcaattggaaagggcaagttttctcaaagatgcgcaatcacactatgacaaatagaatgacaggtgttggcaatacactcaaaagacattatgaaacttatctcttagaatatgaattatctcatgatgacgtagatggagagtgctgcttgatgtgtcacagtagcgcagcaggtgactgggtgaactgcggcatatgtggtgaatgggctcattttggctgtgataggcggcagggacttggagcatttaaggactatgctaaaaccgatgggctggagtacgtttgtccccgctgcagtgcgttaaaattcagcaaaaaatcccaaaaaactgcaaatggtttttaacaactaacacaggtcaaacattgctggcccagagcaaaatgtacattgcaagtgctagatagatttatttacacatccattgtgcttggacccttgtctcaattggtaagggtaggtttctaaggactgtaattgtttcacttatgttaaagctgtagagttttgacatgctatggtcacctcacatctcaaacttgcctattttattttgtcaaaggtactcatacctagtacaaaatgggtgtcgtcttgtcataggtattcattgcaattatcattattattattattattattattattattattattattatttctt

SEQ ID NO: 7618 - DNA, 1777 bp, Glycine max
ttggtgcccacgcgtccgtacgggcgacttggcggcagggggcggagagtggttgtaagaaaaggaaatgaagaagaaggaaataatggtgatggttccgtatccggcacagggacacgttagtcccatgcaaaagctaggctgggaatttgtgaggcaggggttcgaggctgtgattgtgatccccaaatttattcacaggcagatagcagagcttcagaaaaatgatgagaatgagatgataaagtgggtggctctgccagatcatgaagaagaagaaggaagcaacccaccagaagatttcttcgccatagaatcggccatggagaacagcagcatcacaactcacttggaagcactgctccatagcctggccgcagagggaggtcacgtggcctgcttggtggttgacttattggcatcttgggccatacaagtatccgataggcttgccatcccttgtgctggcttttggcccgccatgttcgccacatacctcttcatttctgccatacctcactttctccaaactcgcctcatttcaaactctggacttccacaacacgagggaaaatttagccttgaacctgagctgccggtgatttcaactgaggatctgccatggcttgtgggaacagacgctgcaaggaaagcaagatttaaattttggaaaagaactttggagagatcaagtgctctgaaatggctcctggtgaattcctttcccgatgaaagcaaactggaattggcaaacaacaagaagtttacagcttgtcgacgagtgttgccaataggccctatttgtaattgtaggaatgatgagttgagaaaaagtgtgagcttttgggaagaagatatgagctgcttgaagtggctagaaaagcagaaggccaagtcagttgtatacatctcattcggaagttgggtgagtcccattggggaagcaaagttgaaaaatttagcactggcactcgaggcttcagggaggcctttcatttgggtattgaggtccacttggcgtcatggcttaccacttgggtttatggaaagggttgtgaagcaaggcagaggcatgatggtttcttgggcaccacagaatcagattttgcagcataactctgtggcttgttatatcacacactgcggctggaattccatattggaggctttacagttccaaaagaaattgctttgctacccggtggcaggggaccagtctgtcaactgtgcctatgttgttcaggtttggagggtaggtttaaaactcaatggccttgaaccaaaggatgttgaagaaggacttgtaagggtcatacaagataaggaaatggatacccggttaaggatattgaatcaaagaatcatgggtaccaataataagacgggggctctcatgttgaaaaccttcctccaagatctcaagaaggcaagctctacagcaactacatgaattattactccatgcaggtctttctgaagaccctcacccaaaaaattatttctctatgttaaggcattgtaaaaatcagaagaataatcgacactccaccttgtctttaggctctgtgatcgccatgtctagttaactcactagaatctacgcatatttttatgagttattataataattttctcttttcaagtgtatttttatcagtgatcattcttaaatctctttgcctgtcggatcccgtaagaaattgcagtttgtgctagtatgtttctttggtaatttattacaaaattttaaatttgctataaaaaaaaaaaaaaaaaa

SEQ ID NO: 7619 - DNA, 1631 bp, Glycine max
ataatatttgatctgtttccgtgagagtaagttgttctgtggctgaggcagtgcatccgaaattctgatctgtgagaatgggaaaaggtggatctctgagcgacggcgtggtgaagaagatcgttctctcctacagctacgtggcaatatggatcttcctgagcttcaccgtcatcgtctacaacaagtacatcctggacaagaagatgtacaactggcccttccccatctccctcaccatgatccacatgtccttctgcgccaccctggccctcctcctcgtccgcgtcttccgcctcgtcgagcccgtctccatgtcccgcgacgtctacctctcctccgtcgtccccatcggcgccctctactccctctccctctggctctccaactccgcctacatctacctctccgtctccttcatccagatgctcaaggccctcatgcctgtcgctgtttactccatcggcgtcatgctccgaaaagaatcctacaaaaacgacaccatgcttaatatgctctccatctccctcggcgtcggcgtcgccgcctacggcgaggcccgcttcgacgcctggggcgtcctcctccagctcggcgccgtcgccttcgaggccacccgcctcgtcatgatccaaatcctcctcacctccaaggggatctcgcttaacccaatcacttctctctactacgtcgcgccgtgctgcctcgtgtttctctctattccgtggatctttgttgagtatcctgttttgagagacacttccagcttccacttcgatttcgtcatcttcgggaccaactccttctgtgcattcgcgctgaatctggccgtgtttcttcttgttgggaagacgtctgcgttgaccatgaatgtggccggtgttgtgaaggattggttgctgattgcgttttcgtggtcggttattaaggacaccgtgacgccgataaatttgttcggctacgggcttgcgttcctcggcgtggcgtattacaatcactcgaagctgcaggcgctcaaggccaaggaggcgcagaagaagaccgcgcaggcagatgaggaggaagggaggttgctcgaggacagagatgacaacaagaggaacgaacagcagacttaacttttatttatttttaatcgttccctgttttattttacacagattcaagaaaggaaaaaaacaaacaagaggtttggtttggttttcgaggcaaatatggaaatgtcatcgtcctctctgggcatattgccggttcggtattgtttttttagttgctagatcttcttcacgttgccaatgcggtgggtagttaattagtagatatgggtttgagatttgagaacaattatgtgttactagagctagagtctccaatccttttattattattattattattattttcttttatctcattcccgttttcggtggttttgttttatgttatgttattgtaggaactcgatttatggagtttacatgcttcttattaattcatagtacatttcaattctgtgtaatgtgaatttgggatttatcttatagccaagctgtctgacaaatttcacttggcactgtgttccgaattactctgtttcggttgtaaaaaaaaaaaaaaaagggcggccgccg

SEQ ID NO: 7620 - DNA, 1987 bp, Glycine max
attttcatctctctgtcactttcattcctcttcctcccttttcccttcttccctctcacacaacatcattattgccttttcatccttaattatggcttcttcttcagatgttaaccatctttcacatccttgcatctatggggattatagttcttctcgctcagagagaaagtccggtttcatgaaatggcttagtaagcttttcagaggtgggtccaatagaggaaggggctgtcgtcacctgcatgagccagcagaggaaagcatagttcggggtgctccatctagagctttggatgatcgtggtagagctcagaaggagaaagaggatttaggccatgcaatggcactttcttcagccgaagatttaaagagaccaaacggatataatcggggagaagacaccggtgatgattactcaaaggcacctcacgatacccttaactcatctgcacaccctccatttgcccctacaccattttatccccatccccacaaatatagtttcccattgaacagaagagtatgtggtggctgcaaccaagagataatgtatggaaattgtttgggctgcatggatacttattttcacccaaattgttttcgctgtcactcttgtggttaccccattacagagcgtgagttttccttgtcagggaagcatccatatcacaagtcatgttttaaagagttgaatcatccaaaatgtgaagtttgcttccaatttattcctataaatgctgctggtttgattgagtataggtgccaccccttttggtcccaaattattgtccatctcatgaatatgataatacagctcgctgctgtagttgtgaaagattggagcctttgaacataaaatactatagactagaagatggacggagtttgtgtttagagtgcatggaatctgctataatggataccggtgattgccaacccctataccattctatcagagactactatgaaggaatgcagatgagaatagatcaacaagttcccatgcttctagttgagagggaagcactgaatgaagctattgtaggggagaaaaatggttttcatcacttaccggaaacaagaggtttatgcctttcagaagagcagactgtcaccagtatacatagaagaccaagaattggaggccatcgactaatagggatgagaactcaacctcaaaaactgactagaaaatgtgaagtcacagcaattcttgttctatatggtcttcctaggttactcacaggtgcaatacttgcccatgagttgatgcatgcatggctacgccttcatggttatcgcaaccttactcccgaagtagaggaaggcatttgtcaggttctttcgtatatgtggcttgagtcagaagtaatgcctagctttcaaaacatgccatcaacatccacaagtgctggttcttcctactcttcttcctcctcctcctcctcctcgtcgtcctcctcctcctcaaagaagggtgcaaaatctcatgttgaaaataaattgggtgaatttttcaagaatcagattgccaatgattcttccccagcttatggtggtggctttagagctgctaatgaagctgtcaataaatatggtttgcgtagaacacttgaccatattcattggactggttttttcccagtggaaaaagaacgcaagttctctaagtatggatagaagaagtgctttgttttcattttctttggttccacaagtggacagaccaggaccggttcaaagtaaagacagaagcttggacaacttctgatatttgggtcctatgaggaagtccaaagtctaatttgacaaaacaataaatatatgcatgacaagttagtattcaacgatagtttatttcccttgaccaaagaataagtaactgttatttctttatgcatttagcaattattttggtaaatgaagttaacaaggctgagcaatattgcttttgcaaatattctaaaataaagcatcccttcct

SEQ ID NO: 7621 - DNA, 1951 bp, Glycine max
attttgttctatagttggttgttcgtttctctcattattcattacccaataatccccactttctataccattgccgtattgaccttttttgtattacaaccggccgaacacgacaacagcgccaatacaactttactttatacctaaacaccaaagtggaaacctacactacagttcaatcgaatctaccttgagctgtgctggatctcttcttcttcttcttctttcaccttaggctaccgagttaatggatccgagaggtgtactgatattagtggcggttctagttgcggaaattggctctgtcgccaacggaaatttagtgttcccggtggagcgtcggaaaaggagcctaagcgctgtcagagctcacgacgttcgccgtcgcggtcgaattctctccgccgtggatctcaacctcggcggcaatggtctccctaccgaaaccggtttgtattttacaaaacttgggcttggctctcctccgagggattattatgtgcaagttgatacaggaagtgacattctttgggtgaattgtgttgagtgctccagatgtcccaggaaaagtgatcttggtatagatttgactctttatgacccgaagggctccgaaacttcagaggtggtttcttgtgaccaagatttttgctctgccacgtttgacggtccaattcctggttgcaagtctgaaattccatgcccctacagcataacttacggagacggaagtgcaactactggatactatgtccaggattatcttacttataaccgtatcaatggcaatcttcgtacttcgccacaaaatagcagcattatttttgggtgtggtgctgtacaatctgggacattgggttcatcttctgaagaagcccttgatggaataattggttttggacaagcaaattcttctgtgctttcacagcttgccgcatctggaaaggcgcgagaaatattttctctatctgttttgacaatgttcgtggtggtggaatatttgccattggggaagtggtggaaccaaaagtcagtacaactccattggtaccaagaatggcacactacaacgtggttttgaagagtattgaggttgatacagatattctacagcttccctcagatatatttgattctggaaatgggaaggggacaataatagatagtggaacaaccttggcttatcttcctgccatagtttatgatgaactgattccaaaggttatggcccggcagcctcgactgaaattatatcttgttgagcaacaatttagttgttttcagtatactggaaatgttgatcgtggatttccagttgtcaagcttcattttgaagattctctatcactgacagtttatcctcatgactacctgttccagtttaaagatggtatctggtgtattggctggcagagaagtgtggcacaaacaaagaatggaaaggacatgacccttcttggagatttggtgctatcaaacaaactagtgatatatgatcttgaaaatatggccattggatggactgactacaattgctcttccagcattaaagtgaaggatgaagcgactggaatagtacatacagtggttgcacacaatatttcttcagcttctaccttatttattggaagaatattgactttctttttgttgctaactgccatgctaaacaattaaattaacttggtcttgatataatagggatgacattcattcgattttgttgtaccataattcctgtgcagtgtggttgatatggtatagtcaatcattactcgtgtagatagaattgaaaaaggggcaaatatttttaagtttttttttcagtatttttttgtattattttttaaattgattaccaatgaatgtattgccttgactttttatgacgatgacgatggatattgctgttcattcaaaaggtagttaaataatacaatttacttgtagc

SEQ ID NO: 7622 - DNA, 861 bp, Glycine max
acaattttttttgcaactacattatagcaattcacacaacacaacacaggcaaataatcttcaaccattcttctttttctttcttctttatctcaattgtttgtggttactgtgcagattaatggggaggttgtttgtggtgaatctggaagggaagatctatagctgcaaacactgccatacccatcttgcgctttacgatgacatctactccaggacattccattgcagacatgggaaagcttatctcttcaataaggttgtgaatgtttctattggcgaaatggaggacagaccgatgatgactgggttacataccgtggctgacattttctgtgtgggttgtggatcaatcgtgggttggaaatatgagactgcctatgaaaaaaaccagaagtacaaggaaggaaaatcagtgcttgaacggtacaaagtgtcaggtcctgatggaagcaattattggatcagcaatgaggcacatgttggtggaagtgatgcagatgatgcttagtcatcctaccattcccaattaaccgtatttggatgaagaaagcctttcaagtgccctgtctctgactctctctcactctcttaaatggaatgtattgaaataaaagactgctgaaaaaaatgtattataaccaaaactttgttggttgaatttactctagtttcttcaaatggattttcatcaattctgttgtcaaatacaatattgcttgaatgtatactgacataaccggattgatatccacatattggcattcgtgtcgtagtgcatgagtggttgagtgggatatactaaaagggcaaaacttatccgatagactttaggtacatgttgtgattaaaacccaaaaa

SEQ ID NO: 7623 - DNA, 778 bp, Glycine max
  misc_feature (20)..(20): n is a, c, g, or t
  misc_feature (729)..(730): n is a, c, g, or t
tcgagtcagctacgtaaggncccccccccgaggaccacaattttttttgcaactacattgtagcaatcgacaaaacacaacacagagtaatggggaggttgtttgtggtgaatctggaaggaaagatctatagctgcaaacactgccatacccatcttgcgctttacgatgacatctactccaggacattccattgcagacatgggaaagcttatctcttcaataatgttgtgaatgtttctgttggcgaaatggaggacagaccgatgatgactgggttacatacggtggctgacattttctgtgtgggttgtggatcgattgtgggttggaaatatgaaactgcatatgaaaaaaaccagaagtacaaggaaggaaaatcggtgcttgaacggtacaaagtgtcaggtcctgatggaagcaattattggatcagcaatgaggcacatgttggtggaagtgatgcagatgatgcttagtcatcctaccattctcaatttttgtagcaccgtatttggatgaagaaagcctttcaagtgccctgtctctgactctctctcactctcttaaacggaatgtattgaaataaaagactgctgaaaaaaatgtattataaccaaaactttgttggttgaatttactctagtttcttcaaatggattttcatcaattctgttgtcaaatacaatattgcttgaatgtatactgacataaccggattgatatccnnaaaaaaaaaaaaaaaaaaaaaaaaaaaaaaaaaaaaaaaaaaaaaaaa

SEQ ID NO: 7624 - DNA, 1443 bp, Glycine max
  misc_feature (1443)..(1443): n is a, c, g, or t
tcgagtcagctacgtaggcccccccacgcgtcagcggacgcgtggcttgaaaacgacccgtttcctccctcgcacggatccacccgaaatctgagattccttcgaattgttaactctctttcagtttcaagttggaaactttttcgattttcgctttctggaggtgtgaattgttgtttgaaagtcacaagcaatggtgaaggacactgcgtattatgacatattaggtgtcaattatgatgcatctgctgcagagatcaagaaagcttattatgtcaaggctagaattgttcaccccgataaaaatcctgaggatcctaaggccgcagaaaactttcagaaacttggtgaggcttaccaggttttaagtgatcctgggaagcgtgcggcatatgatgagcatggaaaggagggagtaccacaagattccatgatggaccctacaactgtatttggaatgatttttggaagtgaattttttgaagaatatattggacaacttgcactggcttctttagcatctatagaaattgaggaagactcacaggatcctgaagttttgaggcagagaattcaagaaaagatgaaagcttggcagaaggaaagggagcaaaagctttcaacatttctgaaagatcgcctgcaaccatttgttgatggtcgagaagatgaatttacagcatgggcaaaatcagaagcacgtagtctttctaaagctgcttttggagaagccatgctacatacaattggttacatctacacgcgaaaagctgcaagagaacttggaaaggatatgcggtatatgaatgttccctttttggcagagtgggtgcgagacaaaggacaccgtataaaatcacaagtaacagcagcctcaggagctgtgtccctcattcaaatacaagaagaactcaagaagctaaaccaaggagaaaacaaagaagaaagcatagtcaaagctattgaagataagaaggatgccatgattaattctctatggcagatcaatgttattgatattgaatcaactctgtcacgtgtttgccaagctgttcttaaagatccaagtgcctccaaagatgttctgaagtctcgagccaaagcattgaaaaagttaggaactatctttcaaggtgctaagtctgcttataacagagaaaacagcctacgcaaggaaagtgacaaaacatcagatgctgcttcctcatcatagtcatcttgttcagtttgtcatgagcggtattcttatggccttctgactcagtggattttgaacattgtttcttacagtgctgttaataggcatggtatgtaatttcacttggacttatggattggattaagctgccataattacacacacttgtatttaattattatcatctattgataattgatttcgtttcattttttttaccatatctaaaaaaaaaaaaaaaaaan

SEQ ID NO: 7625 - DNA, 1324 bp, Glycine max
  misc_feature (29)..(29): n is a, c, g, or t
tcgagtcagctacgtagggcccccccccnatttcctctgtggcacggatccacctgaaatttgagattccttcgaattgttaactctctcaatttcaagttggaaactttctcaatttgcttaattatagaggtgtgaattgttgtttgaaagtcacaagcaatggtgaaggacactgcgtattatgacatattaggtgtcaattatgatgcatctgctgcagagatcaagaaagcttattatgtcaaggctagaattgttcaccccgataaaaatcctgaggatcctaaggccgcagaaaactttcagagattccatgatggaccctacaactgtatttggaatgatttttggaagtgaattttttgaagaatatattggacaacttgcactggcttctttagcatctatagaaattgaggaagactcacaggatcctgaagttttgaggcagagaattcaagaaaagatgaaagcttggcagaaggaaagggagcaaaagctttcaacatttctgaaagatcgcctgcaaccatttgttgatggtcgagaagatgaatttacagcatgggcaaaatcagaagcacgtagtctttctaaagctgcttttggagaagccatgctacatacaattggttacatctacacacgaaaagctgcaagagaacttgggaaggatatacggtatatgaacgttccctttttggcagagtgggtgcgaggcaaaggacactgtataaaatcacaagtaacagcagcctcaggagctgtctccctaattcaaatacaagaagaactcaagaagctaaatcaaggagaaaacaaagaagaaagcatagtcaaagctattgaagataagaaggatgccatgattaattctctatggcaaatcaatgtgattgatattgaatcaactctgtcacatgtttgccaaactgttcttaaagatcctagtgcctccaaagatgttctgaagtctcgggccaaagcattgaaaaagttaggaactatctttcaaggtgctaagattgcttataacagagaaaacagcctacgcagagaaagtggcaaaacaccagatgctgcttcctcatcatagtcatctgttcagtttgtctgatatggttatgtattgagtagtattcttatgaccttctggctctcagtggattctgaacattgtttcttacagtgctgttagtaggcattgtatgtaatttcacttggactaacctgccataattacacgcgtttgtacttaattattatcatctagtgataattgatctcattttactctttttaaaaaaaaaacacaaaagaa

SEQ ID NO: 7626 - DNA, 1374 bp, Glycine max
gcgggggatcataaatcacaaagacacaattcaacttaagagatcaatatggccaccattaccaagcctccttctaatatatgtttcctccttctgttgcttctagcacacttccatttgggccaaagccaagttgagttgaattactactctaaaagctgcccaaaagctgaagagataatcaaggaacaagtcacacaactatacaacaagcatggaaacactgccgtttcgtgggtcagaaatctcttccacgattgcgtggttaagtcatgcgatgcatcactactgttagcgacggtgagcgatgtagtgtcggagcaggcgtcggatagaagttttgggatgagaaacttcaagtacgtaaacaccatcaaagcagcggttgagaaagaatgccccttgacggtttcatgcgctgacattgttgctctttctgctagagatggcattgccttgttgggaggaccaagcattgaaatgaagacagggcgaaaggatagcaaagaaagctatgcaacggaggtggaagccttgattccaaaccacaatgattccatgtcctcagtgctgtctcgttttcaagccattggcattgacgttgaagccacagtcgctcttttaggagctcactcggttggaagagttcactgcaagaacctggtgcacagattataccccaccgtggattcaacactaaaccctgcacacgctgagtacctaaaacgtcgctgcccaacacccaatcccgatccaaaagctgttctgtattctaggaacgaccttaaaacgcccatgatcattgacaacaactactacaagaacatcttgcaacacaagggtcttctaattgtggatgaagagcttgccactgacccaataactgcaccttatgtccaaaagatggccaacgacaatgattatttcaaccaacaattctcaagggccattcttttgttgtcagagaccaatcctttaacaggagatgaaggtgaaatcagaaaggattgtcgctacctcaatgccaattaaatatataacataaggttgccctttgtgcatgataatatgtataattagcatagattataatgcacgagtgcgccaaaataaacgggtgggacgtactgggcctaggttaccatattcagtgcaatacgccattgggcctagccttatgtatacgcttatgtttgggcttttacttcctgcacgctccctatttgcgggaagtaattcccttctgtttgctttgttcatagacatgtcatatgttactactacagctaacaaagcccaacatcttaaaggtttatggaatttgtgttcttcgttgtctatctttaaaaaaaaaaaaaaaaaactcgagactag

SEQ ID NO: 7627 - DNA, 1537 bp, Glycine max
tcagctacgtacgcccccccccgacaattcacaaagagacaattcaacttaagagatcaatatggccaccaccactacccagcctccctctaatatctgttttttccttctgttgttgcttctagcacactttcatttgggcataagccaacttgagctgaattactactctaaaagctgcccaaaagctgaagagatcatcaaggaacaagtcacacaactatataacaagcatggaaacactgccgtttcgtgggtcagaaatctcttccacgattgcgtggttaagtcatgcgatgcatcattactgttagcgacggtgagcgatgtagtgtcggagcagacatcggatagaagttttgggatgagaaacttcaagtacgtaaacactatcaaagcagcggttgagaaagaatgccccttcacagtgtcatgcgctgacattgttgctctttctgccagagatgccattgctttgttgggaggaccaagcattgaaatgaagacagggagaaaggacagcaaagaaagctatgcaatggaggtggaagacttgattccaaaccacaatgattccatgtcctcagtgctgtctcgttttcaagccattggcattgacgttgaagccacagtcgctcttttaggagctcactcagtgggaagagttcactgcaagaatctggtgcacagattataccccaccatagattcaacactggaccctgcacatgctgagtacctaagacgtcggtgcccaacacccaatcccgatccaaaagctgttctgtattcaaggaatgaccttaaaacgccaatgatcattgacaacaactactacaagaacatcttgcaacacaagggtcttctcactgtggatgaagagcttgccactgacccaagaaccgcatcttatgtccaaaagatggccaatgacaatgaatatttcaaccaacagttctcaagggccataattttgttatcggagacaaatcctttaacaggagatgaaggagaaatcagaaaggattgtcgctacctcaatgccaattagatatataatataagcttgcatttgtgcatgataatatgtataattagcataagattataatgcacgagtgtgtcaaaataaagagggtgtggaacgtactgggcctgggttaccatacatattcagtgcaaaaagctattgggcctagccttatatatacccttgtgtttgctttgttcatagatgtgaatgttacttgacttcagctgacaaagcctcaaacatcttaaaggtttatgaagtactttgttcttcgctgtcgatctataatggaaaatgtttgatcaacatttcatatgttatcctacattcctacctctagagagaaagaaaaaagaaaagaaaaagtataataggatttataatgtaaaagaaagagagatataaaaaaaaaatgagagatgtttgtgaaatgttttcaatgaaaagtgatttatggattattactctttaaaaaaaaaaaaaaagaaaaaaaaaaaaaaaaaa

SEQ ID NO: 7628 - DNA, 1444 bp, Glycine max
atatatacttaagtacttagctggatcactcaatcctaatattttatattccaattaaaatagtgagagtactagaaggtagtgagatcgcatagggaataatggaaacagaagtggttgaagatattgtgattgtgggagctggaattgctggccttacaacatccttaggacttcacaagttgggtatcagaagtttggtgctagaatcttcagacactttgagggtcactgggtttgctttgtcaatatgggaaaatgcttggaaggcattggatactgttggtgttggagacttcctccgccaccaacatctccagctcaatgggattgtcactacttcattggttacagggcaacaaacatcagatatgcctttcacagaaacaggaaatcagcaaagaaaccgtgaaattcgttgtgttaaaaggaagttactgttggaagctcttgccaatgaacttccaagtgacaccatcagatacttgtcaaaggttgttgctattgaggaatctggcttctacaagattgttcatcttgctgatggcacaaccatcaaaaccaaggtattgatcgggtgtgatggagtgaactccatagtagcaaagtggctaggcttcaagaatgcctcttttacagggagatatgcaattaggggttgtgcagaggttcaaagcaatcacgggttagaacccaggttcatgcagttctttggcaaaggttttagagctggtgttattccttgtgatggaaacgttgtttactggtttttcacttggacacccaacaaccaagacaaagagctagaagagaaccctgccaaactgaaagaacatgtgctaaacaagcttgagaatatgccaagtgatgttagatactacatagaaaaaaccgaaatcgatgccttccaattagctccattgagatatagacacccttgggagctgatgtttgggaatattagtaaaggcaatatttgtgttggtggagatgctttccaccccatgactccagaccttggccagggagggtgctgtgccttagaagatgggattgttttagccaggtgcctagctgcggccttctccaaacatatcaaagagaaggatgaagaggaccaattcaaaaggattgagggaagcttgaagaaatatgcaaaggagagaagatggagaagcattgatgtcattgctacagcttatatggtgggttctattcagcaggctgagtccaaattggttacctttttgagggacaacattttggctgcattcttagctagtcaattgttcaagaagtcgggttatgattgtggaaaactaaataatagtaactcttagtgacacagttatcttgtaagatgctcggtccgtcagtgttgtgttgcctttcatttggccattttaatgaatttctagtccttgttataaaaaaaaaaaaaaaa

SEQ ID NO: 7629 - DNA, 1480 bp, Glycine max
cccacgcgtccgattccacataataatattacgcctcccctcatgtgtatatataatatcagctacgtaggccccccccccggtgagtgaaagaccacaaacaacaaggttggttcaacttgtgtgaagggattggaacatggaaaatcttggtggttctagtcgtaggaaagcaattgaggagcttcttagagggcgtgattctgcccaacaacttaagagtgtcatcaatgggacttatgatgatggatcagccaccccatttgctcaacaacttgtgaaagaggtgctcatgtccttcacaaactccctcttgttcttgcacaacaaccccacttctgaatcacatcatgtcttcaatgttcaagtatgggactctcccaagtctgaggactctcaagagagcaattgcaaaagctccaccattaaggaaccaagagggtgctacaagagaagaagaactgaacaaacatgggagaaggaatctgaagctccaattgatgacggccatcactggagaaagtatggccaaaaggagatcctgaatgccaaattccctaggaactactataggtgcactcacaaatttgaccaaggttgccaagcaacaaaacaggtgcaaagagttcaagaggaaccaatcctattcaaaaccacctactatgggcaccatacttgcaagaactcggcaaaccctgatatcatacttgaccccatgtccccttcatcctcttccaagttccttagctttgacaactccttttcaaccccatccaagcaagagtgcccctttctctcatcttccaataatttcccatcatcatcatcagtgaaaagggagtgcaaggaggaggtccctccctcaatttcctccaatgattacctcatctcttctgacctcacttttgatagctcaccaaggcatcatgtcactctatcatcaacacttgactctgagtacaagagtgtggacatttcggatgtcttgtatgattctgcccagcttgattttgtctttgaacccttccttgaaattagatgagcatgtccttgttttggtttgtgatttttttttttaaatttaacctttacttcagcgaaggcagtgcaaaacaaattgtgtaatatatagttgtacttttcttagataaatgttatatccgtgcttttgttgtcaatattggtactttcaatgaatgagaaataatcataatgtttcaataaaaaaaaaaaaaaaaaaattttaatattttaaaaaaaaaaaaaaaaaaaaaaaaaaaaaaaaaaaaaaaaaaaatttctgggggccgcaagttttttccttttagggggggtaaatttaacttgggcccgggccgcggtttaaaaacgtcgaaatgggaaaaacccgtgggtaccccaattaattgcctttgggaaaaatcccccttttcccagttgggttatttgcaaaaaggcccgcacgaatcgcccttcccaa

SEQ ID NO: 7630 - DNA, 697 bp, Glycine max
  misc_feature (628)..(628): n is a, c, g, or t
gcagctcatcttctcgtccactccaaaccctagcctcctcctcctctcgccgccgccgccgccgccatgtcagggaggaagaagacccgcgagcccaaggaggagaacgtgacgctcggccccgccgtccgcgagggggagcacgtcttcggcgtcgcgcacatcttcgcctccttcaacgacaccttcatccatgtcacggatctgtccgggagggagacgctcgtccgcatcaccggtggcatgaaggtcaaagctgatcgtgatgaatcatccccttatgcagctatgcttgcatctcaggatgttgctgtaagatgtaaggagcttggaattactgctctgcacattaagctccgtgctactggtggaaacaagacaaaaactccaggtcctggtgctcaagctgcgcttagagctcttgcacgttctggcatgaagattggacgcattgaggatgttaccccggtcccaactgacagcactcgccggaagggtggtagaagaggaaggaggctgtaattccatgctcgttcaaggatggaacaataccaagctatcgatatcctgtgtcttgcaacttgttctgtactactccgtttatgatgttactccgtttatgatgttnagtcagatcttgtggatttatagattttgagcgatattgtgttgcatgtttagaaaaaaaaaaaaaaaa

SEQ ID NO: 7631 - DNA, 1292 bp, Glycine max
agcgtggtcgcggccgaggacgcggggaaggaaattcacccctttactcgtgatagccacaaactcgctgcttattttgatttgaactttgaagttttgttattttgtgcaatggcagccaagagcaaaatcctagtccttggaggaacaggatacattggaaaattcatagttaaggcaagcgcagaagcaggacaccccacttttgccttagttagagagagcaccctttctcatcctgaaaaatctaaacttattgagagcttcaagacctccggagttactcttctttatggtgatctaactgatcatgaaagccttgttaaggctatcaagcaagttgatgttgtgatttctacactaggtggacaacaaattgatgatcaagtgaagctcatagccgctgtaaaagaagctggaaacatcaagaggttcctcccatctgaattcgggcttgatgtggagcgtcacaatgcagttgagccagtgaccagctttcttgagaaaaaagtgaaaatccgaagggcaattgaagctgaaggaatcccatatacttatatatgttcaaatgcctttgctggttacttcttacctacacttggacaacaaaatgtcacagctcctcccagggataaggttgtcattctaggagatggaaacgtcaaagctgtttatgtgaaggaggaagacattgggacttataccataaaagcagtggatgacccaagaaccttgaacaaaactctgtacgtgagaccccctgcaaatgttttgaccttcaacgagctcgtgtcgttgtgggagaacaagattaagagtacccttgagaaagtctacattccagaagatcaacttcttaagtacatccaggagtctcctttccctgctaatttgatgttggcattaggccactcaatgcatgtaaagggtgattgtacaaactatgagattgacccttctttcggggtggaagcttctaacctttatcctgaggtgaaatacactactgtcgacaactatttgaatgcgtttgtctgaagtccagagaatgcgttatcatcaataaactgctctacctaagctgatcaataaaatcagagcatcttgtttattgctcaagaatttgtaccttgtcccttattgtcgttcgctacttcgcttagcttggcactgcttgaaagttcttctaatattaaagttctattactatttgtttgtggtgtgaatgtgatatttctaaggtccttatcaggttgtttacggttgaatttgaatcaaatgttagacaaaaa

SEQ ID NO: 7632 - DNA, 1383 bp, Glycine max
gcggggctacaaatagcaggcaaattcatcacagctacaaaaactcagcttattttgatttcaactttgaagtttagttgttttgtggaatggcagcgaagagcaaaatcctagtccttggaggaacaggatacattggaaaattcatagttaaggcaagcgcagaagcaggacaccccacttttgccttagttagagagaccaccctttctcatcctgaaaagtctaaacttattgagagcttcaagagctctggagttactcttctttatggtgatgtaaatgatcatgaaagccttgttaaggcaatcaagcaagttgatgttgtaatatctacactaggtggacagcagatagatgatcaagtgaaggtcatagcagcaataaaagaagccggaaacatcaagaggttcctcccatccgaatttggattagatgtggatcatcacaatgcagttgagccagcagcaagctttttcaacaaaaaagtgaaaatcagaagggcaattgaagctgaaggaatcccttacacttacgtttgctcatatgcctttgctggttacttcttgcctacattgggacaagaaaatgtcacagcccctccccgtgataaggttgtcattctaggaaatggaaacgtcaaaggagtttatgtcacggaggaagatgttgggacttataccataaaagcagtggaagacccaagaaccttgaacaaaactctgcaccagaaaccccctgccaatgttttgaccttcaacgaactcgtgtccttgtgggagaacaagattaagaccaccctccacaaaatctacgttccagaagagcaaattcttaagaaaatccaggagtcttctttccctgccaatttcttaatagcattaggtcacgcaatgctggttgaggaagcttttaacaatgaggttgacccttctgtcagtgtggaagcttctgaactttatcctgaggtgaaatacactaccgtcgacaactatttgaatgcgtttgtctgaaatccagcgaatgcgttattattgccaataaactattgcacccaagttgatcaataaaatcaaagcatcttgttgtgtatggctggagaatatgtactgtctttctattatttagttacttgtgcttgtgttggcgtcaaaagagttcttccttactttacactgtaaactgtactgttgttcgcttagcttggtgctgcttgcaagttcttctagtatttattatggctccgttgcaatttgttcatcaccactctgatcctagtggatgtgcgttgaaactcaattgccaacaagtattacagtgtgattatctcgaagttcttataaattaatgtcaaagtttttcaaaaaaaaaaaaaaaaaactc

SEQ ID NO: 7633 - DNA, 1970 bp, Glycine max
cttcgaatcgggtttcagatgcatctttggaaaggtgcaaaaaaaaagtcagtgaagtaaataagctgaaacaagaaaaaacgttgggttcagtttgcatcaatggcggatctgaagaaccgtaatttcctcacctacgcgtacattcttctctacattactctctccagcggccaaatcttcttcaacaagtgggttttgtcttctaaggaaattaacttcccttatcctttggggttgactctacttcacatggtcttctcctctgttctgtgttttgtgttaaccaagattctgaaggttatgaaggttgaggagggaatgactcctgaaatatacgctacttcggtagtgccaattggggccatgtttgcaatgactctttggctgggaaatactgcctacctgtatatttctgttgcttttgcacaaatgctgaaggcaattatgcctgtagctgtttttgtgcttggagtagctgcaggacttgaggtaatgagctacaaaatgctattaatcatgtcagtgattagttttggtgttctagtagcttcttatggagagataaatataaactggattggagtagtttaccaaatgggaggtgttgttggtgaagctctgagacttatcttcatggagatttttgttaagaggaaaggtcttaagttgaaccctttatccgtgatgtattatgttagtccctgcagtgcaatttgtttgttccttccatggatatttctggagaaaccgaagatggatgaacatggaccatggaacttcccacctgttttgcttatcctcaactgcctttgtacttttgctctaaacttatcagttttccttgtgattacacatacaagtgctttaaccattcgtgttgccggagttgtcaaggattgggtggttgtcttactgtctgctgttctgtttgctgatacaaagttaacactcatcaatttgtttggttatgcaattgccattgctggggtagcagcatataataattgcaagttgaaaaaagaaacctctcgtgacacctcggatgattccgaccctgaatcttcccaaatgcaagagtctcagcctttaacgagtagatagttgcagtctttgagttactcaagttgtccatgccttattcagaagttgatgagactatatagtagttttcatttttcacataatgtcactagagggcatcaaaattcatgtagtatataaaagtataagcaagcattttggttcaatcttagaaacagtttctgctaaatttagatcggggaaagcaatgtgctgatccaatgtagtacatgaagatgtaaaatacaaaattcatcctttaaaaaacaggtgcttggccatggcatttgatttttgaggaatttggagtcattcacattccacaatgattatttgtttgaagcaattaccaatttcaatcttagctagttgaatgatcaaagataaaagcccctgcacccactatttattataattggacagtgggccagtaaccaggggtatatagagcagtttctttgaaataatttgtttatttgaaatgtattgatagtatttgatattctgagacagattgtttcagttttaggagtctttgctcctttgtaatttattttttatgtggatgctttcattgtattttgtgaatctatctcgttggttctcactagtccctagtccattagatataggggaagacaaaaaaaaaatgtattttcctcaaaaataagatatatgtcgtgtatttgaagtaaatctgtattttggtgttactgtatgacattttcagcatatatttactgattataactttgtgataacattgttagcgttgtcatatattgaagtatgttgtggactaggcgatcatactgtctttcatttagtgttcttggggataggaggcctgaaatttgaactctaaaccttgttgctgataacatggt

SEQ ID NO: 7634 - DNA, 1423 bp, Glycine max
gaagactaaaaggttgcagaatgttatgaactctttagtccacgacaagcagaaggaatatggaggtttctattacagatgaaattgcaggcactatggagctcaaccctgataggctgggtgagctcaaagcatttgatgacacaaaagctggtgtgaaaggccttgttgatgaaggggtcgcaaagatcccaagattatttcatcatccacctgatgaatttgtcatggcttcaaagttaggcaacacagaatacactatacctgttatagaccttgcagaagttggcaaagatccaagttcacgccaagaaattataggcagaataagggaagcttctgagagatggggtttctttcaggtggtcaaccatggcatccctgtgactgttctagaggacttgaaagatggggtgcaaaggtttcatgaacaagatattgaggagaagaaagagctatatacccgtgaccatatgaaacctctggtgtataatagcaattttgatctgtacagttcaccagccctcaattggagggacagtttcatgtgttacctggctcctaatcctcccaaacctgaagacttgccagtagtatgcagggatatacttttggaatatgggacatatgtaatgaagcttggaattgctctatttgaattattatcagaagctcttgggctgcacccagaccatttaaaagacttgggttgtgctgagggacttatttcactttgccattactaccctgcatgccctgaaccagatttaactttgggaaccacaaagcattctgataattgtttcctcacagtgcttctccaggatcatattggtggcctgcaggttctttaccagaacatgtggattgatataaccccagaacctggggctcttgttgttaacattggtgatcttctacagcttataacaaatgacagattcaagagcgtagaacatagagtacaggcaaatctcataggtccaagaatatctgttgcatgctttttcagcgaaggtcttaaatcatcaccaaaaccctatggacctataaaagaattattgacagaagacaatcctcccaaatacagagaaaccacagttgcggagtatgtacggtatttcgaagctaaaggtcttgatggaacctctgcacttcaacacttcaagatttgagttgaattggtgtgtggtttatttagcccaataaatgaatagattagataagttggatattataacatttatgaaactaaataagattaaggatcttatattcttattcttggactggaaatctgtggtatcgtttgtcttgtaactaagtcattataatataccgtatgaggtgaaacaagaaaaataagcgggtgttgattatgtatcttcatatgaagctacgcctagcaaatttatgttctgct

SEQ ID NO: 7635 - DNA, 1066 bp, Glycine max
gcgctctacatcaattctcccttcataataaacccactgatcgcttctctttcctcttctctctctcagtagaaagcctacaaccttcttttatctgcgtttcctctctctctctctcgatcagtgctagacaaggactggtaaccaaaaattccaagaagggtacattaattcatggcctttgaggagcactatgtttctcaggaattgaaaaccatccccagccccatgacagtgacagaaaatttggatgggtgttttgattgcaacatctgcttagattttgcacatgaaccagtggtcaccctttgtggccacctatactgctggccctgcatctacaagtggctccatgtccaaagtgcttctcttgcaccagatgagcacccacaatgccctgtttgcaaagatgacatatgccacaccacaatggttcctctctatggccgtggccagggcatagctcatagtgaccatgatggaaaggcatcatcctatagaggcagttgtataccaccaagaccacctgctttgggtgctcaatcgctcattgcaacatcatctcaaagtgttccatatcgcaacacttatcaaaatcagcatttataccaagaagaggatgcatcatcatcacaaatgctgaaccctggtgccaccattttggcaccagggttcccccaccttgtgtttgggatgtttggagagatgttttataccagagtctttgggaactcggaaaatttatacacccacccaaattcttatcacctgggggaaagtaataatagtcccaggttgagaaggcaagagatgcaagcaaacaaatcattgaacagaatttcaatttttctgttttgttgtttccttctgtgtctaatcgttttctgagcaagaaattggattattattctctattgccctgttgtataattttaaagaaacacgggtgttagcttgagaatgagatagattgagcaattgtatgtagggtaaaagaactggtgttcttcatcatttactataatatatttgagctcgatttttcgaaaaaaaaaaaaaaaaaaaa

SEQ ID NO: 7636 - DNA, 1381 bp, Glycine max
  misc_feature (20)..(20): n is a, c, g, or t
  misc_feature (1375)..(1375): n is a, c, g, or t
tcgagtcagtcacgtaggcncccccccccgactgccgctctcggctccggcggcggggacttgttatgtgttgaaatacattggtttatgggaagagagcaaggcaggaagtcagtgtttataaaacgacagtaggagcctggtctggtcggtgtggcactcaaacattgtttgttgtaggaagaggaatcttgagaaatggcaggggacagcaagagcaagattctgttcatcggagggactggttacatcggaaaattcatcgtggaagccagcgccaaagctggccacccaactttccttttggtgagggagtccactctctccaaccccgcaaaatcacccctcatcgacaatttcaaaggcctcggtgtcaatcttgttttaggagatctatacgatcaccaaagtttggtgagtgctataaagcaggtcgatgtggtaatttctactgtaggacacctgcagctagctgatcaagataagatcatttctgcaattaaagaagcaggaaatgttaagaagttctatccatctgagtttggaaatgatgtggaccggactcatgcagttgaaccagccaagtctgcatttgcaacaaaggccaaagttcgccgagctattgaggctgaaggaattcccttcacttatgtgtcaagcaacttctttgctggttacttcctgcccaacttgtcacagcctggagccacagctgcccccagagacagagttattatcctaggagatggaaaccccaaagctgtttttaacaaggaagaggatattggaacttatacaatcaattctgtggatgatccaagaaccttgaacaaaattctctacattagaccaccagctaataccttgtcgtttaatgagcttgttactctctgggagggaaagattggtaaaactcttgaaagaatctatgttccagaagaacaactcctgaagcaaattgaagagtccgcaccacccgtgaatgtgatcctgtcaattaaccactcttcttatgtaaagggggatcatactaactttgaaattgagtcttcttttggagtggaagcttcagctctatatcctgatgtgaaatacatcactgtggatgagtaccttaatcagtttgtctaaggtgcaaagcctagctgataagtttgtttaattggtaaaactttgttttctaaataaagagaatcatgtagtaagactgaattgctgcatgtgctcctcaaaagaacaatgtatgaaatacctatgctatgctatatgctatgatacctttattacatgcaaaaaaaaaaaaaaaaatttaattttcaacaggaagattcaaaaaaaaaaaaaaaaaaaaaaaaaaaaaaaaaaaaaaaaaaanaaaaaa

SEQ ID NO: 7637 - DNA, 850 bp, Glycine max
ttttggaattaatagttacaattagacgtgggctcgtgggtttttgggcaaccaatcaattgtgactttccagaaaagaatattaataatcacagcatgtgatgctcttttttcttgttctaatgaattagaaacaatcttcacactagtatttgataatagatacacacgataaaacaaatgcgataataaaaacacagccttttacaacataattcgactagaggattgacgcatctccagcctcttttccaggaacaataacaacaggtgctgctttacagtggtgaaagcagtactcaccaacacttccctgtagcacactttgaatcaagcttctgcctcgggtccccataaccacagctgcaggtttgatcctctctgcttccttgcaaattacttttcctggatcaccttccacaattcgagctactgttttcaccattagtacttgaaaagcctcaatggctaatttctccataagaccctgggttatgtcgtagacaacttggttatgcaagtcggaaacggcgtgaacgagatggatggtatcagcgagcctgcaaaggtgaaccagagcccaatcgaaagcatgtttggtattggggccatgatctatggctattattatgtcccttcctcttctcctttcccctgtttccctccccagctctggctcgcccaccactgctatcagagaaggaagcctcacttctctatagttgtattcttcctcttccatcactgtctccattcctatactcataagacaattaaacaaacataagttacttttttttttggccagttaagggtattgctcaaaacatttatcctatgtatgtttttt

SEQ ID NO: 7638 - DNA, 1552 bp, Glycine max
tttttttttttttttttatggtacaaggctagtgaatgaatatataattcacttgtgttcacagttgaaaaataaaagctttatacccaatggaacaacaaaaaccaaggaaaaaagttgagtgcagtgaatctcaaggccaacctatacctttgcagaatgctctatcagactcttctaatatccctatttgttgaaggactatgaattgaggctatcatacatgtatatatgatttttgccatattaccaacacctacatcagtacaacccatctgatgttttttttcatcatgcttgtacacttggttcaaaaacatcaactagccgttcaatcatctgcaattgatcataaggagcaatctgactaaacccatcaggccaagttattgaaactgcataatttcccattggtcgaatttcttcaggttcaatatcttcaggaatatcactgtactgcaatttctgctcccccgtccattcatccacactttgagcagagcgatcattccgtctcactgttgcaggatgcagaaagaattcttcctttgaatctggtaccttcactttgattgccttgattgatttatcataggtgaccgcagttgaaacttgttggcgtattttggcacactgctgaacaacacatactcctagattttggaatatcttggaaacttcaccttgaggatcagctaccacttcaggcattccactgtctccagaagcagagagagttggtctaatagggagatcaaatagatgaggtattccaaactgctgaacaacctgagaacctgaacctctgccaaatgggtaatatcgttttccatcagcatcaaaatgacacatattctccacaacagcaacacaaggcaccttaagttttgaaaacatccgaactccttttgcaacatcaatgaacgacagcttttgaggagtggtaacaattacagcagcagttaatggaactacctggcataatgtgagttgaatatctccagttccaggaggcatgtcaataatgaggtaatccagctcaccccactcagtagtagtcagaagttgatcaatgactccagaaaccatggggccacgcattattgcacgtccttgtccagcaaatccaaaagagatcaacttcactcccaagtattcagtaggaattatggtcttcttctctggattcattactaacagtcggttttcaggagagaccatagtcggtaagcttggaccataaacatcagcatcaaatataccaactctagcacccatatcagccaaagtgtaagcaaggtttactgctacagttgattttcccacaccccccttgcaactggacacagccacaatatttgaaattgtctgtagacctgctggaagttgctcagcatatatgggtcttgctggttgcgcgggccgtgttccgtgctcgttcttgacccaagggagcattgccaccacttcatttgccttctgctcaaactacatcagatatagctcaaacaatggcaattgtgtcatttaccacgtccttgattggacatgc

SEQ ID NO: 7639 - DNA, 2509 bp, Glycine max
  misc_feature (2502)..(2509): n is a, c, g, or t
gttagaagaaacttccaactgtggcatgcatcttatatcttgtgacatgtcatatattggtggcctattagaattattatgttccagtttgagacttccatttttgcaggcaattcttagtctggtttagttggtttgaataaaagtagtaaggagcatttcttgtggtatatgtaacttttggagttattgcatatattggcagaggggatgggtagagaaatttaagttgatatacttatggttcactactcaagtaagaaagaagggtagaggtctgaagagaaatttaaggtgataaacttatggttcactactcaaggtagaaaaaatggaagaggtctgggaaaagataagtacggtgtggacttattgtatatattggtaaaagggcagagaaaggaaaggggtttcttggtcaggtgaagagtttaggctgcacagtctttaaattacacattagatttcttcatgtttaatttattcttaatggaagatgctcattaagatctcatatgtatcatgttccatctatccatctcggaaccaaactttgcaatattatgatacccagttgctaataatgaacaatgtgctgccatggctggtacttaaaccgaaagttgttcaacattttgatttacaaatatcagatgaggttaaattattaaaaaggatctcatggtgaacaatatccttgagaatttggcttttaactgagcctaatagtgttatgtgatccatgtagcctaactcattggtataagactattattgctgttgtactatctggtaaggttgctaatgtagattaattaggagcaagagttatcaagataaggtctcaaacataatgagctgtgtagggcatgtagaaagatgatctgatggtaaaggatttcttctggcattttgttgacaggtgagaacattatagggattaatcggggaagaaaatatcagaaggaggattggcttctttttctgagtcttctaagttattagattttgtaatattcaaaattgctttcttgcttagcttgacattgtgggtggcatgtaatatgcttggtaattaatgcttttgttgctgtgttattgtgggttaatcttttttttttttgctaccctatattctgtattcttgttgtacctagacattgtagtgaatgttaaggacaaggatgggctgatgctgttatttgttcattgggctaggtaatgatatcagctaaagaggaacctggttcctctgttcctcctgctgtggatggcttattaagggttcataagcggattattgatggtttagagagtgattttacccatgctccttcaggtgtggccgggaaggtttctacaaaacttctagtgccagcctcacaagcaggaagtttgattgggaagcaaggaggaactgtaaaatctatccaagaagcatccaattgtattgttagagttcttggagcagaagacctccctatttttgcccttcaagatgacagggtggttgaagtagttggggatcccgctggagtgcataaggcattagagttaattgcctcccacctaaggaagtttttagttgatcgcggtgtaattccaatttttgaaatgaatatgcaaacagccaatccccaccatgcagagcacatgccaccccaccaatcttggggaccacctcagggtcttcctccaaatgttggtggaggtcctggttttggacctccttctcaatacatgccacctccacgacaacttgatagttattatccatcagctgaaatgcctcctccagtggacagacagccccatcaaggtatatctgcttatggaagagatgcttcaataggtgttcatgcatcttcaaatactcaatctgcaccttccatagtcacacagatcacgcagcaaatgcaaattcctctatcttatgctgatgctgttattggaacagctggagcaagtataagctacatcagacgagctagtggggctactgttaccatacaagaagcaagaggtgttcctggggagatgacagttgaaatcagtggaactgcttctcaagtccaaacagcacagcaactaatacagaattttatggctgaagctgcagctgcagctgcagcaccagcacagccgcaaacaactgtgcctgctgcagaccaaggatacaattcttaccctgcccatggttctgtctatgcctctcctccttccaatcctggacatgctggaggctatggctcagtttatggtgcaaactatgggtactaagctgggcagagcaactaatgctgctattattgaaatttataatgctgggaacagaattaatgtaataatttaagaaattttagattattgtccgacttttgtgttctgttatactcctagtcatttggaaaggtaaaacatactattcgtggccttctgatgtatcatgtacttgttctatgattctatctaattggtgcacctattcctcttccaaaaaannnnnnnn

SEQ ID NO: 7640 - DNA, 2599 bp, Glycine max
ggatgttcatgttcgagcaaagatcttttgtgtgtgtgcagttactgctttgacgttttggattttcaggttgtccagatgagtgttgatggcgacagcaaagagctgaaagaactgaatcagcgcttacgagatgggaagaagattgctggtggggagcatggtttatgcgaggaagtgaaatgtaatggaattgctgaagaagttaaggttgaacagggggggactgtggagtcctcctctgtccagcagcatataccacagcctcaaggggcaataatttgttgggagaggtttttgcatattagatcccttaaggtcttgcttgtggagattgatgactctacccgtcatgttgtcactgcactgcttcgcaattgtagttatgaagttattgaagcagcaaacggattgcaagcttggaagatattggaggatttaaccaatcatattgatcttgttttaactgaggtggcaatgcctggcttatcaggcattggacttctatacaagattatgggccacaaaacccgcaaaaatattccagtagttatgatgtcatctcatgattctatgggtttagtctttaagtgtttgtcaaagggtgctgttgactttctagttaaacccatacggaagaatgagcttaaaaacctgtggcagcatgtttggagaagatgtcacagttctagtgggagtggcagtgaaagtggcacacaaacccagaagtctataaaatcaaagagtcttgagaagtctgataataattctggaagcaatgacgaagatgataatgaaagtataggcctgaataatgtggatggaagtgacaatggtagtggcactcagagctcatggaccaaacgtgctgtagaagttgatagtcataaaccagtttcccagtgggatcaaatagctgagtgccctgacagtacctgtgctcaagttgttcactccaatgctgaaatgggtgggaacaaggtggttcctctagctgcaaaggattgtgcagaacagaatgaacaacttgtcaaaactgcaggttctcaacatagcaatgcacctgatgtcggcccctctaaattcagtgagcaaattaatagaggacaactggaccttaattgtgaaaatcaatctagcaagctaaggtgcaaaggtttatcactgtctgatgccattactagtacttgtgattctcagatgcatagtggagaatttgaagccctaaataaaaaacccaagtcctcagatattgaaaataaaggtactaataatgatgaagaattgccatctcttgagctcagtttaaagaggcttagaggagttgaagatgctgatattacaattcaggatgaccggaatgttttaagacgttctgatcagtctgctttctcaaggtacaatgcagcctctaacactaagaaatctcccactggatgtgttggaagcaattctccttataataatagcttagaagttacaaagaaagattcatctcgtgatattcaatctcattcttgcggcaatcctcctaaccaaaactcaaatggtgctagcaataacattgatatgggttccactactaataatgcttatgctaaatctgcagttatgagtgagccagcaggggcatcaacaacaaaatgtttgtaccaaacatctgctttccagcctgtaaaaaacagccttgtttgtacctctcaacaagttgtcttaaataatactgaagatatgtcggcaacaattctggcaccacctaaactagacagacataaagattctgcagctctggacttccatctccattgtgaaaaccataactgtattgctgacaacatgaagcatcagctgccacctgatcatgatgctgaatctataaagaaaatggctactgctgctccacattgtggatcatcaaacgtggaagaagtgctagttgaaggtaatgttggaaaccacagtatcaatagaagtgtttcaggcagcaacaatggaagcaatggacaaaatgggagcagcacagcagttaatgctggagggacaaacacggaaagcaacaatggactcactgggaatagtggcagtggtgatgctagtggaagtggaagtgccaacagagtagatcaaaacaagacttctcaaagggaagtggccttaactaaatttcgccaaaagagaaaagagagaagggagaggtgctttcataaaaaggttcgatatcagagcagaaagagattagctgaacaacgacctcgatttcgtggacaatttgtgcgacagacctctaacgaaaatgcaagtgaggcaacaacagatagctgattcagagcattggccacaatggcataatgatggggatatgcgaaaaaaggttgaggagtcttcatgtagaatttgggaattattctgtgtgttgtgttaatgtataaagaccctggttattccaacttgttcatttggaacctgaatcaatttatgtggaaagagattgttatgccgattgatgctcggataacttactgtaatttaagttactttttcctcgaacaagaaaaagaatcaaatgctatatcacattatcaactagttaaaaaaaaaa

SEQ ID NO: 7641 - DNA, 2011 bp, Glycine max
ttttttttttttttttttcatatatatgttggcgttatttacaagggtacactttctgtgtctacattcgcttcatcagatgttaggaactggttgatgtaatgaaaaatagtttcttaaagtcttctagtctatcatgttttctcacaatggaacacttgataaatggtttatttgatgtagttttaagccaaaataagcaagcgaaagaacttggaaagtttgcttgaatagaagaataatccagttgcatattggtctttaagctcttaactcggcctccgaaagagaagttaagccacaacgagtttgataacatacagctcctcatcattgtttgatagcttatcgtcacccattaaacatacatcatttggggtacgagggattaacattgctgtctctcaacaaaatatcaattaccactaccttatgtctcagtaacaaacacgattcttgttaaatgtttgatcaataataatcaagaacaccaatatatagcaaaacatttaaggcatgtgaggctttttttagtcttgttacacccgtgtgaagggacatctgaaatgtgaagcttgacccctgtaatcaattatttgcatttaaaccctggaaaataaaagtagaatgttacaatatgtacaaatcatgtcgtcccaaattacatcatttttcttctccaatcatttgtattctcactttcgtaattacattgggaaaaaaataattataatgatataataatttttagaatttgcttgttctttctccatcctctgaagtcaaggactaggtcaatatacacttgattatttttttatgtgtgatggatatggatatctgtaaataattacagctccaaaaaatcagctatcctgtttatttgcatacaaaatgctttattcttttaacagccagttaagattctgaagtccctcagcagaaatgcttcttcttactcgtgttctttccacaaccacaggtggtggaggatcaaagttaaaacacaccatcacaactgttaagttatctgttgatcctctcttggttgcttcctgtactatttccttgcagcattgtttctcatcattgtgctcttgaagcttccttctagcaaaatccacagcattttggctactaaaaacatcccatattccatcactagcaattatcaagaattcatcttctttggtcaatgtcatcaatttaagttcaggttcagcactcagtggtccttctctatcactcatttccttcattccttcaaggtgccagtctccaagagcacgagtaacacctaactggccgttcaagtaaccatcatcaacgaagccgcctagggactcaactcgcgtcctttcattgatgcagcttggcctatgatctttggacatttctatggcccttcccatggcgggacaggacagctcggcaatctccagcattggctacaagtaaggaccttccaaatataattgcagttattgcagttgtaccagaagaaacggaaggctcatgagagtatgtttttagaaatgctgcatctgtctccaaaaatgaccttttgaccaccttctcaaggtccaaaggaaagttaacatcctcaacaataactcttggcagattatcacggacaaattgtgcagcactcttccctccatgtccatcaaatacaccataaaaagaaacagcctcctcaaaaggtacatcataattaaacttctttgccaaatctccaatgcatatgtgagtatcctccatgtaagggcgttctccaatatcagaccactctccagaccgaagagccagaacaaaattcatcagattctgtttcttgtctgcaaccactgcgtcctcgcatatgctttaggaaaggaattttgaacactgatgttgttggttgtgtcatcatcacatgaagttctgagagaagatccttctttgtccatgtgggtcttgagcaaaaggtggcaatggggggggggggcctacgtagctgaggtgttatcac

SEQ ID NO: 7642 - DNA, 1261 bp, Glycine max
tcagctacgtaggccccccccccataccattcacatcatacaccgtttctttcacttcacaaaaatgaaaaacatgaaattgtgttcggtgatgctatgcttatcactagcgttccttcttggggccacagcagaacaatgtggcacacaagctggtggagcgttatgcccaaatagattatgttgcagcaaatttgggtggtgtggtgacacagattcctactgtggagaaggttgccagagccaatgcaaatctgcaacaccctcaacaccaactccaacaacacctagtagtggtggagatattagcagactcattagctcttctctctttgatcaaatgcttaaataccgaaacgatggccgctgttctggccatggattctacagatatgatgctttcattgccgctgctggctctttcaatggctttggcacaaccggtgatgacaacactcgcaagaaggagattgctgctttcttggctcaaacttctcatgaaaccacaggtgggtgggcaagtgcaccagatggtccatatgcgtgggggtattgttttatcaacgaacaaaaccaggcaacttattgtgatggtgggaattggccatgtgctgctggtaaaaaatattatggccgaggaccaatccaacttacacacaactacaattacgggcaagctggcaaagcacttggtctggatttgataaacaatccggatcttgtagccacagacgcaaccgtgtcattcaagacagccctatggttttggatgactgcacagggaaacaagccatcaagccatgatgtgatcactggaagatggactccatctagtgctgacagctcagcgggtcgggctcctggctacggtgtcatcaccaacataatcaacggtggcctcgaatgcggccacggccaggataatcgggtccaagatcggatcggcttctaccgaaggtactgccagatgatgggaataagccccggagacaacttggattgtaacaatcaaaggccatttgcttaagcaaattgctcacatatatcatccatatagagaataaatagtatgtaataaaggatctaccatgatcttacatgtactgggaaacttgtttctaaagaagttccccttatcttgattaaataagaaactttaatattttaccaccttttatgacaaagagttgctgatgaactatataattagataaactaatgaacacaaccatatttaaatttttaaaaaaaaaaaaaaaaa

SEQ ID NO: 7643 - DNA, 1352 bp, Glycine max
ggaatcttctttatcatacatatctcccaaaacataaaactttgaaccaaaaagattatcctggtcgtgtatgacaagaagattcttccatttttctcctttgccatggaagtccggaacaagccctccattgatgattatgtcaatctttggaatgattgggagagttcagtggaacaattgtcatatgacaagtgctataagttctggatgtttatgttgaaacatttcagcacagaaactaagaaactttccaattgcttggtgaagctaccggcaacatcaggcaacaatgaaatagttttgttagataaaaacgatgttttcattcctgataaccttcatctgaagaagctttttcagcaggagaaagtctttgtctggtatcctcagaacctggcaccattgtccaggtgtgagttgtttgacgtgtacaggaaaattggtgctcgaaatatctctgaatctatatgcatggaagagccgtccttgctcaatggtgttgaactcaagcaagttgatcctggtaatatttgtaatgtgaaggtgttggctaagcttattcttagttttctttcttcttctagcctaaaaatggaaccaaacaagaggcgtgaagctgttcaaggtctactcaacttgagtttctttgagacaaaggaagcagtcaatgtaagttacagtttgtcactatcatccggggccatcattaccaaaaaggcagacagaatggtacggtggcaagggcaaagttccaagtttttcactcaaacgaactggcaaagtggaaatgcaagtttaataaaatatgctacatatttctcagaagccatctcagagggtgttttgcgtgagaatcatgatcatgttcctgcactctctgagctcatcacattggcttttgtgctgaaattcaacaatgagacaattgaatttcttatggagtccaagaacttgcactgtgaggatgaggagttcctcagttctgccttcccttctaactaagtcttctccatagatttttaaatgttttaattcaggcttgcatgcttctatatactatgcatatgcctattaataaattatgtttatgaggttttttgtgaccttgtctatcagtggtgcgtgattactgaattacctaagtaaagtgtggtattggctgttaagatttgaagaattataagttactcactccatttcatggtcaatgctttgttttcattgtatgactagtccatattttcattctatgtctttacttttgcatgcaactgtggtccttgaatttcactacgtgggatttcatttctgtataccaaataagagttctgaagttaaaaaaaaaaaaa

SEQ ID NO: 7644 - DNA, 969 bp, Glycine max
ccacgcccgtgtgcggcgctcaggcggcgggtgctcgagccgttttttctttctcttctctttatctgaacgaaggagagtgaaagatccttttttgcgttattggatcgaaaatggatcagatattcaataaggtcggatcctattggttcaaccagaaagcctccagccagctcaattccgttggtgatgacatcaattcgatgacaaacagtattgaagggggaaccaaatggttggtcaacaaaataaaaggcaaaatgcaaaaggcattgccagagttactaaaggagtacgatctaccaataggaatctttcctcgtgatgcaacaaactatgagttcaatgaagagacaggaaagctcgttgttttcattcctcaagtatgtgaagtaggctacaaggattcatcagtcttgcgtttcttcaccaccgtgaccggttatatggagaaaggaaagttagcagacatagaaggaatgaagaccaaagtgttgatctgggtgaatgtgacgacaattttgtcagagggatcgaagctctatgtgacagctggcatgaagaaaagaaggagtagggaagcatatgaggttacaagagatggtgtatgtgtagataagttctaaaactaatagttttataatctgtaaaacccctctgtctgttattttgatctcctttttcatgattgtttattgcaagtagtgttcaaatatgtacttcaaatattgcccttgtattggaatcttgcaatttggctaaagtccttgtcgatgatctaggctatgcttgtattttaattgggagacctccagcatctgttcaaaaagtaaaactgaaaaaatctcgattggtgttgagtttgattgtaaactgagttttgtcttaattttgccttgaacctcagcttaaaatgatgttcattgacttaagtttgcaaacttcaattcgagcatacagttagtagtt

SEQ ID NO: 7645 - DNA, 875 bp, Glycine max
acctcggctgcctccgctgccctcccccacattacgtttgtgtttggttctctttctcttctctttatctgaacgaaggagagagtgaaagatccttttgtggatcgaacatcttgcgttttattgtggtgttgaggatcgaaaatggatcagatattcaacaaggtcggatcctattggttcaaccagaaagcctccagccagctcaattccgttggtgatgacatcaattcgatgacaaacagtattgaagggggaaccaaatggttggtcaacaaaataaaaggaaagatgcaaaaggcattgccagagttgctaaaggagtacgatctaccaataggaatctttcctcgtgatgcaacaaactatgaattcaatgaagaaacaggaaagcttgttgtttacattcctcaagtatgtgaagttggctacaaggattcatcagtcttgcgtttcttcaccaccgtgactggttatctggagaaaggaaagttagcagacatagaaggaatgaagacaaaagtattgatctgggtgaaagtaacaaccattttgtcagagggatcgaagctctatgtgacagctggcatgaagaaaacaaggagtagggaagcgtacgaggttacaagagatggtgtatgcatagataagttctaaaaccatcaatgtttgttaatagttttataatctgtaaaacccatctgttattttgacctccctgtgcatgattgttaattgtaagtagtgttccaatatgtacttcaaatattgtccttggattcgaatcttgcaatttggtgaaagtaaaatgtccttatggtcatgctgtgtttggattataattaaaaaaaaaaaagaaaaaaaaaaaaaaaaaa

SEQ ID NO: 7646 - DNA, 1796 bp, Glycine max
tccggtccgcctttgtgtcccccccactaaaacatatattccccctttccctagtttagctacttacctcaatctttctcatgggaaagtttgccctagccaatatcctcttggtccttctcttgaacttgagcactttgctcaatgttcttgcttgtccctattgcccttacccttctcccaagcctccaaaaaagcctcccgttgtgaaaccaccggttcacaaaccaccaaaaccatgtccaccacccaagtcatctccaaaaccaccccatgtacaccctccctatgttccaaaacctcctcactaccctaaaccaccagttcatccacatccaccccatgtcccaaaacctcatccaaagcctccagtgcatccccatccaccttatgtcccaaaaccaccagttgtgccagttacaccaccatatgttccaaaaccaccaattgtgaaccctccctatgtcccaaaaccgcctgttgtgccagttacaccaccttatatccctaaaccaccagttgtgacaccaccatatgtccctaaaccaccagtggtgccagttacaccaccatatgtccctaaaccaccagtggtgccagttacaccaccttatgtgccaaaaccacccattgtgaaaccaccaattgtttatccaccagttgtgccaaaaccaccaattgttacaccaccttatgtgccaaaaccacccattgtgaaaccaccaattgtttatccaccagttgtgccaaaaccaccaattgttacaccaccttatgtgccaaaaccacccattgtgaaaccaccaattgtttatccaccagttgtgccaacaccacctattgtgtatccacctgttgtaccaactccaccggtggttactccacccgtggttacaccaccaagtcctccaagtgaaacaccatgtccaccaccaccaccaccagtggtgccatacccaccaccagcacaaccaacatgccccatcgacaccctaaaactgggggcatgtgtggatgtgcttggtggcctcatacacattggcataggcagcagtgcccagcagacctgctgtccggtgcttgcagggcttgtggacttggatgctgctgtgtgcctctgcacaaccattagggctaagattcttaacatcaatatcatcatccccattgctcttcagcttctcattgactgtggcaagaccccaccagatggattcaagtgtgcagatagttagttaatatataattaattattatggaattgcataactcatgcatgaataaaaacaagttgagaagatcgatgtagtgaaggaatggtctttcgtttctctttcatcaagttgttgtatacccaaaggccaaggacaacataattgtactatgactctatgagggccaatattggtatacttgttcaaactacataattttctgatctgccttgtatacaaagtcatgcaatattgccatagcatctttttaattattttctctgtttttctttgtctattgcatgtgtggttctgtgtgcatgtcagcctgtgtaagctttcccgtgagtacgttgggaaatgtacaagttagcgaagctttagatttttcttagaaatggttatcttgtttcacgttttctcttttatgcattgcctttgtacaaattataatactttatagcccagaaaagatataataggtaggacttacgagatagaagagaaaattagtatatataagtttataataattaccaagtaataaaatgttcttcttttcgcaaaaaaaaaaaaaaaaaa

SEQ ID NO: 7647 - DNA, 1563 bp, Glycine max
tcgtcagctacgtaggcccccccccccgaaacatatattccactttcgctagtttagctacctacccatgggaaagattgccctagccaatgtcctcttggtccttctcttgaacttgagcactttgctcaatgttcttgcttgtccctattgcccttacccatctcccaagcctcctccaaaaaagcctcccattgtgaaaccaccagttcacaaacaaccaaaaccatgtccaccacccaagtcatctccaaaaccaccccatgtacacccaccctatgtcccaaaacctcctcactaccctaaaccaccagttcatccacatccaccccatgtcccaaaacctcaccctaagcctccactgcatccacatccaccttatgtcccaaaaccaccagttgttaaaccaccctatgtcccgaagccaccagttgtgaaccctccctatgtcccaaaaccaccagttgtgccagttacaccaccatatgttccaaaaccaccaattgtgaaccctccttatgtcccaaaaccacctgttgtcccagttagaccaccatatatcccaaaaccaccagttgtgccagttacaccaccttatgtgccaaaaccacccattgtttatccacctgtagtaccaacaccaccaattgtgacaccacctattgtgtatccacctgtagtccctgtgccaccattaccacccattgtgactccaccaaaccctccaagtgaaacaccatgtccaccaccaccaccaccaccagtggtgccatatccaccaccagcacaaccaacatgccccattgacagcctaaaactgggggcatgtgtggatgtgctcggtggcctcatacacattggcataggcagcagtgccaagcagacatgttgtccagtgcttgcagggcttgtggacttggatgctgcagtgtgtctctgcacaaccattagggctaagattctcaacatcaacatcatcatccctattgctcttcagcttctcattgactgtggcaagaccccacctgatggattcaagtgtgcagatagttagttaatatatatttaatcactaaggtccccaaggaccaaggaattgcataactcatgcatgaataaaaacaagttgagaagatcgatgtagtgaaggaattctctttcgtttctctttcatcaagttgttgctgtataccaaaggccaaggacaacataattgtactaagagggacaatgttggtttacttgttcagactggataattttctgacatgccttgtatacaaagtcatgcaatattgccatggcatttatttaattattttctctgttttttttgtctatttcatgtggttctgtgtgcatgtcagcctgtgtaagctcacccgtgagtacgctgggaaatgtacaagttagtgaagttttagatttttcttagaaatggataatttgttacgcgttttctcttttaaaaaaaaaaaaagttaacgaaaaataaacaccagccaaaacaatagggcccggggcgttcggtttataggattcactttttcgtaccggtgcatg

SEQ ID NO: 7648 - DNA, 853 bp, Glycine max
gcaaggcctaactctggttgattagtttatttattttcctgcgacctaggcccccccccctagtgtctggacctcaagtcaaccttggttctggaccacacatcgtaacatcatcgagtgtctgatctcgttcgcaccctgcttcttagtcctctctctcaccatttaacaattacactggaagaaaaatgggaggttgtctatcatcgaagcctaaggcagtagataatggctcagcttccggcaataccaactgtttcatgctgtatgcaagagcactctcaatcacatggggagaaactccagaatattggatatgggttcagcagaaagaagcaagtggcacaataatagagttggctaaactaaaaaaagtttgctggctagaagtgcgtgggaaatttgacattagaaagcttttaccaggaattctatatcaagtgtcatttctaataatgttggaagattcatctgaaggttgggaagttccaataaatgttagacttgtccttcctggaggaaagagacaacagcacaaggtaaatttaaacgagaagttaagggagaattggatggagattctagtaggtgagtttgtggcatctgaaaaagatggtggtgagatggatatctctatgtatgaatatgaaggtggcatgtggaagagtgggctagtcatccaaggtgttgtcatcaaaccaaagaactaagtattaaaatagatgtattatgaagtcgatgccataaatgataatttgtattactagtaataaagcttttggattgatgaagtgtgctaatatcattacttaaataggatatagcagtttgttgtgaaaaaaaaaaaaaaaaa

SEQ ID NO: 7649 - DNA, 587 bp, Glycine max
  misc_feature (564)..(564): n is a, c, g, or t
aaacccaaaccctccagccctcgcgccgccgcaccctgcaccaaccagcgccctgccgccgccgccgccgccggagaaggagaggaagcagccgcagccatgggtcgcgtccgcaccaagaccgtgaagaagacctcccgccaggtcatcgagaagtactattctcggatgaccctcgacttccacaccaacaagaaggtgctcgaggaggtctccatcctccagtcgaagcgcctccgcaacaaggtggccggcttcaccacccatctgatgcgccgcatccagcgcggccccgtgcgcggcatctccctcaagctgcaggaggaggagcgtgagcgccgcatggacttcgtgccggagaagtcggcgctcgaggtcgacgagatccgcgtcgacaaggagaccatggacatgctggcgttcctcggcatggccgacctccctggcgtcgagcgcgcccccgaggtcacctcctccgccgccccctaccgccagcccttcaacggaccccgcggtggcaaccgcgcctaggttcctccgcatcgtcctcgtacccctatattntgctttatgtcttttagatctgt

SEQ ID NO: 7650 - DNA, 1505 bp, Glycine max
aaaagcatgattaggagttagtgagtgagtccacccaaatgctggtaattcttggactcattggtggaagtgtgtccatgaagaacgtagtagccagtaacaccgtaatgtctcatctctctcactcgtgacactttcttcatccctaacccattgtcatgagtgccctcaatttgaacgcatggccacgccccagatccagatccagatcccgatccccaacctttcacgccgtcaataagttacccttcttcaccgttaccaaacggagagcattctcgctctctgcggtgctcacggtcgagacggaagagaagccaccaatcttcgacttcaagaactacatgctttccaaagcgtccgcggtcaacaaggccctcgacgactccgtttcgctccgcgagcccaagaagatccacgaggcgatgcggtactcgctcctcgccggcggcaagcgcgtgcgccctgtgttatgcgtggcggcgtgcgagctcgtcggcgggcacgaggccacggcgatgcccgccgcctgcgccctcgagatgatccacaccatgtcgctcatccacgacgacctcccctgcatggacaacgacgacctccgccgcggcaagcccaccaaccacacggtcttcggcgaggacgtcgccgtcctcgccggcgacgccctcctggccttcgccttcgagcacatcgccgcctccacccggggggcctcggcgccccggatcctccgcgcgatcggcgagctcgcgcggtcgatcggctccgagggcctcgttgccggccaggtcgtcgacatcaactccgagggcctggccgacgttggcctagagcgcctggagttcatccacgtccacaagaccgccgcgctcctcgagggtgcggttgtcctcggcgccatcctcggcggcggcaccgacgacgaggtcgaaaaattgagaaaattcgctcgctacattggtctactctttcaggttgttgatgacattctcgatgttactaagtcttcccaggaattgggaaagaccgctggaaaagaccttgtggctgataaggttacttaccccaagcttttggggattgagaagtctaaggagtttgctgcgaaactgaacaaggatgctcaggatcagcttgctggctttgaccctgttaaggctgctcctttgattgctttagccaattacattgcttataggcagaactagattattgttcttgtctctactttacaaacaaatcattgtttgttttaggaatatttagttttttatgaaatgaaaatcattggatttacatttatttacatattgcaatgcaactagggattattaaacagtagcctcccctgcccttcttctatgtgcctgccatagtcgtcaattctctatgatgttggaactggaatattagaatacctttaatttgtaattagatattatattatattatatccttctacctatattaagttgagtaaaagcatataagtttattgaatg

SEQ ID NO: 7651 - DNA, 2394 bp, Glycine max
gttatgttatatatctatctgcatatacaaatgatactctctttttacatggttacttttccatccttttttttgcttacattacgagagaagggaaaggcaaggagtatgtgtatataaacaaaagcttacataaaaaataattgagcttggttaaaagcaaaatatattataaacaatacataaagaaggaaatttttctggtgttgagaaagggctcgggggaaaagacagaaagagcaacgtcagagagtttgccgtagggttctccttggtttgtggtttccggtattgttttgcactgcttcagatacagagagaagggaatccttcttctctctctctctctttctcttttcctgagtttgaacttggagtaactgagtctatatttttgttcatactagtgtggtcatcactggattttcttggtatatataaaaaaaaaacaaaatattgtctcttgggttggttccaaacaagtagaggaaactatcaattaagtttatagtattttgcttcacagatgtacagaactctctccacttttcattttttttattcccgcagattattttttctttgttggggtttcaaagagtaaatattgttaagtagttaagttgtatatcaattttgcctctttgttctgttcttttctcactagtccagttccagctttttcctttttctgttttaggtgaggattgtcctcagatcccagaagctatccagacttgttacatacgaaaaactcagatctatgtctcatgacaattcacaaaactccaaatatgagaaaagatgaagggtttgaatatttgatgttccaaaaaccatgtctaatttgacttctgcatccggtgaagctagtgcatcttcaggcaacagaaccgaaattggcactgattactcacaacaatactttgctccaccactaagtcaagcacagcctcctccactaaagaaaaagagaaaccttcctggcaacccagacccggaagctgaagttgtcgccttgtctccaaagactctcttggcaactaataggttcatttgtgagatctgcaacaagggatttcaaagagaccagaatctccaacttcacagaagagggcacaatttaccatggaagctgaagcagagatcaagcaacgagattataaggaagaaggtgtatgtgtgcccagaagccagttgcgtgcaccacgacccttcaagggctcttggggacctcactggcatcaagaagcacttctgcagaaagcacggcgagaagaagtggaaatgtgacaaatgctccaagaagtatgctgttcaatcagattggaaagctcactccaagacctgtggcactagagagtacagatgtgactgtggaaccctcttctcaaggagggacagtttcataacacacagagccttctgtgatgcattagcagaggagagttcaagatcagtgacaggcataggcatagtagccaactcaacttcaactcaaccaactgcagcagcagcctctcatcaacaagacatcatccatggtaatagtaacaatttctcattgaagaaagagcaacaagcaggtttcagaccaccttggattggacaaccatcaccctcttctgcttcatcattcttggtctctcatcaagaaaaccctaaccctagaggtggtggtcctggtcccactcttcttcctccttaccaaacagctcctcacatgtcagccacagcgttgctgcagaaagcatcccaaatgggtgcgacgatgagcaaaaccgggtccatgattgggacccaccaacaacaggctcacgtgtctgccaatgccgctttgaatttgtcctcacgtgaccaccagatgacccccactctccatggcttggtacctttcgggaataaagctgttcctgctgttggtaatggtgtttctccttcactccttcaccatatcatcgactctttctcttcaccctttgaagggacttcttttgaggacacttttggtggtgctggtggcgatgccatgacgaaaacaaccaccgccgatgacggtgccagaggaaacaataatgaagccctgacaagagatttcttgggtcttagacctctctctcacactgatatcctcaacattgctggtatgggaagttgcatcaactcctcccaacataaccaaaccccaaacccttggcaaggttagctccatatgtcttatacatatttggtttttctttttctttatttcattggtatatatatacatttattttagcctactttttaattttgcttttgtttatgaattatgatatatattgtcaatcttcccaaagtgaaaaaaaaaaaaaaaaaaaaaaaaaaaaaaaaaaaaaaaaaaaaaaaaaaagg

SEQ ID NO: 7652 - DNA, 611 bp, Glycine max
ggttggcctaattgggtcagtcccaaacctgtctgcgagaagacgacagaagggggatgcaatactgcaaagcactgcactgaattggattgggtttgcagcagaagcagcgaaggatatggcgattcttccttctcttgcagttccttcaactcccatttctcgggtaaagctgtttcaatgccaaccctgtcaattccatagatgcacagaactatatcttcctcatcaaacatattatactcgaactacatcaattaaagtatcaatggcagaccaaaatgagccgagtgaggttaatatgcagattgggatcatgagggagaaacttaaagaaacactgccagtctcagttcaagaatttccttggaaaaaagctgagcatatactcctagacagactacttaatcttgcacaagagacagtgaagtggtctcttgttctgtttttcatctttagctctgtatctgacgttgtatatacattctccataaaccgtgaactggtaattcccgttggcctctttgttggctgtcttgcggctgatttcttgaaggagatatcacaagaattgtttcataaatctgaggaaaagggattgaaacggcatc

SEQ ID NO: 7653 - DNA, 712 bp, Glycine max
tacggctgcgattcgcctccgagggggactcgatctttgaacttaactcagtgaatcctctcttctcatttcctaggaatcccctaagccaccgcagcatcggttcctccacccaccgcgatggcgcacgtgccggcgagcgaagcgacggcgttctggacggacgagaagcacgtgcacttcctaaactccatggaagcctccttcgtccgcacaatgctccaaaacgaaggcaactcaaactcctccaccacgcgctactctctgcgcctcgaccgttatctccccgacacatccgaatccaccttggatttgaaaccaaactctcgctgccaccgcaccgtaaagcaccatgcaccctcagattcaatgggtccaacaaccagaagaacaaggatcaggacgagatcatctcagccctgcaattcgtcagaggaccaggtggtcccacaagtagaaagagaaggtgcagcagcagcatgcaatagtgacgatcataaaagagcagaaaattaatgtttagtgtaccttttccaccaacctccctacccctctttcatttttattctggtcgtttgtttaatttttaccatttatttatttcacctctgtattttttttttctttcctatcctttttccactattctctcttatatatatgattttttaaacaaaactaaatgataaaatacgatattgtttttaaatta

SEQ ID NO: 7654 - DNA, 1852 bp, Glycine max
  misc_feature (87)..(87): n is a, c, g, or t
gcaattgctttatgcacctccatataaaataataaaaccccaggaggactaatgtgtcctttattagtcttataatgtgcaccccancttcctttctccatagtagcccatcacattctcctttaccttgtgtcattcgactgggctctctatagcaacccagcggatctccatatttgtcgttcaatgacgctagccgccccatcaccgatggtgaaggcaccacaattgttaccgttgaagccactttgcagttgaaggtaagtggatgtgcgtggtatttttttgtttggatcaataaaacatacaagtactccaaaaaaatgtattttggagctatctgtaccattctagatcaatgattccgtaatgggcgaagggcaatgtgggaatattaaaaagcacgggttgcaagaagaaaaatggagtgaataaagctatagtctaggccaattttgatggacccaatcataaaaggcatgtatgatgtaacaaaaagaaatcactgattaacaaaaaccaagtggaaggtggagaagaaacaaaaagaataataaagagctgctgcgtaggcccccccccatctagaaagaaacatagaggtagctagctaggcagccacgagccttggcgcattttcttttttctgtgggcgagtataataataattgcagtaaaatggcatttctgaggtcaatagcaacaacagcaattgctactatacctgcagccttagcattctcatcatcttcatcatcttctttccctcgctcttcccaatcccccaatccccaaaatagattaggtcttgtcaaaacacttgctactcctccctctgctctccacatggaccacaaactctcttctcagcctgacgctgtcttgcccgagttactgacggagttcatggtggacatgaaatgcgaaggttgtgttaatgctgtcaaaaataagttgaacgagataaatggagttaagaacgtagaggtggacttgagcaatcaggttgtgaggattctcggttcaacgccggtgaagactatgactgaagctttggagcagactggtagaaaagcccggttaattggacaaggagtgccggaagacttcttaatatctgctgctgtttccgaattcaaaggtccagatatttttggtgttgttcgcctggctcaagtaaatatggaactggctaggattgaagccaactttagcgggctgtcgccaggaaagcatggttggtctattaatgagtttggtgatctgactagaggtgcagcaagcactggtaaaatgttcaatccggtaaatgaggaaaacagtaaagagccactgggcgacctgggaacactagaagctaacgaaaagggtgaggccttctatagtggggtcaaagaaaagctgagggtggctgatcttattggacgatctgtggtggtatatgcaactgaagataaatcagaacatggtataactgctgcagtaattgccagaagtgctggggtgggtgagaactataagaaactctgtacgtgtgatggcaccaccatatgggaggccacggatacagattttgttactagcaaggtctgatagataaagtaattcactgaaaacaaagcattgcaatttagttgtcttgtcgcccatcagctctaccatattttgaggattgtatccgcctttcaggaaaggaattcatctgtgtttagtttacattgaatttcttcaccagaattgtgaacttttggataagatggttgttaatttgacaaatctcttatgttcttaataaggcacaagttatcgcactaaaaaaaaaaaaaaaaaaaaaaaaaaaaaaaaaaaaaaa

SEQ ID NO: 7655 - DNA, 1198 bp, Glycine max
  misc_feature (1193)..(1197): n is a, c, g, or t
ggtaccggatgatgacgaaaacggaatgttggcggatcgattagagaaacaattcattagagaagtctcgcttttatcgcgcctccaccaccaaaatgttataaagttcgttgcagcatgcagaaagccacctgtttattgtgttatcacagaatatctatcagaaggttccttgaggtcatatttgcataagttggaaagaaaaactattcctctagagaagctaattgcttttgctctggacattgctcgtggaatggagtatatacactctcaaggtgtcattcatcgagaccttaaaccagagaacgtccttattaaagaagactttcaccttaaaattgctgactttggcattgcttgtgaggaagcgtactgtgacttatttgctgatgaccctggtacctaccgctggatggcacctgagatgatcaaacgaaaatcctatgggagaaaggttgatgtatatagttttgggcttatcttatgggaaatggtgactggaactataccatatgaggacatgactcccatccaggctgcttttgccgtagtaaataagaatgtaaggccagttattccttcaaactgtccacctgcaatgcgagctttaatcgagcaatgttggtctttgcatccggacaagaggcccgagttctggcaggttgttaaggtattagaacaatttgagtcttcgcttgctcatgatggaactctgactctggtggaaaatccttgttgccctgatcataagaaagggcttctccattggattcaaaagcttggtcctgtgcatcataataatggccctgtgcctaaaccgaaatttacatgagtcttcaaagtggcctggctttttgtagtataccgggttcattgtaattaatattgaatggtttgaaatacccaaaagaaaaaccaaaggtttgttttttgaggttctctagctgtagtcctccttatgatgttcatgcaagaggaaattgatttgtaggcttatacattgaagtgaagacagcttttgtttttactgttgtgtataccaccaattacaatcaagtaattgcactaggttaagtttctttcttcttttttttagaggggtggggacacaatttcttgtttatttgttatacaacgtacttgcatttttagtttctctaatatcaaagttcaattactataaaaaaaannnnnt

SEQ ID NO: 7656 - DNA, 1110 bp, Glycine max
gttgggttaaactaaggacagaaagaagggtggtgtttgctactggtgatctcatctcatctcatcagtgcaatcaatccgtagcatatattcatattcatagttataaataatcctcccgaatcgaggtgtcggttttgaaaagagttaacaatctcttctcttcgctcctgcacttgttgtttctttgcccttcatggcatctcaggctagccttctccttcaaaagcagctcaaagatctttgcaaaaaccccgtcgacggcttctctgccggtttggtcgatgaaaccaacatttttgaatggagtgtcaccataattgggccgcccgatactctctacgaggggggatttttcaatgctattatgagtttcccatccaattacccaaatagtccaccttcagtgaagttcacctcagagatatggcaccccaatgtatatcctgatggccgggtttgcatatcaattcttcatcctcctggtgaggatccaaatggttatgagcttgcaagtgagcgctggacacctgttcatacggtagagagtatagtattgagtatcatatcaatgctttccagccctaatgatgaatctcctgcaaatgttgaagctgcaaaggagtggagagataggagggatgatttcaagaaaaaggttagccgatgcgtaaggaagtcacaagaaatgttgtgattcgtcgcctatgcctcatactgctgctgctttttgtgaactggaggacatataaatgtgtaatggattggttctcctgttactgttgatccgtataagaatcgcattggaagtccacattcctcctttcttcagttccatcatgttctctgcatggccatttatcataacttggaaaacaaactgtattctaagtgtttttggccggtctttttgactactttattgaaaaatttactttgttcattcgcataaaagtttatattggatttcttatctaaaaaaaggtttattaatttagaattaaaaaaactcggctcttgttccctcggctcggctgattttgcactatatagccagttgtagctctcaagttgagtgcggattgagttatttttcacaacagatcaacg

SEQ ID NO: 7657 - DNA, 1629 bp, Glycine max
ctcattctgtccgtgtctgcatccgaaaccaaaacagatgtggcgcaccactttagacagcagcaccatgagagccctgcgccttcgttccttcctcttctcttcatcttcttcctcttcctcttcttgttgttcactcatcaacattttctgcccatcctcctcctcctcttcgtttacgactttgactacaatcatctctcactcttttcttccttttcccccaacgacgcgcgtcttgttcaccgactcgcgccgcttcggctcccccgttccgcgccgcttcggctcccccgttccgcgctgcgtttcgtccctccccaccctcgactggaacgacgccgtttcctgctctgaggtcgaggttgacgccaatgccgccgacggcggcgatgacggagccgtcgaccaagacacaaagccttctattgccgtcagagccttcttcttctctactagtgttgatttaaaaagcttggtggaacagaacaaagcaaactttgtcccgccatcatcacgcatgactaattatgtagttctcaagtttggagatatttgtgtttccaagggtccaggtactttcttgagtggacgcaatggctgttacatggtggtttttcagtatggttccattgtattgtttaatgtccctgagcatgaggttgatgcttatttgaaaattgttaagaagcatgcatctggtctgcttcctgaaatgagaaaggatgagtatgaagttagagaaaaaccagctttaagcacatggatgcaaggtggactagattacataatgttacaatacttgaacatcgacggcattcgaactattggtagtgttctaggtcaaagtattgctcttgattactatggtcggcaggttgatggaatggttgcagaatttacagacataaaccgagagatggaagcaactggaaaattcaaaatgcaaaggaagaaacttttccagttggtgggcaaggcaaattcaaatcttgctgatgtgattctaaagcttggactatttgagagatcagatattgcttggaaagatgccaaatatgctcagatatgggaatatctcagggatgaatttgaattaactcagagatttgctagtcttgatttcaagttgaaatttgtggagcataacatccgttttctacaagaaattcttcaaaataggaaatctgatttcctagagtggctcattattgcattgattggtgctgaaattcttctgtctctctatgacattgttcatcggtctgccatgaaattttagcagcattttttctggtggcatgtaaggttagcatgccattgaagagctgtagcatactagtagttggctttactcatttagtttttagatattggtttctcatgcaataattcattgtgtctcttgtaaataacaattttaaagccttaaactcagttctttactagtcaattgtataactttacatgtgtaggatagtatcactcactgaaaacctgcacctgtatgctttgttgtattataattttgtctattgcatcgatttattattctgttgaaaaaaaaaaaaattttaaaaggcgggctttcatgtccagggttattcaataaaatgatatctttattgc

SEQ ID NO: 7658 - DNA, 1090 bp, Glycine max
  misc_feature (1054)..(1054): n is a, c, g, or t
caaaaccaaaacatccttttggccacactctccacaacacaattatgccaacccaaccagattcaccacccaacaacaacacgttgacccaaatgtttcagaacatcttctcagacaacagtaacatcatgcttgcagccatcatttcccttctcttagtaatcctctttgtccttcttcttcacctctacgccaagtggttcctcgctcaagcacaggctcaggccaacgcccgccgccggaggcggcgccgtcgcacgacggtgaccgtctccgacgtcctaggcccggcaaggttccaccacttccacagcttcaccatagaagacagttcacccctctcaacaaaagggttagattcttcaaccattagaacaattccactgttcatctatgaacacaacaacaacaacaacaaaaaggtcgaagaagaagaagaagaacttgaatgtgtgatttgtttgagtgcatttaagaatggtgaagtgggaaggtgtttgccaaagtgtggccatggcttccatgtggagtgcattgacatgtggttgagttcacactccaattgtcctatttgtagaacctcaattgtagcaagtattgtggaaaataattctagtgatgatcatcatggtggagatcatgatttggttgagattgtgactgaaggtggttctgctgctccaagttttgagactagagagggtgaacatgggaatagtaataatggaaatggaggagcaagaacaagtgtttctgttgtgtcagaaaattcttcttctgagttctttggatgctctttggagagaatgcttggcaaggttttcccaatatcaagtaatgttaattaattaatgaaatcacatgcttgagatgtatatgatcatcgaagtatctattttctctatacaattataaccatgaaatgtgcaacatcaactatagttctgtgtacaggttttctctgtttgatccttcttccctcaaattattcttggcctttgaactgttataagtttccttttcattttgttgtcttggaatcttttagataatnacatctcctttactttatcccaaaaaaaaaaaaaaa

SEQ ID NO: 7659 - DNA, 1514 bp, Glycine max
ccacgccgcctcagcgggccccccccccccccccccatggaacttggcatttttcggggcacccacataaaaatattttgcatgtgtttgcctgagggagagagaggcatggcactagaagcagtagtgtatccccaaccacaggacccgtttggccatggaatcaaagacccttcttacaactacaacaacttgttagaaggtggtggaggcaattggggctatgcagatttcaaccttgaaaaagaagaccgaacttgtgtcccttttcttgcgaaccaaacagagaattatccttatggagaatggaactgttctccttctccaccatccatgttgcctcaattgaatattgcatcaaatcctcaatcttcagaaaccagcaacacacagaacaacttagatagttcagtttccacccctgctcgtcccaaaaggcgcaggaccaaaagcagaaagaataaggaagagattgagaaccagagaatgactcacattgctgtagagcgcaacagaaggaagcaaatgaacgagtatctctctgttcttcgctctctaatgcctgaatcttacgtccaaaggggtgatcaagcatctataattggtggtgctatcaactttgttaaggagcttgagcagaggctgcaatttcttggtgctcagaaagagaaagaagcgaaatctgatgtcctcttttctgagttcttctcctttccacagtactcaacaagtgccagtggtggctgtgacaattctacagccatgagtgagcaaaagagtgaggctcagtcgggcattgctgacatagaagtgacaatggttgagagccatgcaaatctcaaaataagatccaagaaacggccaaagcagctcttgaaaattgcctccagtttgcatggcatgcgtctcacaatcttgcacctaaatgttaccacaacaggggaaattgtcctctattctcttagcgttaaggtggaagaagattgcaagctaggatcagtggatgaaatagctgcagcggtgtaccaaattctggataggattcaacaagagacaatctcgaattaagatctgaagttgagctaatttggcccaatttttttaacctgatcaagaagaccttattatatttctttctctttttttcaagttgtacctaattattgaaacggctgtggatcctgttgttatattctactgaagcgccttgatcgatgtgggggtccttggaggcagtttttggtttattccttcttacattgtctttctagctacctctattttttatccctctctctctctctctctgtactttgggtggagaaggttgtagtgtatattgtattgtgcttgagacacattcaagtgctctcagccaattctgtctaccttgctttaacagtggtaggccatctcaatctcaaacactagccaaaatgcagaatatctcaaagtcactttgagtgaaaaagatagccaaagatatcaggagattcacacatagggcccccccc

SEQ ID NO: 7660 - DNA, 2155 bp, Glycine max
gcgatctagcactccatgattttagtctcctctcggaaacttctagaaacaacaacaacctacagctcattttttttccgattccgatcctctttctgcttctccgttcgctgggtgcatgccctctcagtaaccctatcagatagatcaaggtaaccaaaataatcataaattatcattcttcacttattaatattatttatcttctttttggattggataatattaagaagaaccagcgttagctaaggatagataggttctagcctttctgttatcattttcgaaagaatctgtagcagtgtaagtaccaaattgaaatggttagattttgtttagaaagcagttatgaacgaaactttgaagcttagaaaagcggttaggtagctaggttgagttccagatctggtagagaagttcatcatggcgccgttaccggcggagcaaaccggtgaatcagcgccgacggagttgcagagatccattccgacgccgtttctgaccaagacgtaccagctcgtcgatgatccctccgcggatgacctaatttcctggaacgaagacggcaccagcttcattgtatggcgacccgcggaattcgctagggatttgcttcctaagtacttcaaacacaacaactattccagtttcgtccgtcagcttaacacctatggtttccggaaggttgtccctgaccgttgggaattcgccaacgactgtttccggcgaggcgagagagctcttcttcgcgacatacagcgccggaaattactgccggttccgcctgcagccgcggcaccgacagcagtcacagctaatacggtgacggtggctgtggcggcaccggcggtgagaacggtgtctccgacgacttccggcgacgaacaggtactatcctcgaactcatctccgattgctgggaataataataatacagtgcaccgtaccacaagttgcaccactgcgcccgagctgctagacgagaatgaaaggcttaggaaagagaacatgcaactgagtaacgagttgagtcaattgaagggtttgtgtaataacatactcgctttgatgaccaattatgcttctggttttagccgccagcagttagaatcctccactagcgctgcgaggaccgtgccggtgccggaagggaaggcggcgctggagcttttgcctgcgaaacatgtttcatcggctgatgaggccgggcatgtaggtggtgccgcgccgtgcgcgacggcgaacgcgggggaagcagaggttccgaagctgtttggggtttcgattggactgaaacgatgtaggacagagtgcgagggcgaagcggagggagaagatcagaatcaaatgcaaacgcgagcacaagcacaaacgcaaacacaatcgtcgcaagaaccagatcacggttcagatgtgaaatctgaaccgcttgatggcgatgactcggatgatcaggatcatgatcctcgttggttggagctaggtaaatgaaatgatgctcctccttcttctaatttggtgaaaatgacagaaggcacgtgacttgggtggggacacgctgtactattagcgctgcgacgctgccattgattgggccatgtatgtaatgtaacattacgctagatggaaagggcggatgaccatccttgtatgtaactcgcggatgggatgaaaagtgtcgaagtcaaagctttgcttgagcgccaaaatttgtaatataaggatttatgtattcttgataagctggggttaaagaacatgtcaaaatggagtaactgaagcaacccctaaaagattcacttctcgttttcctttttaaggaacatttgtgggttacagcaaaatatgtagataaacgtgtctgacatcattacatttttcgaatttgattcgtgtattctaatgtttccatcctttgaaccgagttgttcctaagattcataatcgtaccatgtttctttttaatgagaggaaaaaaacaacatccggatagacgagctgaccgccagcggagatcaaattctccggggcggtgaggatggggacgcacccgaccagcacgatgcagaaggggattctcgccgccaacgtgttcaatggaaaggattctttggtcttcgccgggccgctctcatatcttgccgctgctggtacc

SEQ ID NO: 7661 - DNA, 511 bp, Glycine max
aacaaaaacagagggagcaaagaccccgagcggaaaaggagcgagggcctctctctccatcccgacctctcgtggccgccgcgaagaaaaggagcttatcatggcttcaaaacgtatcctgaaggaactgaaggacttgcagaaagatcctccgacatcatgcagtgcaggtccttctggcgaggatatgttccattggcaggcaaccattatgggtcctcctgatagtccctatgctggaggtgttttcttagtgaatatccatttccccccggactaccccttcaagcctccgaaggtatcgttcaagacaaaggtcttccatccgaacatcaatagcaatggaagcatatgcctcgacattctgaaggagcaatggagtcctgctttgacaatctctaaggttctgctttcaatctgctcgctgcttaccgaccctaacccggacgaccctctcgtccccgagattgcccacatgtacaagacggatcggtccaagtacgagacgaca

SEQ ID NO: 7662 - DNA, 1194 bp, Glycine max
acggttgcgagaagacgacagaaggggatacagaatacagattgacagagtccaacgttgcattgcagaggtttggtgtttgtcatgtcataaggcatgggcgatagggtggaaacgcttgccagattagcccagtggaaaatcgacaacttcggactttgttcctacaaaaaatctgaccccttcaaggtcggaatctggaactggtacttttcaatagtgaggaataggtacctctacatacatctttttccagaaccttcgcaggttttgaaggataacccaccctttgctcgattcattcttcgagtctccaatgccggatcatcccgcagctttcatatttcccctgttcaagaaaagctgcttaggacacatgacgactttgtctggcctgtggatacaacttttgttggtcgcttcatcattgatgttgagtttctagacctaaagatatgccctcctaatggtggagaaactagtcctgtatggccatctgatggaaattctcaatccattgcatttcaaagtagcattcttcgttgcctctctcgtatgcttgatgaggctatacatgctgacctaactatcatgacagccgatggaagcacgttgagagctcataaggcagttctctcagcaagttccccagtgttccagagcatgtttcatcacaacctgaaggaaaaagagtcctccacgatccatatagaagacatgtcactcgagtcctgcacggctcttctaagttacttgtatggagcaatcaagcaagaagatttctggaaacaccggcttgcattgcttggagctgctaataaatatgacattggaagtctcaaagacatctgtgaggaaagcctcctggaagatctcagcacaggaaatgttcttgagatgctaaatgaggcttggctttatcaattgcacaagttaaagaaaggatgtttggtgttcttatttcaatttggtaagatacatgatattaaagatgaaataaataattttttccagcatgcagatagggagctaatgctggagatgtttcaggaggtgctttcaatttcgaacccgatataggttaactcatggatcctgtatatgatatatcgatgtgtataataaagtttgttgtttctcccgaaaaaaaaaaaaaaaaaaaaaaaaaaaaaagcggccgctctagaggatcca

SEQ ID NO: 7663 - DNA, 943 bp, Glycine max
cccacgcgtccgtacggctgcgagaagacgacagaaggggaatgcaaacaaccaaacacaaaccattccccacactctcccctcttctttttcattgtcattcttcaccattattctgcaatatgttgctactcatcactcactctcatcaccaacattttttaacagtcatttggaattatatcaccttacctctgatgttttaaaaatcttcatcatttgctccctctccacccttaaactggacatgctcgattctgtgcttctggcgcttttcttgccgtgcctcggcatgagcgccgttttcatcgtctacatgtgccttctctggtacgccaccaaccaccactccgaccccgcgctaccggccaagcctgtctccgacaccggaatctccccttcccagctcgacaagctccccagaatcaccggaaaggaccttctcatgggaaacgaatgcgccgtctgcctggacgagatcggaacagagcaaccggttcgggtggttcccggttgcaaccacgccttccatttggaatgcgccgacacctggctctccaagcaccctctctgccctctctgcagagccaaactcgacccttcgcttttctcttcttcccaaaatccatgctgaccaacaagctctagcgcaaagttggtagatgcatgacccagtttcttaaatatttcttgactgtatatacgaaaaaaaaaaaaaaaactttgttggatgagacaaaattttcttcgatgatttcaactcgtcaaggttagtctcatgtctttaaaaaaaaatccatccggaaggtgaaggtgtgtctttgttgcttaccgtcctctccttggcactctactgtgtcccccccggctgggttgccagacatatttgccttattccgaaaagcgggcagagatattctggatgcaattagctaccatttga

SEQ ID NO: 7664 - DNA, 1278 bp, Glycine max
cccccccgatggagcatgaaaggtgaacctctagtcccgtctctctctctctctttctctctcatgctttaattctccaacacgagaagttaaattttagagtgagttgggtaattgttggagggtctattttttctgtccataaatacctgtctgctaggccaacccacttccatattttgcatcctttgtacctgagttccaggttaacaccaaacaacacatatagtgcagattcataagcttccaaccatggaggatccaaatcaagctccagaagggtcttctcagaagaaaatgggaagagggaagattgaaatcaaacggatcgagaacaccaccaataggcaagtcaccttctgcaagcgccgcaacggtttgctgaaaaaagcttatgaattatcagttctgtgtgatgctgaagttgcccttgttgtcttctcaacccgtggccgtttgtatgagtatgccaacaacagtgttagggccactattgagaggtacaagaaggcaaatgctgctgcttcaaacgcagaatccgtatctgaagctaacacacagttttaccagcaagagtcatccaaattgagaagacaaattcgagatattcagaatctaaacaggcacatccttggtgaagcacttggttctctgagtctcaaggaactaaagaacctcgagggtagattggagaaaggattaagcagagttagatctagaaagcatgaaacattgtttgctgatgtggagttcatgcaaaagcgggaaattgagctgcaaaaccacaacaattatctgcgagctaagatagctgaacatgagagagctcaacaacagcaatcaaatatgaatatgtcaggaacactgtgcgagtcccttccttcacaatcatacgacaggaattttttccctgtaaatctcatagcttctgatgatcaacaacaatactctcgtcaagaccacactgctctccaacttgtctgatatgctggaagttaaagctactggaagttcatggctctagctagctatttgaatagttacgtgtattgtctatatagtgctgagcaaataatattgccatacaggcatatatatatatatgcctgcgttaatttcctgaatcagttgcgtctttagaattgacgttaattggctagctaaaggtcattattaaactgtgaactaaatgaaccattttggactcatatttcatacgatatatataatgttaatgtatcttttaataagagctagctagtttctaaacctcaaaaa

SEQ ID NO: 7665 - DNA, 1223 bp, Glycine max
caggttcatgataactgtaacctgagtcaaagcggtacgtaggccccccccccaatgctgatgtcgctagagttgacatgtcaacacgggaatctcgtgttgttgtcggccgggcgtcgacggcggttgggctggtaaatgatgggtatcgctggcgcaaatatgggcagaagctagttaaagggaatacaaacccaagaagttattatcgatgctcgaatcctggatgccctgtcaaaaagcatgtggaaagggcctcttatgattcaaaaactgtaataactacctatgagggacagcatgatcatgaaattccccctggaaggactgtcactcagaatgcagctacaaatactcgcacaacggccactaatggcaaggcaggaaccaaatctgagggtaatactgatgatacaggggagcgaagcggcttgggcttaacaagtagattaacagagcaacaaactggcaagtcgactactaagtcaaaggctggtgatatggttgagtttcgtgtgatcaggctttctaatgagggtcctgaaattaaattaagtgagcaacaacaacaaaaggataactcagctactaaagatgattctgtcagcaatgacgttatatgccattcaagttctggagttctgtgtagatcaaatgaacagctgaaaggtgaggtaaaacctatatcagaaggaagtaaggattgccttaaggtggttgccgttcatgatactcctagtacagaaagtgaatttaacaagcaatccgcagctgatgctgaaccggtccaaagctaaatttgcaatatttttgaaagggtcacctagttacagaagagtataaatatttgacaatgacataggctttacagatatactgtgggattataattcctatttctactctaaccttcactttactcttcttctagctctctccttgtctttgggcaggttgactaaatatgcaaattacaattaatactacattggaggatatcataactcttataccattattatttgagttaaataagatttacgttttcgtacacatgtatctaaaattctaatgtattgtcgaacatactaagctatttgcatgtaattcttgttttgcctactaatgctttaatcttcctctcttcatgtaaatttagaaaatgcgttgcagaattgcagtaattgagtacagcctcagtttttccataaaaaaaaaaaaga

SEQ ID NO: 7666 - DNA, 1990 bp, Glycine max
gtgtcttgttctttctctttccagtctaagaagcttttgtagactgtagtccaccttttttattcatttttcttccctttctatttttggtaaggtttgtcctttggatcccagaaacctttccagcatttgaaaaaccaagatctatggcctataccacaaccttaggtttctaaaacttgcaagttgcaagtatatatatggagatgaagggttttatgttctaccaacaacagcaacagcaacaaatagtggaggagaacatgtcaaatttgacttctgcatctggtgaagctagtgcttcctcaggtaacagaactgaaattggaaccagctacatggctccaccaccaactcagattcaaccaccaaagaaaaaaagaaacctccctggcaatccagaccctgatgctgaggttatagccttgtcccccaagagtcttcttgccacaaacaggttcatttgtgagatctgcaacaaaggatttcaaagagaccagaaccttcagctacgtaggccccccccccatttgccatggaagctgaagcagagaacaagcaaagaggtgaggaagaaggtgtatgtgtgtccagagccaagttgtgtgcatcatgacccatcaagggccctgggggacctaactgggatcaagaagcacttctgcagaaagcacggtgagaagaagtggaaatgtgacaagtgctccaagaagtatgcagttcaatcagattggaaagctcactccaaaacctgtggcactagggagtacagatgtgactgtggaaccctcttctcaaggagggacagtttcataacccacagagctttctgtgatgcattggcagaggagagtgcaagagccatcgcaaacccacttcttcccccacagcaacaacaatcttcttcctctcacatgagtactctccaaacccaatttcaaccctcaaaacctccatgccttcccattgaaaaaagaaatgcccccttggcttggcccaccagcaacagtagttgttgatcatcatctgtcttcatcctcatccataatgttctctcctccacaccaaggaaaaccctaaccctaaccctagtcttggtcccactcttgctgcctaccaaacagtccctaatccacacatgtcagccactgcattgctgcagaaagcagctcagatgggtgcaaccatgagcagaagtggttccacaccagccatgactgggccccaccatcatgctcacgtgtctcattttggcttgaacttgtcctcacgtgaagacaccaccaccaccaccccttcaacaacaactactaatgctaacactgctacagtgttcagccatggcttattatcatcatcaccattggggaataaagctgctgctgctgctgctgtgtcttcttccgcaccatcccttcttcacgatgttatcaactctttctcttctccttctgcctttgaaggaaccccttttgaggatgcattcattcagagctcaaagaaactagatgatgatcataacttgtatttgcatgacacattctcaaaaacaagtggtgcagctgggaataatattaatgaagggttgaccagagatttcttgggtcttaggcccctctctcatgctgatattctcaccatcgctggcattggaaattgcatccatgatcagcagaaccagtctcaaaagccatggcaaggttagctatagctatgtagctccatatatatatgtggatcttctttttcatcctttaattaatcatctatatatataaattttttcccttttaaattagtgtaacttttgtttatgatcttttcgatcttcccaaagggaaggacctttctgaatcgatcccaatgtttttattccttatgtacttatctacgaatcgcaatattgtgttcattattacacagatgaattttatgttatatataagaaaagactagatagtagacgaatgttataattaaaaaaaaaaaa

SEQ ID NO: 7667 - DNA, 1250 bp, Glycine max
  misc_feature (1071)..(1071): n is a, c, g, or t
agcaaacactctgttccttccttctctcgttcgttcatggaacttcagaggcgccaagatcagagcctctcccagcggaagggccagaaacggaagctcgacgaggagcagcaccacgaggaccgccagatcttgccggcgccgcccaccgccgacgagcgcgccgcactcctatccgacgtcgccgaacaggtgagcatcctcgagtcgactttcacgtggaacgaagcggacagatccgcggccaagcgcgccactcacgcgctcgccgatctcgcgaagaatgaggatgtggtgaacgtgattgttgaaggaggcgcgattccggcgttggtgaagcatcttcaagcgccgcctctcagtgaccttgtccagcatccgttgccgtttgagcacgaggttgagaaagggagcgctttcgcactaggacttcttgccgtcaagcctgaacatcagcagctgattgttgacagtagtgctttaactcatcttgttgatcttttgaagaggcacaggaatggcttaacttctcgtgctattaatagtctcattcgtagggcagcagatgctattactaatcttgctcatgagaacagcaacattaaaacccgtgtcaggatggaagggtggaattccaccacttgctcatttgcttgattttgctgatgcaaaggtgcaaagagcagctgctggtgctctgcgaaccctggcttttaaaaatgatgaaaataaaatcagatagtcgaatgcaatgctcttccaactttgattctaatgctacgttctgaagatgctgctgttcattatgaagcggttggtgtgattggaaatttagtccactcttcacctaatataaagaaagaagttcttctcgctggagctttacaaccagttattggattacttagttcctgctgctctgaaagccggcctgacccccccatgttacttggacagtttgcagcaactgattcacactgcaaggttcacattgttcagagaggtgctgtccgacctctgatagagatgcttcagtcctctgatgttcagctaaaagaaatgtctgccttngcattggggagattagcccaggacacacataaccaagctggtattgtgcacaatggtggtttgatgccattactgaagcttcttgactccaaaaatggctctttgcaacataatgctgcatttgctctttatggccttgcagataatgagggtaggtggaattcagagactgcaggatg

SEQ ID NO: 7668 - DNA, 2179 bp, Glycine max
ctcgagccgaatcggctcgagcactaatcttgctcatgagaacagcagcattaagactcgtgtcaggaaggaaggcgggattccaccgcttgttcatttgcttgaatttgcggatacaaaggtgcaaagagcagctgctggtgcactgcgaacccttgcttttaaaaacgatgaaaataaaaatcagattgttgaatgctcagctacgtaggccccccccccaatgctttgctcagaagatgctgctattcattatgaagcggttggtgtcattggaaatctggtccactcttcccctgatataaagaaagaagttcttcttgctggagccttgcaacctgttattggactacttagctcctgttgctctgaaagccagagggaagcagcattgttacttggacagtttgcagcaactgattcagactgcaaggttcacattgttcagagaggtgctgtccgacctctgatagagatgcttcagtcctctgatgttcagctaaaagaaatgtctgcctttgcattggggagattagcccaggacacacataaccaagctggtattgcacacaatggtggcttgatgccattactgaagcttcttgactccaaaaatggctctttgcaacataatgctgcatttgctctttatggccttgcagataatgaggataatgtgtccgattttattagggtaggtggaattcagagactgcaggatggagagtttattgttcaggcaactaaagattgtgttgcaaagacattgaaaagattagaagagaagattcatggccgagtgctgaaccatttgttatatctcatgcgagtttcagaaaaggcttttcaaagacgagttgctttaactcttgctcacctttgttctgcagatgatcaaagaaaaatatttattgattataatggtttggagttgcttatggggcttcttggctcttataaccccaagcaacagcttgatggagctgtggctttatgcaagttggccaataaagctatgactctgtctcctgtagatgccgcacccccatctccaacaccccaggtctatttgggagagcagtatgtaaacaatgttaccttgtccgacgttacatttttggttgaaggcaaacgattttatgctcacagaatctgcctccttgcatcttcagatgcatttcgtgcaatgtttgatggtggttatagggagaaggaggcacgagacatagagattccaaacattagatgggaggtttttgagccgatgatgagatttatatacactggatcagttgatatcactcttgatattgcccaagatctcctccgagcagctgatcaatatcttttagaaggacttaagagactctgtgagtacacaattgcacaggatatatcactggagaatgtgtcaagtatgtatgaactttcagaggcctttaacgctatatcattgaggcacacatgcatcctttttatcttggagcactatgataaattgagtggaaagccaggacactctcatctgattcagcgtataatacccgagatccagaattactttgttaaagcccttacaaaggccaattccaacatcctgccgtaatgcgctgttatattattgacatctaaccagttgcgatgtacataatgtggttgatgttctttttgttgagcctgcgaagtaaatctcctggatcaagtacagcatggcttaaaaaatatatctaacatcaggtcatgtacgttcatttctgatgctgtgctagtcccgtctagctgtaacgtcattgtcttagatatagcaaaaatgaccttcacgaacattgtttttttctcctgcaatattgtgatggttctggcttgatagttctctttctcaattgatttggcattacaattgttgagtttatgagtagtataggtttcccaagcatctaatgtatatatgacaattagatagttgtttgtgattgctgatgaatgtattgtaaattaaatgcaaatgcatttaaagaattcgtcatttaagccatgctgaattcagttgctgcttataaaaattggctctttgtctatgcagtcaagcggcaacggaatcgaggtttcacgtacaagaattgctatgggtccctaccaacttttagaattcatggaaaaaattattttaccccagttc

SEQ ID NO: 7669 - DNA, 1545 bp, Glycine max
ttcggctcagctacgtaggccccccccgacccacaaactccacaagtgtcacaagtcataactcgttagagagagtttgtgtgtgtttttgtgtgtcaccttggtgcatacaacacaagatggaggaccaaaatggtagtggtaagttgagccaagggcttcgcaaggtgaagccttaccttgctatattgtcccttcagtttggctactcagggatgtatatcatcactatggtttctttcaagcatggcatgagtcattggatactctcagtgtaccgtcatgtagttgctgctattataatagtcccttttgcacttgtccttgaaagaaaaataagaccaaagatgactcttcccatcttcctgaggatagtggcacttggtttccttgagccagtgctagatcagaacttgtacaacatggggatgaagatgacctcaacaacgtttgcatctgccactgttaatgtcctcccggccattacttttgtaatggcactcattttcaggctagagaaggtgaacttgagaaaatttcacagtgtagccaaagtcattggaacccttataacagtttcaggagctatggttatgactctgtacaaaggccctgccttccaaatcataaagggtggaggagccatcagcaaccatagcaactctagcagtactagtaccaccgaaccctctgaccagcactggatagttggaactgtttatctcatatcaagttgtgctagttgggctggcttcttcattttgcaatcattcactttgaagaagtacccggcagagctctcactgacagcttggatttgtgtgatgggtattattgagggttcaatcgcatcccttatatttgaacgagacttcagtgtatgggccataggctgggactcaagacttcttgcttgtgtttactctggggtgatttgttctggaatggcatactatgtacaaggggttgtaaccagggaacgtggaccagtgtttgtgacttctttcagccctctatgtatgattatcaccgcagcattgggttcccttgtcttagccgaacaagttcatctaggaagtatatttggggccattctcattgtgtgcggactttacactgtggtgtggggcaaaagcaaagaccgtaagagcacaacagaaatagagaaaggcgaaagccaagaattgccaataaagaacggtacaaaatcagcgtcagacatatttgatggcattgaaatcaatgttccttctgaggtgttgaagaaaggaggagggaaaaatgtcccaccagcaacaacaacaacaacaacatcatgaaggtccttttataggactagcactataaattttcctattagcttaagctagattgaggtcaagaaagattttgtgcaatgtgaaaatctttatctacctcactagcttcattttcattgcgcctttcttgttttcctttaactttattccgtgtttgagaaagtataatgtcactcaatcaaataatgcaataattaatgccattgtctctgttttttgtacttcc

SEQ ID NO: 7670 - DNA, 1645 bp, Glycine max
attttatagtagtgcttctcaaaatttctagaacccacgtcacacgtactctgggaaggatagggttggaaagtgcctggttccgtagtatataagagtctcgccctagaatcctcgtcggcacgaatttaattcactgtactttatccttttgtgtggggaattatggtaattgattttgagggtttgactactcatggattatgatggtatgagaaaaccttccaaaaacttatttcactctcgcttcttcctttttgggttctattgctgggattgggagttcttgaccgctctcctcctttttagttcttccccttaatcttctttcttcacaatttttatttccttccttattagacgtattagatcagattgaacaaaagggtttttctttctttctttcttggggaataatagaaataagaaaagattagtgaggttgaaatgtcgcaacgatcggtgccggcgccgttcttgacgaagacgtatcagttggtggaggatcaggggacggaccaggtgatatcgtggggtgaaagtgggaacacttttgtggtgtggaagcatgcggattttgcaaaggatttgcttccaaaatatttcaagcacaacaacttctccagctttgttcgacagctcaatacctatggattccgaaaaattgtgccagacaaatgggaattcgcgaacgagcatttcaagcgagggcagaaggagcttctctccgagatcaaacgccgcaagaccgtgcctcaatcgtcggcacatcccccggaggccggaaagtccggcggcgacggcaactctccgttgaactccggcagcgacgacgcgggctccacctcaacctcgtcctcgtcctccggttccaagaaccagggatcggtggaaacaaacacaacgccttctcaccagttatcgagcgagaacgagaaactgaagaaggataacgaaacgctgagttgcgagctggcacgtgcgaggaagcagtgcgatgagctcgtggctttcctcagggaccgtctgatggtgggtcccgatcagatcgatcgcatcatgcggcaaggaagttgcggatctgaaaacgtggtaggtgaaggcggtggaggagactgtttgaaactgtttggtgtttggttaaaaggggatacgctaacagacaaaagaaacaaccacaaaagaggccgcgaagaccaaatgggcttcggtgggcctcgcctcaaggagtcaaagcccgttgttgactttggagctgtaaatatcatgatgaagagcaacagggtttgcaactgaatgaggctctcacctcgccacgtaatcttttaagcaattaaagaaggaataggataatgattagtgaaaaaagaaaaggctaagcgataattattttgggtaaaagaccaaatgcactagcctatgctttctacacatgttgaggttgtgtaatttgtaatgtacgtaggtcaatgcctctatgaatattgattaggaaattaaacaggttttaatagtcaattatgactttttatgtcaatgcattttaatgattttttttttttctttcgcaaaacgcatgtaatggttaaatggctgcattctgtagtttggtctgatgatatagtggagcttcacgatccgtggt

SEQ ID NO: 7671 - DNA, 1588 bp, Glycine max
caggtaccgtttccgggttccacggtcgacccacgcgtccggttagttagaaaaagagagagaaaaaggaaagaaaataaaataaactgacagtaacagatagcgaaacaaccaaacctacaaccgccatgaccgaagaagaccgctccgcccaggaaaccgtccacaatggcgtcgcctcgacggagctaggcggcgaggagatggacatcgctgaggtgacggccgccggaagagtgaagggaccgtggtctccagaggaggacgcgctgctgagccgattggtggcgcagttcggtgcaaggaactggagcatgatcgcgcggggagtgccgggacgctccggcaagtcgtgccggctccggtggtgtaatcagctggacccttgcgtgaaacgcaagcccttcactgaggaagaggatagcatcatagtttcagcccatgcaatccatggaaacaaatgggcagcaattgctaggcttcttccaggaagaacagataatgcaatcaagaatcactggaattctacactgaagcgcaggtgtatggaaatgggaagatatgtcccagcacatgctgatgtgatggaagatggtactggcagctttgataaaacaaaagcatcctctgaagaaaccatgtccaattggggatatcaattcaaagaatcctgctgaagtcagaaatgtcatgatggataatgaaaataaacctccaacaaaagatgatgctaaagtggaggaacatcctactcttcatcgaccagtagcacgtgttagtgcatttagtgtttataacactccaggaaggtcaacaatgggatcatgttcaaagatgttcccaaggcagagccctttgatccaatcccccaaaccagacgtaggatcctgcaagttatttgatgatattgattgtgagcccatggttccatcacaatgtggtcatggctgctgcacaggagactcgagggaaagccattcgcatggttcacttctaggtcctgagtttgttgactatttggagtcaccttcctctagtcatgcatttatttctatagctacagacttgaacaatatagcttggatcaagagtggccttgagaattgtagtactggagtaactgagaatactgcaaacttgacagcatctcgaggagttgccagtgctttgcaaacaaacttcttaggacaagatctaaagaatggctacgggcaatttgaggagggacatggcatgtttttgggtgcgatgcaagaagtgttgtcaacaaagatggctaggcaacattatgcaatgcctgcggaagtttaactctaacttaaggttcctcaattggattttttattttttattttgatgtgcaagtggatttcaatcttagtttgtggcattttgtggtgggtggatagatagatcatagatggtataagtttgtttcactacaatcaagcgcaccgtgtagagtgagtagctcttttcggttttcattgacttgcagagttcttgaattgcatcttggtaactataatctgaaaatatatataccaaattaccaatttgatcttgtacaggaaaaaaaaaaaaaaaa

SEQ ID NO: 7672 - DNA, 2075 bp, Glycine max
cgaaatttgcatgacgtcggttaggaaatgttcgatcggcgtcatccggtgaagcttctttgttagacctcgatcggtcatctttccaggccgaggtcgaccgtcattcttttcgatccatttcggtgaataatatttttttgccgagatgggctaatgtcttcctggccgaataaatgggaaaatgccagtttcggccgaaacgaaaagtcggttgagctcgcacgaaaaaacctagccgaagtacattgtaacttttttatgcaacaccaaaacaagaaaacttactctgccgtaaaaagaccattatcgaccagcgagcttttctaaaaagaattgtgcaatgtcggctgaaaaatatcggtcgctacttcacgacagatgtcgcctaacgagttttcaattcaatccctgaacgaaatttgcatgacgtcggttaggaaatgttcgatcggcgtcatccggtgaagcttctttgttagacctcgatcggtcatctttccaggccgaggtcgaccgtcatttttttcgatccatttcggtgaataatatttttttgccgagatgggctaatgttttcctggccgaataaatgggaaaatgccagtttcggccgaaacgaaaagtcggttgagctcgcacaaaaaaacctagccgacctacattttaaatttttcatgcaaccccaaaacaagaaaacttcctgtgccgtaaaaaaaaaaaaacattacatgacagcgagcgttttgaaaaacaaaattgcgcaacgtcggctgaaaaatatcagtcggggctttttcacgaccgatgtcggctattgagttttcaattcaatccgtgaacgaaatttgcatgatgtcggttaggaaatgttcgatcggcatcatcctgtgaagtttcttttttaggcctcgatcagtcatcattcctgaccgacgtcgactgtcatttttttcgatcaatatcggtcaataatatttttttgccgaggtgggctaatgttttccaggacaaataaacatgccagtttcggccgaaacaaaacgtcggttgagctcgcacaaaaaaacctagccggcctacattgttaattttttatgcaataccaatacaggaaaacttcctcgatggtgaaaaaaacataatctgccagcgagcgtttttttaaaaagaaatgcgcaatgccggctgaaaaatatcagtcgggactatttcacgaccgttgtcggctattgagttttctattcaatcgttgaatgaaatatgcatgaagacggttagcaaatattttttttgcagaggtgggctaatgttttcctggccgaaacaaaatgtcggttgaactcgcacgaaaaacctagccgaagtacattgtaacttttttatgcaacaccaaaacaagaaaacttactctgccgtaaaaagaccattatcgaccagcgagcttttctaaaaagaattgtgcaatgtcggctgaaaaatatcggtcgctacctcacgacagatgtcgcctaacgagttttcaattcaatccctgaacgaaatttgcatgacgtcggttaggaaatgttcgatcggcgtcatccggtgaagcttctttgttagacctcgatcggtcatctttccaggccgaggtcgaccgtcatttttttcgatccatttcggtgaataatatttttttgccgagatgggctaatgttttcctggccgaataaatgggaaaatgccagtttcggccgaaacgaaaagtcgggtgagctcccacaaaaaaacctagccgacctacattttaaattttttatgcaacaccaaaacaagaaaacttcctgtgccgtaaaaaaaaaaaaacattacatgacagcgagcgttttgaaaaacaaaattgcgcaacgtcggctgaaaaatatcagtcggggctttttcacgaccgatgtcggctattgagttttctattcaatcgttgaatgaaatatgcatgaagacggttagcaaatatttttttttgcagaggtgggctaatgttttcctggccgaaacaaaatgtcggttgaactcgcacgaaaaacctagccgaa

SEQ ID NO: 7673 - DNA, 1550 bp, Glycine max
tcggctgcgagatgacgacagatggggatggagaggtagtaggactgtagaggaaatgaagcatgcggtgccagctaagctggatgtcggttcctcgtcaataatcgtctttccctgcctcatgccatcatccagtggttagggtcggagagcttgccctcacttttctcttccatcttcactctcagtctcactcactcaccattcaccattgccctttgcgtcgctctaagcaacacgtccttttcgatccacatattccagtgtgtatataagtcatcatgctgttgtgacagttaaagatagtgtggtgtggagaaggagccttgtgattagttgtttgagaccaccaaggacgtaaacaagaggatgtcaaacagtaggaacactcattggtgttatagttgcaggaggccagttcggctggggcggcgagatgtggtttgtcctagctgtaatttgggatttgttcatgaacttaatgatattgtccatgttaatccttttgacctctttggaatggacaacaatgaagaacgagatcaaaggcttggactaatggaaacattctctgcctttatgaggcatcaaatggcagatagggggcgaagccatgacatcagggtgcgaacagattcaaatcctgaacacagtgcaagttttgctcctctgttgatctttggtggccacataccttttagattgtccagacatggtggctttgaagctctatttaatggggctccaggaatcggtctgacacagggtaacacaggcgattattttatcggtcctggactagaagaactgtttgaacagctttcagctaacaacaggcaaggtcccctgccggcatcaaggtcctcgatcgatgcaatgcctaccatcaagatcgtgcagaggcatcttcgatcagattcgcattgtccggtgtgcaaagataaatttgaactgggatccaaagcaagacaaatgccatgcaaccatttatatcactcagattgtattgttccatggttggtgcagcataactcctgccccgtttgccgccaagaactgccgccacaaggattgagtagtagtaacggtggcgccaatggtagaagtagaagtgcaagggtaagtagtagtggtagggagagccatggaaggagaaatccattttcctttttgtggccttttcgttcttctcattctagcagtaatgatgaagcaacaggaagcagcacaccaacaccaactatccctgagaatagccatcatcatcatgctgggtattctgggtggccatttgaatgacttggtgtgagtataacattttcttttgtttattaatatgctcatgttgatttaaaaatcttatgtactgatgctgcttgcttggggtgaaaacggtttgagatctgagcctaccagtctggatttgctttctaaagttgtcaactatttttgtattagtggttatttatgcataattgtttgattctttttttttacgataattgttgtttgaatctaatattcaccatagccagttttctttgttttcc

SEQ ID NO: 7674 - DNA, 1714 bp, Glycine max
agaaaaatcagaacaagtcaagatgatacaatcaatccctcctcttgcctcaaagatcttaccatttctgaaaattagggttccaatttagaaagtgtaaagtgaggctgaacgcacttcttaagtcttgttgcctattttgaaggggatacttcacttcttctttgctccgttagcttccttcaacaataatggaacatttatttaaactggaaaaaaaaataatctagaggttttagatttctacccaatagttttttatttttgggaaggaggggagtggggataaaggaaaacggggtgtccttgcctccttggtcacaaacgccgacgaccaccggcgagtattttcccggctagaacatcgacgacatcaacatggcttcgacttcaatcactaccttgtccatctactctcactcccaaccaaagttcctcaatctgcttcaacaccccctcattcacacccgcaacaaaagcacatcaattacgtttaagccagcgatagttcgcgccacccttttctctacactcacttgttctcacaccccttccacaccctcttcaaatttaccaccgggaagggctttaaccaagttcctctcagaaaaggtagcatttttcctcattgggtcgtttctcttatcgggttgcttcagcaaaaggcctgcattcgcagaaacagctccttccgtgggttctggagcagtgttggaggagaaaatgaatcccactgaagagaaaaacgaggaagagaaaagtgaggaagaggtggaggaaatgtgggagggcattttggagaaggatccgaaaaacgttgaggctctgaaggtggttttgtatgggaagattaggagagggaaatcgaaggaggctgtgaaggttgtggaggatttgattgctgcggagccgaatgaggtggagtggaggctcttgcttgcactttgttatgagactatggggcagttgagtaaggctaaaagattgttcagggaaatcttgaagaagaggcctcttctagtcagagctcttcatggtttggctatggcaatgcacaaaatccatgaaggtcctgctgtatttgaaatgctaaataatgctcaagagttagcttctcgcgaaaacagagttaccgaggagagaaatataagaatcttaattgcgcaaatgcatgttgtccagggtaatttggaggagggcttgaaaagatttcaagaattgattgatcaaaatcgtcgagattttaggccttatatttgccagggaataatatacagtctcctgggtaaaaatgaggaagcggcacagcagtttgaaacatatcaaactcttgtgcctgaagaatttcctcagagacgattcctcgatgatgttgccatagcagcaaaaagatcatccctggaacagtttaagaaggaattcagagatcaattttcttatcggaaatagagataatataggacgttttcttatttgctgtcttggcaataatcatcagtgcaattcagtagcaggctcttgtagaagcaaaaagctagacaactttcatgatgaactacaatgtaatgtataccacagttttgttttttgtattttttttcccctgggcttatagcacatggtttggataggattttcttgttttactttggttagatcatgtatttcaatccttaaatatggtcctttattttggaataaacatttttaatcc

SEQ ID NO: 7675 - DNA, 2042 bp, Glycine max
tcagctacgtaggcccccccccctttcttcttttttccagtggttcaggaactcttcttcgtcactgtggttgaaaaaatcgaagcctctctatctctatctctgcattaaagtgaaacgcatcagagaaattcaattcaattcaatggatgcgaatcgcgagcaaattgttgttgacgttggatcagtggtggaagccgtttctgctgacgatggtcacgctcctctctacagcatcgaaagtctctgcatgcgttgccatgaaaacgggattacaagatttttattgacttcaattcccaacttcagaaagattttgttgtcagcttttgaatgtccccactgtggtgagaggaacaatgaagtacagtttgctggtgaaattcaaccgcgtggttgttgttactctctggagatcccatcaggccaacagaagatgctaaatcgacaagtggtaaaagcggaatctgctaccattaagatacctgaactggattttgagattccaccagaggctcagcgtggtagtctgtcaacggtggaagggatacttatgagagcagctgatgaacttcagacccttcaagaggaacgcaaaaaagtggctccagagacagctgaggcaattgatcagttcctggtgaaactgcgagcctgtgcaacaggagaatcagccttcacatttattcttgatgatcctgctggaaacagcttcattgaaaacccgtttgcaccatcatctgatccatcattgactatcaagttttatgagagaactcctgagcagcaagcatcattgggataccttgttgattccactcacattgaaggaattcatgatgaaacaccagaaggaggagaagctgtgactgctgatcaagtgaggagagaacctcatgggtcaataggggcaacagctggtcatcgagccattgcacagagtaacagttcagaaattgctgaagccttatttcgatatactgcaccagaagaggtgatgacatttccatcttcttgtggtgcttgtgctgctagttgtgagactcgaatgtttgtcaccaatattccttacttccaagaagtaatagttatggcatccacatgtgattcctgtggttaccgcaactctgagttgaaacctggtggccgaattcctgaaaaaggaaaaagaattactcttaatgtgaagaatgttaatgacctgagccgtgatgtaataaagtctgatactgcaagtgtaaaagttcctgaacttgacttggagctggcaagcggaacccttggaggaattgttactactgttgaaggtttaattacaaaaattagtgaaagccttgagagggtccatggctttacttttggagatagtcttgatgaacagagaaaaggcaagtggatagactttaaagcaaggctaaacaagcttcttagcttggaagaagcttggactctaattctcgatgatgcattagccaattcttttgtagcacctgcaactgatgatctaaaagaggacaatcaattatcatttgaggaatacgagaggtcatgggaacaaaatgaagaattaggtctgaatgatatagacacctcttctgccgatgttgcttatgaatcaacaaatactactaaaactgagtgaacattatgtggtttcctctcctcacaccccaaccaaaacaaatgaagggaagaagctgttgttaggaaaggaagaatttttgtgccaatttgattcaatgagacagaggaaggatggagaagtcaattgtcttaagcgtcatgtaatggctgattggtttattaatatgtaagcaagtccattaactagtatcatctttctgaaatagttcagtcgtgaaagatgtgatctcctgtgaattggtaagttaattgcttattaatggttttgtagccatcgaagattgtttcttttggcattttttcttctttaccctcttctttttttaattggcgaaggtcagtacagttgaaatatagttggatacttttgaatatgttgattaaggattatttagtct

SEQ ID NO: 7676 - DNA, 2076 bp, Glycine max
gacacaaaacccgctaataacaacattcaacaattttctttttctcccccttttttctttttcccagcggttcaggaaactcttcttcgtcactgtggttgaaaatcgaatcctttctctctctctctctctaggcaataaagtgaaacgcatcagagaaattcaattcaatggatgcaaatcgcgagcaaattgtggacgttgggtcggtggtggaagccgtttctgctgacgacggtgacgctcctctctacagcctcgaaagtctctgcatgcgttgcggtgaaaacgggacttcaagatttttattgactttaattcctaactttagaaagattttgttgtcagcttttgaatgtccacactgtggtgagaggaacaatgaagtacagtttgctggtgaaattcaaccacgtggttgttgttactctttggagatcccatcatgcgaacaaaagatgctaaatcgacaagtggtaaaagctgaatctgctaccattaagataccagaactggattttgagattccaccagaagctcaacgtggtagtctgtcaacggtggaagggatacttatgagagcagctgatgaacttcaggctcttcaagaggaacgcaaaaaagttgctccagagacagctgaggcaattgatcagttcctggtgaaactgcgagccggtggccccccccccccagccttcacatttattcttgatgatcctgctggaaacagcttcattgaaaacccgtttgcaccatcatctgatccatcattgactatcaagttttatgagagaactcctgagcagcaagcatcattgggataccttgttggttccactcacattgaaggaactcatgatcaagcaccagaaaggggagaagtgactgctgatcaagtgaggagagaacctcatgggtcaataggggcaacagctggtcatcgagccattgcacagagtaacagttcagaaattgctgaagccttatttcgatatactgcaccagaagaggtgatgacattcccaacttcttgtggtgcttgtgccgctaggtgtgagactcgaatgtttgtcaccaatattccttacttccaagaagtaattgttatggcatccacatgtgattcctgtggttaccgcaactctgagttgaaacctggtggtcgaattcctgaaaaagggaaaaaaattactcttaatgtgaagaatgttaatgacctgagccgtgatgtaataaagtctgatactgcaagtgtaaaagttcctgaacttgacttggagctggcaagcggaacccttggaggaattgttacaactgttgaaggtttaattacaaaaattagtgaaagccttgagagggtccatggctttacttttggagatagtctcgatgaacagagaaaaaacaagtggatagattttaaagcaaggctaaacaagcttcttagcttggaagaagcttggactctaattctcgatgatgcattagccaattcttttgtagctcctgcaactgatgatctgaaagaggacaatcaattatcatttgaggaatacgagaggtcatgggaacaaaatgaagaattaggtctgaatgatatagacacctcttctgccgatgctgcttatgaatcaacaaatactactaaaacttagtgaaaattgtgtaattatttcttctcacacccccaaccaaaacaaatggagggaagaagcagtcaggaaaggaagaatttttgtgccaatttgatagcaatgagacaggaaggatggagaagtcaattgtcttaagcgtcatgtaatggctgattgatttattaatttgtaagcaagttcatcaactagtatcatccttctgaaatagttctgtcgtgaaagatgtaatctcctctgaactggcaagttaattgcttatttctgcttttgtagtcatctgagattgtttatttttaaaaaaattcttcttcccccctccccccttttttttattggaggggcgatgattaccgaaggttggcacagttgaaatatacatatttttgaatatgttgattaaaaatttagtctctggaaa

SEQ ID NO: 7677 - DNA, 1125 bp, Glycine max
cccacgcgtccgtacggctgcgagaagacgacagaagggggtaacaaaaataacgtgacactgctaagagagtgagagaaattggcggcggcggtggcggcggcatagagtggaagtagtaaggatcaatggcagttccagggaggcgcaacggcatgaacgacgacgaagaggaattagacgacaacgcccttttcgaagaacaaggtgccgtcgaagacgacgccgatacccctcctcacctccgcgacctctccgccgccgctcagctaggcgacgtccacgccctccgtatcgctcttgataacttgactggtagtattgatgagccagtggaggatggggatactgctcttcatttgacatgtctatatggccatttggcttgtgtccagctgctactagaaagaggggcgaacattgaggctaatgatgaagatggtgctattcctttgcacgatgcttgtgcaggaggatttactgagattgtccaactgctgcttagcagagctaatgatgctgaacatataaagagaatgctagaatcagttgattctgagggtgatacccctctccatcacgctgctagaggtgagcatgttgaagtaattaggttgttgctgtctaatggtgcatctcccacaaaggctaacttatacggaaaggcccctgcagatttgcctgaacaggaagctgctcggaggctgcttgaagctgcagctcttgccatggcatgccaatagcatatcagtagaaatatttagttccattttgacagagatgctacacttttcggaccataaaaactgtatttcatacacactctttcttcgaagttcaaaaagcaaaatgatttattagaggagcaccatagggagttttaactttcgagagagataaaaatgaggattcccggggattacttatagtggacaaacttgtttgtttcattagtttgcttatttgaaatgtatttactcttcaacatgtcagtgaactatgactggatagttatacttgtcattcagtttgtggcataatgttgctggttagattttgatagagtttgatttttgaaagatttgatattaaaattaagaatcgaagttaaaaaaaaaaaaaaaa

SEQ ID NO: 7678 - DNA, 517 bp, Glycine max
gcaccagattttgtctttgacgaagatggcaattggatgcttcaaggttggaagggtcgcattttgtatgcttcaacttgttgggtgccagcataatgatatgtggctcaactcttgtttctgaattcatactggattgaaggtcaccttcagctgttgtgaactgtgatgaatattcttcccaggtttgcaccaagtgaccctgtataatagtggtagaatttccacccagattagcatcaaatcctacaatgacaaggacgcgaacattagtagtcagatacaatgacaaggacgcgaacattagtagtcagattgttatttacgatgtttttccttccctttcctttttctgaccgacatgtattataggcacttcagatcttaaaaagtagcaaattggttaaaaaggtttttgcagagtagtatcttgtatcgttagccactgatttgattgatttgaaatggatgactatttcatttagttttacagtgaaaaaaaaaaaaaaaaaaaaaa

SEQ ID NO: 7679 - DNA, 582 bp, Glycine max
atcccctgtctagccgccctccgcctccccgtctcgctcgctcccgcctctcgccgccgccgccgccgccgccgccgcccgcgcagccgcaaaatgccgttcaagaggttcgtggagatcgggcgggtggccctggtgaactacggcaaggactacggccgccttgtcgtcatcgtcgacgtcgtcgaccagaacagggcacttgttgatgctccggacatggtccgctgccagatgaacttcaagcggctctctctgaccgacatcaagattgacatcaagcggatccctaagaaggcaactttgatcaaagctatggaggaagctgatgtgaagaccaagtgggagaacagctcatggggcaagaagttggttgtccagaagaggagggcatcgctcaatgactttgacaggttcaaggtcatgctcgccaagatcaagaggggaggagctatcaggcaggagctagcgaagcttaagaaggaggttgctgctgcttagatcactttggcgggcagactgttgagcctttggtcagcgttgtatctttgccccaaaatcgtgaaatattgtgtgaatcac

SEQ ID NO: 7680 - DNA, 753 bp, Glycine max
gttaatgatgcagcaagaataacccctctttgtttctagacctggcccatgaaatagaatcttaaggcttaaaccctcactgctcctccgaaatcccatccacgaagatgagcataccaaaggcagtggcagcgacgatccggctcacggtgccggccggaggagctcggccggcgccaccggttggaccggcgctgggtcagtaccggctgaacctgatggcgttctgcaaggacttcaacgcccgcacccagaagtacaaggcggagacacccatggccgttacgataacggcgtacaaggacaacaccttcgagttcaccgttaagtcgccgccggtgtcgtggtacctgaagaaagccgccggcgtggaatccggtagcagccggcccggtcacgtgaccgcgtcctcgttgtccgtgcggcacgtgcacgagatcgcgaaggcgaaacagtccgatccgtacctccagaacatgcctctcgagtccatttctaagtccatcattggaaccgccaacagcatggggattaagatcgtcaaggacctcgattgaatcaatctttaatatatcaattgctttgttgtgttgtgctattaggattagggttagggtttctcttttaaacctcttttgagtttgagcctgcacatatgttttgttattttggctaatggatgttttgatttgacatatcttatgatatggataaagttgttaacaagatcggtcatgtgctttaatcctttgt

SEQ ID NO: 7681 - DNA, 1307 bp, Glycine max
tccgcctccgtggcccccccccccaataatgaccagctaaaaagttgttgtggaatacttttcttttaaaaccaaataatttgtttgaagcttcttattagatattttatgtatagtgcagcccttgcctttgatgtaagaactgggaagtttcccttatttgctaaaacattccagatttgtattttcctcatgcctaaatgtacaggcagttgatcatccataccttgtggtatattctcaaagtgcagcatcaagaagtggagttctgtctaataatgttactgttgaacaagtttgtggcatttgccatgagccagttgaagatgttgtggttacctcctgtgaacatgcattttgcaaggcatgcttgatagacttctcttcttccttgggacgagtttcatgccccacatgctctaagttacttactgttgatttaacatccaacaaggatgttggggatcaggctaataaaacaacaattaagggttttagatcctcaagcattttgaatagaattcgccttgagaactttcagacaagcactaaaatagaggctctgagggaagaaataagattcatggttgaaagggacggctctgccaaagggattgtttttagccaattcacatcattcctggatcttataaactactctttgcacaagtctggagtttcttgtgttcagttgaatggaagcatgtcattggctgctcgggatgctgccattaagagattcactgaagatccagactgcaaaatttttctcatgagcttgaaggctgggggtgttgcactcaatttgacagtagcttcacatgtcttccttatggacccttggtggaacccggctgtggagcgccaggctcaagacagaattcaccgaatagggcaatacaagcctataagaattgtgaggtttgtcattgaaaacacaatcgaggagagaattctgaaactgcaagagaagaaggaactagtgtttgaagggactataggtggctcttctgatgctcttgggaaattgacagaggcagacttgagatttttatttgttacctaagcaggcttgttatctcgaccagaaatttctcgatgcttctggtcattcattttgcagaacaatattttttatttatatagaaaaattgcattagctgtaaattattggcccaccctagttgccacagcccaagaaacacagcactgtactgttgaaaagtggattttcagcttcaggttttctatttcaatcgtggaatttttagaaaatttatagtaaaaaaaaaaaaaaaaaaaaaaag

SEQ ID NO: 7682 - DNA, 1116 bp, Glycine max
atttaattatcggaagatgacaaagtacggatttctataataatacgctccgacgacacccgatcataagcgcagttcgttccacgttgttgttcgctctgtgtctctcactctctctatatttgcatcattcatcggaaatggctctcgaggttgctgttaaggctgctgttggggctccaaatgttctcggagattgtccattttcccaaagggtcctcttaactttggaggagaagaaaattccttacaaactccacctcatcgatctcagtaacaaacccgaatggtttttgggtgtgaatcctgaagggaaggtgccagtggttctttttgatggcaaatgggtggctgattctgatgtaattgtggggatactagaggaaaagtacccagaaccctctctaatcactcctcctgaatttgcctccgtgggatcaaagatatttgggtcttttgtgagttttctgaagagcaaggatacaaacgatggaactgagcaagcattggttgctgaattgagtgccttggatgaacatctcaagacccatggtccatacattgctggggagaaagtcactgctgttgatctgagtttggcaccaaaactgtaccatcttgtggtagcactgggccacttcaagaattggaatattccagaaagtttggtacatgtgcacaattacactaagctgctgttctcccgagagtcatttgagaaaacaaagcctccaaaggaggaatatgttattgctggatgggcgcctaaggtgaatgcttgaagtaattctaaattatgaggcatctgaacatcagatatgtgatgtactgtgactgaacctggttaagaataggatggcgaactcatgatgtttaagagtattgttacccttttaataatgaataaacatgtagtttgttggtgtttttattggtgatgtgacaacagttgtcactagtagtacatagtgttttagattttaatgtcggaaaaagatcctctcaaattaagaaaaaaactggatgaaatgtcaagcttacttttaatgttagataaatttaatttataaagaatacaaaaatgtattaacggtgaggaaaaaaaaaaaaaaaaaa

SEQ ID NO: 7683 - DNA, 1996 bp, Glycine max
tcagctacgtaggcccccccccccacatacacatggaggaagcaatgaggcgtctcaacggggtagctccgattatcggacccgactcgaaaggcgacggtggactcatcgccaataacccgaaacggacctcggccgtgaacaagagggctttaagagaagacggcggcggtggtggcggcggcggagcgatgaggtaccgcggcgtgaggcgcaggccgtgggggcgttacgcggcggagataagggaccctcaatcgaaggagcggcgatggctgggaaccttcgacacggcggaggaagccgcttgcgcctacgactgcgctgctagagccatgaggggtctcaaagctcgcaccaacttcgtttacccaacttctccgcaaccttcttccgccaccaccgaacacttgttccctaacttcaacaacaacaacaactttcacaaacactcactcttcaatcaccaccgtaaccgccacataaccggttccaacacttgttttgaccaccctcactccgttgacttttcagcccctcgaaacccttcttctctcaacatgcttctctttcgtgaccttattcactctaacccttctttgctttcttcttcttccactcagaacttccacgaccagttttacaacaagagtacttctactttttcatcgttacctgtttctccttctcttgctccccctagttattcgatgaataattcttgtggaggaggctctttgtctgttaagatgaacacgtttcccacttgtggaactaattttgctgaaaaaggtgatgatggtgatggttttttctctcgtgagtcttcggattcggggttgttggaggagatagttaacaagttcttgcctagaacgaagcctagtaaatgcgagactacttttgcaaatcctcaggaggagtcgcttcttctccctccgcttgtttctgaatcaacgcttgtttccaccgggcaacaatactatgatgatgacatgaaaaaagggtttccaaagaacgggggtctaggtgttttttattctgatcaaggttttcccatgcagcaattcgacacctctaatgggtttaatagcatggctatggagaatgatcaaaacattattaataatgcagagaactgtgtcgttgaagatgtttttcagtaccaagagcttcttaatgctttcgcaatcagaatgcaaaatgcttaattagttaacatttccagtgtctgcatctcaatgctagttgtgtatgtagtcatgttgaatctgtcacttctcaatgttggtctggcctttcaattagaaacttattaatcattagggcctttgttcctaggtttaattaaccaggttattttgttcgtgcttactatgtagtattatgcccctctggcttccttccagtagtattatgtatggaactatggataatttgaaagcaatatatttttagtattggtattttgggtaacctttgaaattgtcatgtttataattgtttttggttaagcacgcctttgcccttttcactatatgttttctttatgatatatggacattcattttttaaacacctaataactattttttattttttatacgtgaaatcatattatctataacatttatgttttttttttatttctgagtgttaggtattcattaacatattgggtatttatcgataatttttgttttgtttttctactctgaaaaagggattaatgagaaccacgcactcagagtgaatttgtttttgctagatgacgatagcttctgcgttgactttggaaatagaaaattagtcttgcgttgcacaataccttttttctgctttgtatggatctatatattcttccttctgtttggagaacgtattggtctggtttcaatagtgcctggttggtgttgtccttttcttcttagtattttgttgtggtattgtgaaaaaaaaaaaaaaaaaaaaaaaccaaagcggccgctctagagga

SEQ ID NO: 7684 - DNA, 1691 bp, Glycine max
aattcggctcgagacgacttaacccataatagttcttaaattcacatgtataatcgcttcatcgtcaaacagtcacttctcaccgtcactttagcagtctcttgcggtggcacaaactgtatcacgtttcaaaagactaacttggtgaccggtgaggtgttcctagttaccatacgaaagaggattttggtgtaggatgggatcgatagagaacgcttccaaaccaaggaaggaaaatccgaaatttgaattgccagcgggttttagatttcatccaacagatgaagaactcataaatcaatacctcacaaagaaggttgttgacaactgtttctgtgctatagccattggtgaggttgatttgaacaagtgtgagccatgggatttgcctgggttggctaaaatgggtgaaactgagtggtattttttctgtgtgagggacagaaaattcccaactggtataaggactaatagggccactgatattggttattggaaagccacaggaaaagacaaggagataataatggagaatgcactcattgggatgaagaaaaccttggttttctacaagggaagagctcctaaaggtgaaaagacaaactgggttatgcatgaatataggttggaagggaaacataatcaacccaaacctggaaagagtgaatgggtgatttgtagagtctttgagaagagtcgttgtgggaagaaaatgcatgttccaaagtgtgggaggttcaacaacccctttggagaggaaccatcatcaggtgcttctctattgcctcctttgatggattcttctccatacaacagtgaaacaagaaccaccactgctggggagttgtctcaggtgacatgcttctctgatccaaatcaaactgaggatcagaacaacacacatgatgacattgttgatagcatggaaactcctattttgaacttctcacccttttcaaggcctgatgatgcatccactttggccaaagcaaccctttcttcagcctcaaaccaatcagcacagattgcacaccaaattggggaatcacagttcccagattattgttatgcgcctcaagaaccgtccatgttgaggatgctgatggaaaaccatgaaccctgtgcgaagcaaactcagaaagaagagtttcctgagggaagagactttgatggagatatctcatctatgatatacagcagtgacatgataaacagaatgtttgggaatcaagaacattcttcatcagcttctgcagggcctgtggacactgatttcctatggaattactgaaggttaaggaatattatttagtgttaagacagaaaatatgttaattatatttatattcatatgatacatacaggttggttacctgcaacttcatgaacttattgtaggaattatgggaaatgcatgaaattgaatttcccccctctggttgataactttgataaaaactagtgctgaatagtccatatgttatatatgatctgttaatctttattttcatcattgcagcccaattacaggttgttaccaccaccttttcttaggacttgtttgtgcaacttttgggttaccatctgctttagataatgtggtcatattcatagccagtttactcaagataatgttaggggtgatttattttaaatcaatttaaagttaaatatataatttgctctttttg

SEQ ID NO: 7685 - DNA, 1812 bp, Glycine max
ggctcgagcttgagtaaaaatggaaattgccctcgacggccgggtttttcttgagacgctttctttatattaaagtcgtatattttaatgcatgctgtcgagcttttgttactttgtgacaaatggagggtccttagttctgtttctctttcttctctctgtgctttcaaccaagttctcaaatcactcttcttcttcacccttctgatctgctaattctcaaggtattcaaaattgggtggttttcgattgaactgtgatgtccaagccactgctaggcatagcggaagaggaaggtcaaagcaatgtcactttgttggtttcttcctcagccaccatggaaagtgtgtgcctgaatagctcaaaactgaaagagcgcaactacatggggttatctgattgttcatctgtggacagctccgcgccgtccttctcagatgagactaagagcaatctgaacctcaaggctactgagctcagactggggcttccggggtcgcaatctcccgaacgagattcagatctttgcttgagaagttcgattcagtttgatgaaaagccactgtttcctttgcatcctgcaactgatgaacaccattcctcatcaaagcctgctgttttgggaaacaaaagagggttctcagatgtcatgagtggattcgccgaggagaaattgcttgttagttccgaggtcaacacaatattgccaccaaggccttcttctaatgtggggttgaaaccaagctctatgcttgagaacgtcggggctcagcagcaagccaaagaactcgcaacggtgaaggttggtcacgagaggtctcatgctgtcaacgaaagcagaccaaatcttaatgattctactaataacaatagcagtgcaccagctaccaaggcacaggttgttggttggcctcctataaggtcatttaggaagaattcattggtcactacttcaaagaatgttgaagaagtagatggaaaagtggggcctggtgcactgtttgtaaaggtcagtatggatggtgcaccttacttaagaaaagtagacttgaagaattacaatgcgtatgccgacctatcttctgcgctggagaatatgttcagttgttttaccataggttcttgtggatctcatggaaatctgggaggggaggtgctgaatgaaaccaagctgaaggatctgcttcatggatcagaatatgttcttacttacgaggataaagatggagactggatgctagtgggtgatgttccctgggagatgtttactgagacgtgcaagaggctaaggattatgaagagctctgaagccattggtctagcaccaagagctgttgaaaaaagtaagagcaggaactaggcagaattaagcatctcatcacacccttctatccatctaactgcttgtggggttaaaatgttttcttggctgtgtgagggagcaacacaaggccataatggcttggaagcacaacttaaggcatgtttggactggatagaatttggtactaaagctgccttgttgatcatgatattatttactatcggtgtgttctgttgtcatgatgtttatattcagtaagcttttttcatgattgtcacaacttataaaaccccaaaaacctgtctgtgggaggttcttatattttttatgtgctctcatgttcctgttgtggtgaaggatttgtagtttgtaaattggatcatctcttctatgtttgcaacttggtgtgataaaaaacaagaagttattatatatgtaatgcaccttctactgtttctcttttgtccaaaaaaaaaaaataatataat

SEQ ID NO: 7686 - DNA, 1698 bp, Glycine max
  misc_feature (1)..(10): n is a, c, g, or t
  misc_feature (12)..(14): n is a, c, g, or t
  misc_feature (17)..(20): n is a, c, g, or t
  misc_feature (22)..(22): n is a, c, g, or t
nnnnnnnnnngnnnggnnnngnggacccacgcgtccggggaatgtaagagtgggtgttggtggttgtcctcctccctcctcatgggtatggcaaccctctcctcctctcttcctcttttccatcgctaccctaaccctaaccctaatccttcgctctttcgcccctccctttccctctccttctccttctctcgcactaaaccccgtcgtgccccctttctcggtctcgcttcctcttttcacgatttcacctccaactccaagaaatcagtgctcactgagttgatacaagagatagaacctctggatgttagccacatccagaaagatgttcctccaactacaacagatgccatgaaaaggactatatctggtatgctgggcttgcttccatctgatcagtttcacgttgtcattgaggccttgtgggaacccctttccaagttactcatttcttcaatgatgactgggtatacgctgcacaatgttgaatatagactttgtcttgagaaaaaccttgatatgtttgaaggagatatagagaagccaaaggcagaaagtacgaaagtggacttacaagggttgatgcatgacagtgtaaatgtaattgactttggtagagataagagcttgtcttctaaagttgaaaagcttcatgaggacgctgacattcaagaacttggtgacatatctgcagaagctctgcaatatatttttaatctgcaatctcgcttgtcttccatgaaaaaggagctgcatgaagtaaagaggaaaagtgctgctcttcaaatgcaacagtttgttggagaggaaaagaacgatttattggattacttgagatctcttcaacctgaacaggtagctcagctttccgaatttacatcccctgagcttaaggacaccatcctctttgttgtccatggtctccttgctaccctttctcctaagatgcattctaaaccttccaccatctcagaaaatacaacagttggagcaacaaatgttgggaatgaggattgtgctgaggttgttgagaactctgctcatcaatttcagcctgttgtttcattaactcgggactatcttgctcgcctgctcttttggtgcatgcttttgggacactatcttagaggccttgagtgtcgattggatttgacagatttgctttccttgacaagtgatcctgagaatgatgcttctggcagtcaaccgattacttgaatgtgcatgcttttgggacgctatcttagaggccttgagtgtcgattggatttgacagatttgctttgcttggcaagtgatcctgagaatgaagatcaaagttcggtggttcaatatgtatatagacgtgttgtttcaacctgatttttgcgatacagactcaagtaccaatcacttctgctaaggagttatctttgcttactgaagaatattgcattcctgccatgtaccaattctcggtctcttccagtgttagagcgtcggtaggatcgaagatggttggcatgtagccatttgttttggctgggtgataatatcttaatagaatatggaaatgttgtgacgaactctgcagtagcagttctatttaaataaaacaatttagttaggtgatctatagattttattttccacttatatctcatttgatgtcttgatccgggtaataaagagcaaataattttattaaagcaaaaa

SEQ ID NO: 7687 - DNA, 897 bp, Glycine max
  misc_feature (23)..(23): n is a, c, g, or t
cgtgggaggcactcggccctccngagtgtgaggggcgggcgggggccccagaaagagttatcttttctgtttaacggccggccctccctggggtccgcgcgcccggagttgttggtggtggtggtggatttggagccggtggtggtggttttggagccggtggtggtggggttggtagtggtgaccctgctcaaattgtctccaaagccttgctctgtttcaatgataagaatatttatcgcagctgcgaagagacgtgtagattgaacgagaatggaaacctgaatgtgcctgtagagaaaactgatacattctgccaaggaccatgtttgtcagagacaaacttggtcctcaattgcctggacaacgttttcagcaacttcatattttacaacagggcaaccatacaagacatcagagaaacaattgaagctggatgtggctatggccgtcaaagaggaaacttcaatgtggctgagcacattcagagagaagaaagcaaagccccaaaggctactagccatgttgtaatgggacttgctattgtcatgatgggacgcgctctattgcctctgaattttacatgatattacgttgataataattatttatgcatgctcatcagtttcatgtgtacttatttactgatatgttcatatgtagctgcttatagaagggaaaatattttaggttatggagttgtattatactagcttttcccttggtcgtatatataagttatagatgtgtggaacacattacagataaataaattttgtagtatatgggcatatattaaacaaagaactaccccagttttagttttaaaaaaaaaaaaaaaaaaaaaggggcgccccccgatttgggaccccggctacccgggatttatttccggac

SEQ ID NO: 7688 - DNA, 1668 bp, Glycine max
tactgctttattgtggctgcgagacaacgtcacagagagagaagggaaggaaaagtggtgttggtggttgtcctcctcattggtatggcaaccctttcctccatcctctcctcctctcttcctcttttccatcgctaccctaaccctaacccttcgctctttcgcccctccctttctctctctttctctcgcactaaaccccgttcccccttcctcgttctcgctgcctcttcccatgatttcgcctccaactccaagaaatcagtgctcaccgagttgatacaagagatagaacctctggatgttagccacattcagaaggatgttccaccaactacagcagatgccatgaagaggactatatctggtatgctgggcttgcttccgtctgatcaatttaatgttgtcattgaggccttgtgggaacctctctccaagttactgatttcttcaatgatgactgggtatacactacggaatgttgaatataggctttgtcttgagaaaaaccttgatatgtttgaaggagatatagagaagccaaaggcagagagtatgaaagtggacttacaagggttgatgcatgacagtgtaaatgcaattgagtttggtagaaataagaatttgtcttccaaagttgaaaagcttcatgaggaagttgacattcaagagcttggtgaaatatctgctgaagctcaacaatatatttttaatttgcaatctcgtttgtcttctatgaaaaaggagctgcatgaagtaaagaggaaaagtgctgctcttcaaatgcaacagtttgttggagaagaaaagaacgatttattggattacttgagatctcttcaacctgaacaggttgctcagctttcagaatttacatcccctgagcttaaggacactatcctctctgttgtccatggtctcctagctactctttctcctaagatgcattctaaaccttccaccatgtcagaaaatacaacagttggagcaacaaatgctgggagtgaggattgtgctgaggttcttgagaactctgctcttcaatttcagcctgttatttcattaactcgggattatcttgctcgcctgctcttttggtgcatgctgttgggacactatcttagagggcttgagtgtcgattggagttgacggatttgctttccttgacaagtgatgccgagaatgatgcttctggcagtcaaccaattgcttgaagttcaaattgggtggttcaatctgtatatagacgtgttgtttcaacatgatttttgcgatacagactcaagtaccaatcacttctgctgaggagctatctttgcttactgaagaatattgcattcctgccatgtaccaattctcggtcttctagtgttagagcatatcggtaggatcgaagatggtattttgttttgactgggtgataacatattatagattatagaaaatggaaatgtcgtggcgaactatgcagtaccagttctctatttaaatactaaaacaatttagttaggtgatctagattttattttccatttatctcattcgatgtcttgatccgggtaataaacagctaatagttttgttaaagcaagacattgtattagtacttatagaaaatgtttaaaatttctgcaatttttactttacttttagattgaaaaaaaaaa

SEQ ID NO: 7689 - DNA, 998 bp, Glycine max
  misc_feature (900)..(900): n is a, c, g, or t
  misc_feature (907)..(907): n is a, c, g, or t
  misc_feature (926)..(926): n is a, c, g, or t
  misc_feature (928)..(929): n is a, c, g, or t
  misc_feature (931)..(931): n is a, c, g, or t
  misc_feature (984)..(984): n is a, c, g, or t
  misc_feature (998)..(998): n is a, c, g, or t
actctactattattgtggctgcaagacagcgtcacggagagagaagggaaggaagagtgggtgttggtggttgtcctcctccctcctcatgggtatggcaaccctctcctcctctcttcctcttttccatcgctaccctaaccctaaccctaatccttcgctctttcgcccctccctttccctctccttctccttctctcgcactaaaccccgtcgtgccccctttctcgttctcgcttcctcttcccacgatttcacctccaactccaagaaatcagtgctcactgagttgatacaagagatagaacctctggatgttagccacatccagaaagatgttccgccaactacaacagatgccatgaaaaggactatatctggtatgctgggcttgcttccatctgatcagtttcacgttgtcattgaggccttgtgggaacccctttccaagttactaatttcttcaatgatgactgggtatacgctgcacaatgttgaatatagactttgtcttgagaaaaaccttgatatgtttgaaggagatatagagaagccaaaggcagaaagtacgaaagtggacttacaagggttgatgcatgacagtgtaaatgtaattgactttggtagagataagagcttgtcttctaaagttgaaaagcttcatgaggacgctgacattcaagaacttggtgacatatctgcagaagctctgcaatatatttttaatctgcaatctcgcttgtcttccatgaaaaaggagctgcatgaagtaaagaggaaaagtgctgctcttcaaatgcaacagtttgttggagaggaaaagaacgatttattggattacttgagatctcttcaacctggacagggagcttcagcttttccgaatttacatcccctggngcttaangaccccattcctctttgtngnncntggggctcctgccaccctttttcctaaatgcttctaaacctttccccttttanaaaacacaggggan

SEQ ID NO: 7690 - DNA, 1653 bp, Glycine max
gcgccgtttttttttctatcctaaatcctacaattttccctttcataattctcactctctgcaatattattttccttcaaagtcattgttgttgaatcatctgcaccagacaccgattcattcgaccaaaacataagcatgtccggatctgacatggcggggagggagcaattcacggttgggatgcacaaaccccaacaacaacaacaacaacaacaacaacctcagcttcatcaaaacatgcgtatggactatgctgctgacggcactgctgttttcgcccctccgaccgttaccgttaacattaacggcggagattcctctccagcggtgcctccgggcctgggcctgccccagccccagcccatgatggttaactcccccgaaccaattaagagaaagaggggaaggcccaggaaatatgggcctgacggtggcatgaccttgggggctttgaagaccaccactcctcccggcggcggcgtgccggttgggcagtccggtggggcatttccagcggggcctctttcggattcggcctcagctggtaccgtgaagcgcaggggcagacctcgtggttctgtcaacaaaaataagaagaatgatagctctaactcctctaagtattctgggccaggatcttggtttactccgcatgtcattacggtgaacgctggagaggatttgtcagcaagaattatgacaatttcccagagtagttcaagaaatatttgcatcttaacagcaaatggagccatatctaatgtgacacttcgacaacctgcctcatctggtggaactgtgacttatgaggggcgatttgagatcctatcacttggaggttctttttttcttgctggaactgaaagagctggggggctgagtgtgtccttgtcagggccagatggccgtgtgttgggcggcggagttgcaggtcttctgatagctgcttcccctgttcagattgttttggcgagctttgtttctgatgttcgcaagcacttgaagcgtgcaaagaagacggagaatgaaaaggtttcgacagcaggaggccaaagcagctcaccatcaagaggcactctcagcgagtcctcaggtggggttgggagtgggagcccactaaaccaaagcacaggagcatgcaacaacaccatcgaaaacagtaccaccccaacacaaagctttcaaggcatgccctggaagtagaagtacttgactcctctcacatctttgtgtagtaggttttggtgttgtgacagacacatcagactctacttgttatgctctattacttggtgtcttttatgctttaagcatttaggatgcacacctgttatattagctttgtgtaatattaattggaggaattttagggataaagtatgcggactcgtagcttaatttggttagatgttgtgttcacttgggtgattcaagaggttctggcaggatcgggttagtatgtaggatcttgatgagatgccggtgactttgtcatccgttagttgtaatttattgtcggtccatatgcctaaactttctccttgttacccagttgttcggtggtaataatacttaatctgtttagcttcttttaaaaaaaaaaaaaaaaaaaaaaaaaaaaaaaaaaaaaaaataaaaaaaaaaaaaaaa

SEQ ID NO: 7691 - DNA, 2493 bp, Glycine max
ttcttgtttgttgattaacccttaattaatccgggcgcgcctgatttatcacaagtttgtacaaaaaagcaggctcctgcaggaccatggagacacaatcagatggtaatgaggacaacatagctgccattaaaaatatgaggcagcagcttgaaactcgcatagagtcgcaacacaaggctcacatggagatgcttgcttctatgcaaactgtaatacctaatcttgtttcatcccttgacctttctctcaaggttgtgtcttctttcaaccgtcgtccttttgctcctacaccttctctgcctcagcctgatccaaaactgagtcccaaaaaaccggttgaactaactcaccgtttcaatgcggaaacctgtgctgatggctctattgaggcaaacttgacaaatcccaagaatcaaaagcccaaaacatctatgcattcaaactcagcatttcaagtagagtctgagaaggttagtccattagcggtggttcgatcaatggtcactgtttgtctattagggcgagtacccttctcaccgattgattcttccaccgtgtcaaggaaattggaaaatgatcagatggtgacaccaacagagaaggcagcacttcaggaacttggaggggattcgggggcaacacttgcagtggagatagctttaagggcaatggcagatgataatggtggtgttgaagtggaggagtttgtggtgagtggcaaggcaagaattatggttttaaatgtagaccggactcggcttctgagagaattgccagaaagtgtgcagtatcagcaacttgaatcaagttctggagatgggaatgcgaatcaaaatcaagttcagcatatcactcatagtggttctaatgtgaatggtagtttgcctgggatgggaaggctagttccgaggccaatgtctgatatgtggccaccccatggggacccccatatgtcagcattgcagccaatgttttcaggaggaccaaggggagctccacccagagtaatggctatgatgggggcacatagaggtataagtattccttcaatgcatagactcccattggggccaaatgcaccagggagtagtcctaatgcaatgccacaaaaaccaagaagttttgatgatgatatgaaggatcttgaggcattgttgaataagaaatcatttagggagatgcaaaaatcgaaaactggtgaggagcttttggacctaattcaccgaccaactgcaaaggagactgctgtagccgctaagttcaaaacaaaaggtggttctcaggtgaggcaatactgtgacttactgacaaaagaggattgccgacgtcaatctggttcctttatagcatgtgataaggttcattttagacggatcattgcacctcatactgacatcaatttaggagattgttcttttcttgatacctgccgacacatgaagacatgcaagtatgtgcactatgagtatgaccctacacctgatgtgtctccaacaatgatgggcgcccctcctcctccaaaaccgctaaagcctcagcgtgctgaatactgttctgaagtggaacttggtgaaccacaatggatcaactgtgatatacgtaactttagaatggacattttaggtcaatttggagtaataatggcagatccaccatgggacattcacatggaactgccttatggaacaatggctgatgatgaaatgcgcagtcttaatgtccctgctttgcaaactgatggtcttatttttctatgggtcactggacgtgcaatggaacttgggcgggaatgcttggacctttggggatataaacgtgttgaggagatcatttgggtcaaaacaaatcaacttcagcgaataatcagaactgggcgtacaggtcactggctcaatcacagtaaggaacattgtcttgttggaataaagggcaatcctgaagtaaacaggaacattgacactgatgttattgttgctgaggtccgggaaacaagtcgcaaaccagatgagatgtatcctttgctggagaggataagtccaagaacaagaaagctagaactatttgctcgcatgcacaatactcatgcaggatggatgtctcttggtaatcaattgagtggtgtaaggttggtggatgaggggctgcgagcaaggtttaaggctgcttatccagatgtggaggtgcagccactatcacctcccagagcttctgctatggaagtagacactagtattgctcctcacacgaggagtccatttgcagccactgaatcagagtccacttcggcgcagtttgcggagcctgcagccgctccagaaagtaactttgtttcagaggagaaatcaatggccattgatgtggacattggctaagtttccacttttgatcatgattggtaggagcaatgccttgataaagctactcgagacccagctttcttgtacaaagtggtgataaattggagctctgcagagctttcgttcgtatcat

SEQ ID NO: 7692 - DNA, 918 bp, Glycine max
cagtcattgaaaagagaattttgaagaagttaatggtgctgagctcccaatgatcccacttgcttccagttctggttccaatgagcaactaatgacagaaattgttactgctgaatgcagcggaaaagaacttgaacctcaaactcagctctcttctcatgcattctctgatgcttcacaagagtttgctggtggcatgctgaagggacaatcttcagatgttgataatgatgcagattattggcttctatcagatgctgacgttagtataacagatatgtggagaacagattctactgttgattggaatggtatagacatgcttcatcctgactttggagtcatttcgaggcctcaaactccatcatctgggcttgctgaagtgccatcaacagcagcaaactctattcagaagtgatttcgatttgcctattcagaaagtatggatggccttcatcctttgcacaaagagactctacttcaatagagtgattgttagccttgaggatgtcaagaggtgttgaatgtcaagctgagagtggttgctttacttaagttaaatcattgactctgacaaataaacttagttacagtagacatagtatgctcttagaggatttaacttggaagatacagcagttgcgttaagtttttattacagaaaatgttacagctgtatgaaatgtaaacaaggcagtctcaatcagtatatattgtcatatgattagcctggaaccgtggtttcagtttttttgagtttctgcatatatgctgactggaaacaaacatggctgcactggataatgttaggacagaaccacctcattattgagttatcattcatgttgcttgtaaacaatttcataatcattaatcagtctaatgataaaatcatgtcaattaaaaaaaaaaaaaaaa

SEQ ID NO: 7693 - DNA, 1325 bp, Glycine max
ctagttctagatcgcgatcttacaaaaccaaaacagtaaagctaacttcaacacctttaattttctaaaagtaattcagcggctgaataccaagcggagaagatgagtcaggagcagccacggcgtcccaaaggccaaaaccccatcaaatacggcgacgtttttgtcgtctccggcgaccttgcacagaagcccgtcgcaccggaagatgctgccatgatgcaaagcgcggaaactcgagtgctcggacaaacccaacccggcggagcagcttccgtcatgcaatctgccgccaccaggaatgaacaggctggccttgtcggtcaccgggacgtcaccgacgttaccggcgaccgtggcgtcacagtcacagaaactaaagtccctggaagacgcattataaccgaggctgttggtggccaggttgtggagcagtatgtggaggcaactccggttgaggcagggcgaagcagtgcaattaaggagaatgccataacaataggagaggcattggaggcgacggcacagactgtgggtcagaaagcggtggatcagagtgacgcctccgcgattcaggcggcggaggtgagagcaacgggaagtaacgttataacgccgggtggacttgcggctatggctcaatcagctgctgcttataatgctgactgcaagcttgaccaggacaaggtcaagctcgccgacgttttggccggagccacagccaagttgcccgcggacaaggccgccacactgcaagatgctgaaggtgtagcgtgtgctgaggtgaggaacaaccctgatgccaccgccactcccggtggcgtagccgcttctgttgcggctgctgctaggctcaatgaaaatgttaagtaacgagtcatgttatgtgtcttgataatcatacttttgtttcatgatgtgtggtgttgatgtgttatagtctatagtgtattaataagtgtaagtggtgcaacatcttgtttttctttcttgtactctttgtgagttatattaattactggttttaaggactctacttaaggtgatgtatgtatactatgcgctatatgcatttctgtggttatcagttaataatatgtgctccaatcttgtaatttcttgtttgcaaccattctagatcccaaaatgcttgtcaagaggatttattacgtacccttttcctttagtcataatattttattctttagaaaactgtatttgtagttgtatgtattgtttggggataatatatactgcaattgttataggatagccaaaaaaacagcattctataagatattatagttgtgtttgtttatgatagg

SEQ ID NO: 7694 - DNA, 2286 bp, Glycine max
tccacgcgtccgaatctgctttgtggtttcaaagtaattttgtgggggggaacaagacttattcattgcttaagtaagcgttcctataaaatatagtactcccccgcctccgatttggtctttaccaccaaccttgaataataaaaccacaaaaacaaaagcccacatgcatgccaattcctcgttgcttttacctgcaaaagtgctaagtccttgcatcagttctctattgttttggcttcaaagttcagatcatgctttccttttcatttaagaatatcttagattttgagaacactgctcatgtccagctggaattggagtaaaatgtggacaacgatcacggaccttaaatagaagtacctgttgtttgttgttcaaaaaaagagagaaatcagaaaattcaggagtgtttataccagacaaacattttggtgttatttgcatatattcaaagcaccagttacttttcaaatgcaaatgtctcagaaacataaaatgtcctatgactctagcaggttcagcattgagcctgcgcaaaatctggggtcatgttgcttcctgcaaagtgggaacctagactactactcatcctctgataatggtagccatgcaacctacccttctgtttgtattttcgaacaatattgcaccctggaatcttctacaaacaacaatttcccttccctaaactctccatctactgtcagtttctcacctaacaatagcccagtctcaaagctgcagtcaaaaccaaatgtgttcagttcacagaattcgcttgaaattgttgatgaatcgctagaaaacaaatctttcttgacacttaacgatgatgagctgaggcacaagataagagagcttgaaagtgctatgttgggacatgatacagatattctggatacttatgataccataattccagaagaatctgattcatttttgaaagaggcagaaaggtggaagagaatgatggaaatgatatctagaggggatttaaaagagatgctttgtacatgtgcaaaagcagtggcaggaaatgatatggagacaactgaatggttgatgtcagagttgcgtaaaatggtctccgtctccggcaatccaatccaacgattgggagcatacatgttggaggctcttgttgcaaggcttgcctcttcaggaagcacaatctacaaagtcttgaaatgtaaagagcctactggtagtgaactcctttcacacatgcatctactttatgaaatctgtccatatctcaaatttggttacatgtcagcaaatggagctattgctgaagtcatgaaggaggaaagtgaagtccacattattgattttcagattaaccagggaattcagtgggtaagcctaatccaagctgttgctggcagacctggagcaccccccaagattagaataacaggttttgatgactccacttcagcttatgccagggaaggaggccttgaaattgttggagcaaggttatcaaggcttgcacaatcatataatgtaccctttgagttccatgctatacgagctgctcccactgaggttgaactcaaagatcttgcacttcaacctggtgaagctattgctgtgaactttgccatgatgttgcaccatgttccagatgaatgtgtggatagtcgaaaccatcgtgaccggttggtgagattggcaaagtgcttgtctcctaagattgtgacacttgttgagcaagaatcacataccaacaacctcccattcttcccccgtttcgttgagacaatgaactactacttggctatttttgaatcaattgatgttgctctgccgagggagcacaaagaaaggattaatgtggagcagcattgtttggctcgagaagtcgtcaacttaatagcatgtgaaggggcagaaagagtggaacgccatgagcttctgaagaagtggagatcacgtttcactatggccggattcacaccatatccattgaactcctttgttacttgttcaataaaaaatcttcagcaaagctaccaaggacattacactctagaagagagagatggggctctatgtcttggttggatgaatcaagttcttattacctcttgtgcttggaggtgatgattcaatgacaactggttcatttttgttatttcagacttttagttagtttatgtatcatcctaatcttctttcgcggaactcatagtcaagttactctataatttgttaaaaaaactcacttgatttatgttaataatgccagtaccagcaagctcgatctcatcaaagtag

SEQ ID NO: 7695 - DNA, 2749 bp, Glycine max
cttaaattagttttttttgattactgtacgctaggtactctgtccctttaatctctctctctctctcatgtttcattctttctcttctcttgtcgagttctcattgccctcttctgttcaataataataacttaataaaagaaaaaaacagtaagtctcggttgattcggctcgcgggaagaatcatcatcatcgtcgtcacgcttcccaatcaaacccaccacccatctgaatcaatccagggatccccttcttctgggtgggatagcttgattctgatgcaaggacaaaggaggactattggatcatttccagcaattgtaagtatgatgcaagggcccagttctagtggcactgatatgagtcatcagtcttccttgaatcatgtgcaaaatgcagtagatttccggttgtcagattacaggggatcttctggtgagactgcatgtttacgtggtactggtcataatgttcagagcttcagtggctggagtactggtgaatctagttctagactcaatctgatcaaccaagtcaatgatgaaggtctaaaatcagaacatgggctgtcttcttcgtataatgctgctaccgaggatgatctcaggtctgaggaaagacaattcgaaccaaataatgtaatttttcctgttagttcaaatactaatctacatggcaatcaatctagagtccacccttcctttttgcaaggttccagttctactcgtattagccagaatattagtctagatatggggcatgttactaatgctgctgatcgtgggaagggcaaagaagctggtagtagtgttaatgccaacaatactagtggaatagacagagaaaagacattgtttggcagtgcttcatgtaatcacacaggagcttcatctgaaagctctggatacatggcttggggtgatagtgctaattcaagttcttctttagttaattggggtccttcctgcaagagaaaggctcttgaaggtagttctaggcaactgtgttctggaggaagctcaagcactcttgtacaatccggaaatggttgctggcctactgatcctgttgatcttaatgcttccagcgacttaactgattctacacctatagaagatattcctgttactagtcctccattatttcagaatgcaacaaatgaagagcgacaagaagctcccaatggatttcctttgataagtattgcagaaaatgtggaaaggcctctaagaaacttcgatagaagaatgagccatctacagcatcaggaatctgtacctttcaatttaccatcaacagggagtgctaggcatcataatcattcttctctgcatcaagcacctggctctcactcaatcaatgattcgttggagttgaggttaacagctggagggacatcttctgctaattctggcgcttctctgaaccagtcacctgccttgcgcatccattcttttccttggaacagaactgccaatcctagaggggccagatcttcaacttcttataactctggagaagaagccgtgcgcgaagattttattttgagaatgtttccaagagatagtactgaacaccccatgaatgtgcctgcgtcttcaggacacgaacctactggttggcatacaccatctggtaatgtgaacaattctggaggtgtacctcctccatcctggattggatctagttcaaatgttcactctccccctaaccctagctggatttttaatcatgaagtcccagcagaaaatatgcagagtgtgtcagagttcagtccctggtccctttttccatcaattagctctgcatctggtgttcataatggccattcagccccatcttcttctggtcctccttcatttacccagggttctagcagcaaccaaccatatgcaagaacagcattgttgatggaaagaacgggtggtgatgttctctctggtccccattcactgcgagcattaacctttgacaatgaggggagacgtcgactaatatctgagattcgccaagtcttgatggcaatgcggtggggtgagaacttacgagctgaggattatatgctctttgaccctttcctatatcatggcatggctgaaatgcatgacaggcacagagaaatgcgccttgatgtcgacaacatgtcttatgaggagttgttggcattggaggagcgtataggagacgtgagcactggattgagtgaggacatcattattaagttgatgaaacaacgaatttacgtgtctgtcatgacagactcttctattgatttggaaccttgctgtatctgtcaggatgaatttgctgatggagagaatgttggatcactggattgtgggcatgagttccatagtggctgcatcaagcagtggctaatgcagaagaacctctgccctatttgcaaaacaaccgccttagctacttgatagggagaacctctatcctcttaagctggttctacctatagcttcttttattttttaaactttatgaacttctttgaactggacctctcatttgtcatgattggggacgataacatgtcccctaaaaagaagtaaacaaaaaacattggtgggtgaactataactattgtagagtttcatttatacagttgtaatggatgattacatgtggtttagataagctataagcacttggatattattaaatttcattataaatctaaggttggtggctgatgagacttgagaggaataaaaaaaataaaaaaaaaaaagggggg

SEQ ID NO: 7696 - DNA, 1324 bp, Glycine max
cgattaaaccccattacacctcacaaaatttctcacttcaactttgaacttcttttctctattattattatctttctctttttcttcatctcttatcttccttcacctttttattgaaagaaaaaaaaaatgagcaacataagcatggtagaggcaaagctgccaccaggattcaggtttcatccaagagatgaagagcttgtgtgtgattacttgatgaagaaggtgcaacacaatgattcccttctcttgatagatgttgaccttaacaagtgtgagccatgggatattcctgaaacagcatgcgttggagggaaggagtggtatttctacacacaaagagaccgtaagtatgcaacagggttacgcacaaatcgtgccactgcctcagggtattggaaggccacagggaaggacaggcctatcctccgcaagggcacccatgtagggatgaggaagactttggtgttctatcaaggaagggcacccaaagggagaaaaactgagtgggtcatgcatgagtttcgtatcgaaggacctcatggacctcctaaaatttcttcttccaaggaagattgggttttgtgtagggtgttctacaaaaacagtgaagttttagccaaacctagcatgggtagctgctatgaggacacgggatcttcaactcttcctgcgttaatggactcttacataagttttgaccaaactcaaacccatgcagatgagtttgagcaagtgccctgcttctccattttctctcagaaccaaacaaaccccattttcaaccacatgaccactatggagcctaagttccctctcaaccatgcaactacaacatatggaggagcaccaaatttgggttattgcttagaccctttatcttgtgacagaaaaatgttaaaagctgttttgaatcaaatcacaaagatggaaaggaatccacttaaccaaagtctaaaagggtcaccaagcttaggagaaggaagttcagagagttatttatctgaagtggggatgccccacgtgtggaattactgatgtgagactttagtacttaaaccctctcctccacctatgccaccatgaaatttttttttttaaaaaaaaaacaagaaaaaaaaaggtataagggggaagataaaatcaatccattgttttaagtcatggtgagtacttatgttttacctgtggtgttttagctattaatgtatacccatccatgatgtgtccctatatattaggaaaatgggacttgtaatttaaacttataaatatttgtagttaattttatttagtggatgatttttttttcttctttgttaaa

SEQ ID NO: 7697 - DNA, 2298 bp, Glycine max
tcgccctcgcgtccgaaacaaccccttcttcacgttacctacgttttcattcaaaaccacagtacgacatcgaaaaaaacaaaaaagtcataatatatatcaacaaaagggaacgatattttcagcaaagttttgctctccacgtttattgaatcaaggtcttttctaatgctaggtgttgaatttggttaaccagtcttggaggtttatctgctattattaaaagtgttgggatacaagtaccaagcagaagtttgccaaggcagctgcttttagctgatgccatcatcatagtatggacttgaatcaatttttaaattttaacgttattagttcggaaggattcccttgcacatcgtcttgtactcctatttcaccaatatccaaccagttgcttggatccttgaaacttgacataggaaactcacctaactcggccctttctagtcattttgattctgatactctttcttctgcattaagtgacagtcaggaattgcacacctctggggaaattcactctggtgtcaactcttgcaagtctttgcaggaaagcaatcattatttgcacaggccagtctcatttgtagaccatctccaagacggtttacatctatctactaggagctttcttccacaggatgcaagttatgaccatgaaactagacatgcattgctggaattagaaacagctttgatggcacctgatggtgaagatcaaatcaccacatcaagcacttctttgggtgttggcagtagaccaacaacatcttgccaaagaaataggtcctggagctctgagggccagtcaagtgatgttgcacatgtagagaagcaccacaaatcagtggaggaagaatcgctgcaaggatttccatcatgcaatttgaaacaattgctgattgtatgtgccaaagccttgtctgaaaacaacatgcaacattttgatcaattgatagaaaaagctagaagtgctgtgtctataactggggagccaatccagcgccttggtgcttatttggtagaagggcttgttgcaaggaaggaggcatcaggaaataacatctaccatgccctaagatgcagagagcctgagggaaaagatttactctcttacatgcagctactgtatgaaatctgtccctacttaaaatttggttacatggctgccaatggcgctattgctgaagcatgtaggaatgaggaccaaattcatatcatagactttcagattggtcagggaactcaatgggtgacacttcttcaagctcttgcagcaagacctggtggagctccccatgtgcggatcacagggattgacgatcccctttctaaatatgttcgtggtgatggactggaagctgttgggaaaaggttggctgcgatatctcagacatttaacatccgagttgagttccacggcgtgcctgttttagctccagatgtgacaaaagacgtgcttgatgttaggcctggtgaggctttggctgtgaacttccctttgcaactccatcatacagctgatgaaagtgttgatatgagtaatccaagggatggacttttgagattggtgaaatcactttctcccaaggtaactacattggttgagcaagagtcaaacacaaataccactcctttcttcaacaggtttatagaaaccttggattactacttggcaatgtttgagtccattgatgtgtctcttccgagaaagagcaaggtgcagattaatatggagcaacattgtttggctcgggatattgtcaacattattgcttgtgaagggaaggaaagggtagagagacatgagctgttaggcaagtggaagtctaggttaacaatggctggctttcgtcaatatcctttgagttcttatatgaattctgtcataagaagcctgctgaggtgctattcaaaacattataatcttgtggagaaggatggggccatgctactgggatggaaggacagaaatttgatttcaacttcagcttggtattgattacatgcagataggaaataatgcagtggtagaaatatgttgccgactgaggtttatgttgatttctagggccttgtgttccttaccattgttctaaaggtcattatttgataaattagtctattgagtttcatgtcatagtgatgcagataactgcataccaattcttttataaactatttaggtatgtacagtgttttgatctacaaatattgtacttgtacctgaaacttatccttggtatccaatataaattaaatgaattcacagtaaggttattgccaaaaagctccaag

SEQ ID NO: 7698 - DNA, 1118 bp, Glycine max
ttttggggttttttttttttttttttttttttttttttttttttttttactagtaaggtgctgtataactcaatgaatgtagtgggttgaaagaagcaatagtagtatacataaacttgcaactaaaaggctaaaaggaaggcacaacaaatacacagacaagttaagagaaaagatatgctaattctttggaatgttcttgccgacaatcttggctggagttatccttagaagattgcctggcttaccagggacagcacctttgatcatgaccacattaagatctttatcaatttttacaatcttaagctttcttatcttcctcttggttcctcccatccggccaggcatcttttttcccttgtacacacgaccaggtgtggttccagcaccaattgatcctagttgtctgtgactcttggaaccatgggtcattggaccccttttgaagttatgacgcttgattccaccttggaaacccttgccaatggtggtgccagagacatcaacaagatcaccctccttgaaaatttcatcaaaaacaaggcgctggttaaggtcgaagccatcgacggcttgaagacggaactcctgaagatggcgcatgggaatggcgccgaccttctggagatgaccgatttcgggtttggtcaatttgcgatctctgacccttcggtaaccaacctggacggcgtcgtatccatcggtggcctcagttttgatctgggtgacgatgttgccttctttgaaacccacgacagtgacaggaacaacctctccgtcggattcgaaatagctcatcatacccaacttggtgcccatcactccaatgcctgcctccatgctcattaccactttccctttccctcttcttctcacttgagccgtgaaagaacatggcaatggctgccgagaaattgaaattgaaattgaacaacggtacgttggtgagggaatagaaaagatcgacatggctggctatctcacacaacacaagtacagaactaagctataaaacacactcttaagtcttatcctctctctgctacggaatggatagaattgttcgcttcaaccatgcaatccgacccgatctccctccagggcctaaataatgc

SEQ ID NO: 7699 - DNA, 1855 bp, Glycine max
cccacgcgtccgcccacgcgtccgacggctgcgagaagacgacagaaggggggggaaacaaaaacaaaacatttcgtccgaaactaatataacgtgttcctccttggaagaagccatagccataacatagccaccagaaaacaaaacccaccttagttattaaaagaaaagaaaactacataaaattaagctttgttcggtggtgaccatggggagcaccgactcatcaagcggttcacaacaaccgaacctgccacctgggtttcggttccaccccaccgatgaagagcttgtggttcactacctcaagaaaaaaacagcttctgctcctcttccggtagccataatcgccgaggttgatctctacaagttcgatccatgggagctacccgctaaggccgcgtttggggagcaggagtggtatttctttacaccgagggacaggaagtatccgaacggcgcgaggccaaacagggcggccacatcagggtattggaaggctactgggactgataagcctgtgttgacctctggtgggacccaaaaggttggggtgaagaaggctttggttttctatggagggaagcccccaagagggatcaaaaccaattggatcatgcatgaatataggctaactgataacaagcctaacaataggcctcctcctggttgtgacttgggcaacaagaaaaacactctaaggcttgatgattgggtgctgtgccgaatctacaagaagagcaacacgcataggtcacccatggagcatgacagggaagattcaatggatgacatgattggagggattcctccatccatcaacgtgggccacatgagtgcgaggtttcatcatctttcaaagatgacgacagcctacaacaacggtgcattgttggaaaatgatcaccacaacttgttggaagggatgatgataggtaacagcaacggagggatgaacacaactactactactacacctggtcccatgtcatctcacttagggggatccaaggaagagctttcttttgttccaaccatgactcactcttcaaacacttctaagagaacactttcatcactgtattggaacgatgaggatgtggcgggtacctcatcttcgaacaaaaggttcaatttggaattaagtggggacaataataaccatggaagtgttgtgagggatgatcaagagaatggcactgcttcctctattgccactctgcttaatcaactccctcaaaccccttcattgcaccaacaatcaatattggggtcaataggtgatggacttcttagaacaacataccaaataccaggaatgaattggtatgcttagaacaatttcaggtttgttttaattattgatgaacagggagatattgaattactataaagaaggatatatgatatgatcctcgatcagctggtggaaaccctacactattagattgtaatgattttaatgggatattgagattttggttgttaggaatttggaagcagttgttagagtttgatcatttagatgggcctcattatcatccaatgaagttcttcaaccattggagttagctgcaagcaataacaacaccaaaggtcaggccatgggatacttttagttaaactttaatatagctttatacgtatatatagatatttgctttttttattggtatgtaaataaaaaaatggtggtgtgctcttaattaatgtatacaaatattcaaatgagaaaagagatttcaactccgctgttatatgtataccttgatcaattaggatacaaatgagctttgtgtagatcatatactgtagaacaacgatctatttaatatattttaattaaagacaaatg

SEQ ID NO: 7700 - DNA, 1920 bp, Glycine max
tcagctacgtaggccccccccccctgacatgacagtcagtgaagctagaagcttggatagggatatagtggagagtagacttacttttgcaggttttgtggtatttaattgtcccataagatcagattcagccactgttttatctgaattgaaagaatcctcacatgacttagtgatgattaccggtgaccaagctttgacagcttgccatgttgctagccaagttcatattatatcaaaaccaacattaatccttggcccgacacgaaatggtgagggatataattgggtgtcccctgatgagactgaaaacattcactacagtgagaaagaggtcgagtctttatcagaaactcatgatctctgtattgggggtgattgcattgagatgttgcaacagacatcagctcatcttcgggtcattccttatgttaaggtttttgctagagttgctcctgagcaaaaagaacttatcatgaccactttcaaaacggtgggacggttaactttgatgtgtggggatggaaccaatgatgttggagctttgaaacaggcccatgtaggaattgctcttctgaatgcattgcctccaactcaaagtggaaactcctcttcagattcatctaaggaagaaggttcaaaatctggcaagcaaaagaaatctaagcctgctagtgaaggcacttcaaaagccaaagttgcttcaaaatcagattccactagtcactcatctggtaaccgtcatcaggcagctgttgagatgcaacggcagaagcttaaaaagatgatggacgagcttaatgaggagggagatggtcgtgcacccattgtcaagcttggggatgcctcaatggcatctccattcactgctaagcatgcatctgttgctcccaccactgatataattcgtcaaggtaggagtaccctagtgacaaccctccagatgtttaaaattctgggtctcaattgtcttgctactgcatatgtgttgagtgttatgtatctagatggtgtcaagctaggtgacatacaagccacaataagtggtgtcttcactgctgcatttttcctctttatctcacatgcacgccctcttcccactctttctgctgaacgtcctcaccccaacatcttctgtgcttatgttttcctttccctcctgggacaattttctattcacctgcttttcctgatctcgtctgtgaaagaagctgaaaaacacatgccagatgaatgcattgagcctgatgcagattttcatcccaacctggtgaatactgtttcctatatggtgagcatgatgcttcaggtggccacatttgctgtgaactatatgggccatcccttcaaccagagtatttcggaaaacaggccgttccggtatgcacttgttgctgctgttgttttctttactgtgatcacatcagatctcttcagggacttgaatgactggttgaagttagtgccattgccagcgggattaagggataaactattgctttgggcgtttctaatgtttttggtttgctattcgtgggagagactgttgaggtgggccttccctggcaagatcccagcttggaagaagcgacaacggcttgctgtatctaatttagaaaagaaacaggtctaagtagttgaagagatgtgatgaagaaaaacactgacgatgggcattgcaatgatgacttgttcagagacaagacatggtgaattttgttataggttctttattaattatctttctagttcttttcccaatgatggatggggaatttatccgatatcattatttttgggagaaaggtatgaattttagaacacgtgcctccccagatatctgagatgattttgttagcacaggagtttttaattatttaaatgttacgattcattataatcaaaaaaaaaaaaaaagaa

SEQ ID NO: 7701 - DNA, 1664 bp, Glycine max
cggctcgagattatattatccgattcagaattgtgtggactggaaactcctctgtccccaaacaggacgatgaaggaactgggcttggtttcaatgatgctgatggcagagttgttggacgtgatcgtcaacactctaagcaaagcagccatgaagaagggcatgaatgactttgtattcatcatgtactccaatgccttcgctgcatgcctcctccttctcttagccttattcttttataggaaaagaacacttccgccactctcctgtaacacccttggcctattccttgttgttggcatgctcagttgcattaatcagtcgatcaagtttttcggcataggttacagctctccaactttggcctcagcactgtccgatttggtgcccgcctttaccttcatacttgccgtcatcttcaggatggaaaaattagattggaaagctaatagcactctggccaagtccattggcacagtggtatcgatcgctggggcattgttattgtctttgtacaaaggccaagtcatcataaataataatccaccttttaaattgttccctcaaaaacttgtctcatccatgcaatttgactgggtatttggggcactgttgcttgcagctcatagctgttttctctcaataaactacattcttctgacacggatagtgagagaataccctgcagaactggtggtggtactcagtcgcattgcattaacatctatactatctgttcctgctgcactgatttcagtaaaggatctaaaagctttgagactggggtttaatatggagcttatagctattggatgttcagcaatttttgtcttatcctttcgaggtgttatccatatatggatcatggggaagaggggccctgtctatgttgcaatgtttaagccactcgaaattgtcttcgcagtcatcttgggggttacttttcttggggactctctttatattggaagtgtgatcggagctgccataatagttgttggtttttatgctgttatttgggggaaaagtcaagagaaggtggaggaagattgtacagtctgcagctctgagtcatatgataatgaggtccctcttttacagaacaagagaacgggggaataaaatcttcaggaaatgatttatatactttctgcttgtaagcaaagaacgatggcagaaaaatttcaatattcttgtttcctctaaatctgtttccctgggcctgcaagaaatagatattggtcaccgaggacatgaatagaaagattgcataatttgcacaagatattgattttttgggtgccacttattccctacatccaccgagaagggtcagagcggattacaattttctgccattgctgagttgaatgcacacaaatatcaatcagtttgacctttccttctttatttggttcttgtggactttcggatttcacctccagttgttgtatagatcgtctaccaatattatggaatgtgctgtgaaataattaattttagttcttaacaagagaatctacaacaatgcataatttgttatgtatgtgaagtgttgtttttgttatcaattattgtagttattttatgtttattcattttaaaggaattaaaatgcatatgggtgtgtggggtttattgataacaaaaaaaaaaaaaaaaaa

SEQ ID NO: 7702 - DNA, 2205 bp, Glycine max
ggctcgaggatggattccctaatgagggttttgagtttaccgtctgtttgttcaaagcgcttcttaacaacaaaagttgacaggtgtgttactggtctagtggcacaacagcaaactgttggccctttgcagattcccattgctgatgttgctgttacagctcaaacttttgttgatgtgactggaggtgcttgtgccattggtgagcaacccatcaaaggcctgttagaccccaaagcaatggctcggttggctgttggagaagcactaacaaatcttgtatgggcaaaggtcacttccctttctgatgtcaaggctagtggtaactggatgtatgctgccaagcttgatggggaaggagctgacatgtatgatgcagctatatctctatctgaagcaatgattgaacttggcattgctattgatggagggaaagacagcctttctatggcagcccacgccgagagtgaagttgtcaaggctccaggaaatcttgtcatcagtgtttatgttacttgtcctgatataacaaaaacagtgacgccagatttaaaactcaaggatgatggtattttgcttcatattgatttgtcaaaaggtaagaggcggttaggtggatctgctcttgcccaggcgtttgaccaagttgggaatgagtgtcctgatcttgatgatgttccttaccttaaaaaggtctttgaaggtgttcaagaccttctttctgatgaactgatatctgctggtcatgacatcagtgatggtgggctgctagtttgtgccttagagatggcatttgctggtaattgtggacttagtttggactttgcatcgcaaggtaacagccttttccaaacactctatgctgaagagcttgggttagttcttgaggtaagcaagaaaaatctggctttggtagtgaataaattgagcaatgtgggagtttctgctgaaatcattggtcaagtaacagccaatccatcaatagaagttaaggttgatggggagacttatttaactgaaaaaactagtatccttagggacttgtgggaagagaccagttttcagctggaaaagttccaaagattggcatcctgtgtggatatggagaaagaaggactaaaacatcgatatgagccctcatgggaattgtcttttactcccaccttcactgatggaaagcttctgtctgcaactataaaacctaacggctgcgagaagacgacagaagggagcaatggagacagagaaatggctgcagcattttatgctgctggttttgaaccatgggatattaccatgtcagaccttcttaatggaaagatctctttgctagacttccgcggaattgtgtttgttggtggatttagctatgctgacgtgcttgattctgcaaaaggttggtctgctagcataagattcaacgagtccgttttacaacagtttcaggagttttacaagcgtccagacactttcagtctcggtgtatgcaatggatgtcagctaatggctttgttgggatgggtaccgggtccacaagttgggggtgtgcatggtgctggcggcgacctatcacaaccgaggttcattcataatgagtcagggcggtttgagtgccgctttacaagtgtgaccataaaggactcaccggctataatgttcaaagacatggcaggtagcacattgggtatatgggctgctcatggtgagggaagagcttatttcccagatgaaggcgtgttggaccgtatagttcattctgagttggctcctataagatactgtgatgatgctgggaatccaacagaggcctaccctttcaatgtgaatggctctcctttaggggtggcagctatttgttccccagatgggaggcatcttgccatgatgcctcatcctgagcgttgcttcttaatgtggcagttcccatggtatccgaagcagtgggatgtggagaagaaggggcctagtccttggttacgcatgttccagaatgcaagagagtggtgttcctgagatgatcaaatgtttttcttgtcttatctttttctttcttttttccccatataaagcacttgtccttgctttagttgacaacttatccatgtcctccttccataattaatggacaggttactcaataacatacaactagagtcaaattaccagtttaatcggcctttatctaatgcttgttcgctgttcagc

SEQ ID NO: 7703 - DNA, 1601 bp, Glycine max
cccacgcgtccgagcaaattgggcgttctcatggctccactgcttgtcgagttgtgagtatttggccacacggaaagatcaggctttgctttgctttgtgtgagatctgaagaagagaggtatggcaaaaagggtcttcttgtacaaggatttggttccttttggggccatggtgaccatggaatgcctcaacgtagccttgaatactctgttcaaagcagctaccttgagagggatgagttaccatgtctttgttgtttatgcttatgctgttgctgctattgttctcattcctggaccctttatctcccaaaggtgcagatcaagagtgcttcctccgctcagtttccccctactacgcaaaattggtcttctcgggctaataggatcgtgggatacacaggcatcagtttcagttcccccactctctcctcggcgataagcaacttggtgcccgcttttacttttttgcttgccatcattttcaggatggaaaaggtgattgtaagaaatacaacttgtcaagccaaggtattgggtaccatagtatcaataactggagcattcgtagtgaccttctacaaaggaccaccaatcatcattgttcatacaccttccttgtcacttcatcaaccaattaacactctgaattcggtagatcgaagttgggcaattggtggccttctactgacagcagagtatattctggttccattatggtacattgtacaggtgcaaatcatgaaggtgtaccccaatgaactaactgtgatcttcttttacaatttatgtgtaagcatcatggctgcaattgtagctatatttacagagacaaatgcaggagcttggaaaataggactagatacagcattggcttcaatagtttgctctggaatttttggttcatttgtgaacaacgcagttcacacatgggtactacgtataaagggtcctgtctatgtggcaatgttcaagccactctcaattgccatagctgttgccttgggagtcatgttcctgggtgatacactccaccttggaagtctagtgggagccacagtaatatcgatcggattttatacagtaatgtggggaaaagcaaccgaagagaatgtggacgaagatgtccctggccagcaatcaccaccaaccacagagaatgttcctctcttgcaaagctataaaactgatacagctgaaaagaaaatgcatggaagtgtataaatgacaaacaaaactgttgataaatcttaacattattgaaattacacgaatagcaaagcaaatacatggttttgttttcgcccaagctaaccctgtaacgccaatagcaattagcaaagtaggtacccacgcctttagagtgtagaggacatcatatgtaagaaatagttcaagggttcaactgatctcctttcgccaaggaacataaacgaatctttatacaaattagggagcaacctatctacaagtttgtgtacgaacactcacagatgaaaacggagcaacttcgttatctgtcttcccttttcctgtctcttgtaacaagtcatccatattatgatttatagaagctgcgtgattctttaacattaccaaaa

SEQ ID NO: 7704 - DNA, 1637 bp, Glycine max
taggccccccccccgagcaaattgggcgttctcatggctccactgcttgtcgagttgtgagtatttggccacacggaaagatcaggctttgctttgctttgtgtgagatctgaagaagagaggtatggcaaaaagggtcttcttgtacaaggatttggttccttttggggccatggtgaccatggaatgcctcaacgtagccttgaatactctgttcaaagcagctaccttgagagggatgagttaccatgtctttgttgtttatgcttatgctgttgctgctattgttctcattcctggaccctttatctcccaaaggtgcagatcaagagtgcttcctccgctcagtttccccctactacgcaaaattggtcttctcgggctaatagggtgtgcttctcagatcgtgggatacacaggcatcagtttcagttcccccactctctcctcggcgataagcaacttggtgcccgcttttacttttttgcttgccatcattttcaggatggaaaaggtgattgtaagaaatacaacttgtcaagccaaggtattgggtaccatagtatcaataactggagcattcgtagtgaccttctacaaaggaccaccaatcatcattgttcatacaccttccttgtcacttcatcaaccaattaacactctgaattcggtagatcgaagttgggcaattggtggccttctactgacagcagagtatattctggttccattatggtacattgtacaggtgcaaatcatgaaggtgtaccccaatgaactaactgtgatcttcttttacaatttatgtgtaagcatcatggctgcaattgtagctatatttacagagacaaatgcaggagcttggaaaataggactagatacagcattggcttcaatagtttgctctggaatttttggttcatttgtgaacaacgcagttcacacatgggtactacgtataaagggtcctgtctatgtggcaatgttcaagccactctcaattgccatagctgttgccttgggagtcatgttcctgggtgatacactccaccttggaagtctagtgggagccacagtaatatcgatcggattttatacagtaatgtggggaaaagcaaccgaagagaatgtggacgaagatgtccctggccagcaatcaccaccaaccacagagaatgttcctctcttgcaaagctataaaactgatacagctgaaaagaaaatgcatggaagtgtataaatgacaaacaaaactgttgataaatcttaacattattgaaattacacgaatagcaaagcaaatacatggttttgttttcgcccaagctaaccctgtaacgccaatagcaattagcaaagtaggtacccacgcctttagagtgtagaggacatcatatgtaagaaatagttcaagggttcaactgatctcctttcgccaaggaacataaacgaatctttatacaaattagggagcaacctatctacaagtttgtgtacgaacactcacagatgaaaacggagcaacttcgttatctgtcttcccttttcctgtctcttgtaacaagtcatccatattatgatttatagaagctgcgtgattctttaacattaaaaaaaaaaaaaaagggcggccgccg

SEQ ID NO: 7705 - DNA, 1574 bp, Glycine max
  misc_feature (53)..(56): n is a, c, g, or t
  misc_feature (58)..(59): n is a, c, g, or t
  misc_feature (66)..(68): n is a, c, g, or t
  misc_feature (107)..(108): n is a, c, g, or t
tcagctacgtaggccccccccccccccccacccgactcacctgagagaagatnnnncnntactatnnntggggttggagacgtgtctgcagggtggtcaaattctcnntggcgctcattgaaggttcaatgggatgaaccagcaacaattccaaggccagatagagtttcttgttgggagatagagccttttgtagcttctactgctttgaatgtcacacaaccagcagttaagggtaaaaggtctaggcctgctgatgttttatcttctgctgcttcaggtttctggtatcatggttcttccaatgagcttagtcaattaggtgctgctgctgaggtccaaagcaaggaaaatcaggttgttccatgctctctgaggcagaaagacattattaatagcaatcctattaatgctaataactctagcatcagtactagagtccgaatggaaggagtatggccttcttcaccacatttgaatgccactccaaaccttttttctgatcccaataacaacaacagcaacaacggcgtttcggcacgatcactgatctctggttatcctaatgttccatctagatcaagtgatggtcccacatgcgacggtgtggaagatgggaaaaagactgagaactcccttgattgctggttatttggagttaatttgactaacaattgtagcaacgttattactactccttcagagagggaacagagaggtccaagctcaagtgttgttcttagtggtcccaaagaatctattcctgcagctgcatgtgaaactgagagggttcagactcccaactattcactgtccaacaaagggcagaagcaaattatttctgaggcatcaccaaatcagtggcagaacaagcaggccactgtactatccatgaggacgcggactaaggtgcaaatgcaaggtgttgctgttggtcgtgcgtttgacttgaccacattgagtggctatgatgatctcatagatgaactcgagaaattgtttgagatcagaggagagttgcattcacaagacaaatgggctgttactttcacggatgatgaaaatgacatgatgctcgtgggtgatgatccatggccggagttctgcaacatggtgaagaggattttcatttgttcacgggaggacttgaagaagatgaaatgctgcaagctacctgcttcttcatcagaggttgaagaggttctattgagtccagattcacagaatagggatgagactcaacagtctcacatgccttagacaacttagttttttttttttttttcctttttttttggggtctgggaagggaaatatatctgatggcataggttgctccattttaatgaactttcacagcaactgcagattagtgggctagtttaagtggacttattatataatatgaaagcaataggtagtgcagttggattttaggtacttatatttgtgaatatcttctttttttttaatcctagagtgccatcagcatgtaaacaagtatgattttccctctctaatggattgtctgtctgtgatgtgtcggtttgttccaaaaaaaaaaaaaaaaaaaa

SEQ ID NO: 7706 - DNA, 1879 bp, Glycine max
cccccccaataatcagaccataaagtttctgccgcgttcgccccccccccccaaaaatggccttaacacattcaacatctttcccacgaatgtttcagagggctggttcagctcagtttagaaggcctctccttcatttggtgtccactcaagaatcaaggcacaggtacctcacccaatgtgttccccttcacaaagcagcactggaaggagactggaaagaggccaagaaaatccttgaccaagacccggcgctgctgaactccgccataacaaaaggatgggcaacagtgctccacattgcggtcggagcaaaccacgaaagcttcgtggaggagttgctgaaactaatgtcgcgtgaagacttagaactgcaagatatcaagggtaacactgcattctgctttgctgcagcggttggaaacgtgcacattgctgagagaatgcgcagaaaaaatgcatcattgccaatgataaggggtggagaaggagtcactcctcttcacttggctgtgttacaaggaagaagtgaaatggcttggtatctgtttgataaaactagagaaacactgtacgatgatgattggtttcaagtgtttctcatttgtgtaaactctcgactttatgaactggccctggaaatgctcaatcagaaggaatcgctagcttttgctcggggtgataacgatgagacagctttgcatgttttggctcgaaagcctttggattgtggttgccgaagtccgctacgatatccaaaacacgtcctgcatttgtgcaagaacatgaaggaccctccggtcctcaatctgccacgtcgccccccccccccctttcttaccctcgatgactctaagatgatgactgcaattagagaaccatctcaagtaacatttattgccgcagaagttggcaatttcgagtttctatctgtgattatgagcacttatccggatttgatttgggaatcgaatacgatgggtcagagtataattcacgttgctgccttgcaccgccacgctagcatattcaatttgatacacgaaattggcccaagcaaagatctcctgttaacattttgggatgatgaaggcagcacgttactccattctgtcgcagaaatagcaccaacagatcgacttaatgtagtttctggagcagctcttcaaatgatgcttgagttgacatggtttgaggaggtaaaaaagaacatgcaaccatcatatatagagaggccaaatcatgaaggaattgttcctagagaactattcaccgagaagcataaggagttgttgaaaaagggagaatcttggatgaagcgaacagcaagttcttgcatggttgtttcaaccctaattgccacaggagtgttttctgccgccttcagcgtcccaggtggtaccaaagacgattcaggatctcccaattatttgaagaaacatttgttcacggtatttgcaatatcagatgccttggcattaactctttctaccgcctcaaccctaattttcttgtccatactcatctcaagatatgctgaggaagattttcttaggtcattgccattcaagttgatatttggactagtgtcactatttctctcaatagtcagcatgatgggagcattcagtagtgctttcttcataacatattaccatgctaaaacgtgggttgttcctatcaccattgctgtatttgtgttgttcccaatattgttatttatatatctacagtttcgtctctggcacgacatagtgtattctcactacatgtgtggttctttgtttagaccaaagaaacgcatgattcactagaaacattgagtacaagctcaataattattttttttttcttttaaaaaaaaaaaaaaaatttaaaa

SEQ ID NO: 7707 - DNA, 638 bp, Glycine max
gtcccagcatgtatgtgttgctccaaatgagaactctccaaggagtggcaagggaggaaaaattaagagatgatttttttgagaaatgagtgtctcttaaacattgaaaaataatagatgtgatgcatgcatagccttctgtgttatatttggccactaagataggaaaatatacactgtttggagttaggttcagatgaaggtgattatgtgtatagattatggagtgtgctgaacaaaaaatgattttaggcgatggagaacttttcccaagatgctggaccaacaagctctactatttctgtagatgcatggaaatgaaaggagatgcagctggtcgacaagctaggattaagattcactatgccagtggtttgttttactagttgctttctcatttttggaacatacactgatttgtatgttgttaaagatgattgtatgtgagccctttgcttttgctatcagttataaaattcaaagagccatgtggcaaaacttttttctaacaaaaaaaaaaaaaaaaaaaaaaaaaaaaaaaaaagggcgtagtttgtttgtggcattgttattgtgacatgaactttgtccatagcaatcaatttagaagttttagatgtgattgttgatactcgatc

SEQ ID NO: 7708 - DNA, 1648 bp, Glycine max
  misc_feature (1613)..(1613): n is a, c, g, or t
ggctcgagacactacccactcaactcactccaaccatggcgtcgtggtggtgctcctctccctccgccaccctcaccgtctccaccaccaccacccgccacttctctctcctttctcacacttcccaatttcgcatccaaaccctcacattcccaccttcctcctttactcgcttcaccaccgctccaccttcgctccgatttagggttccatgctccaacaaaaccgccttcgaaaccgagcttccggaggacggcgtggattgcgtgggaacaggccaagacgtggaatgcctcgttaacacggaagagaaacaatcggaaccatcatcatcgtcatcatcatcatcatcatcgtcatcgatgctgtgtctcgcggaagcgctgtgggaaggggcggtgttggtgtcgccgttcttcttctggggcacggccatggtggcgatgaaggaagtgcttcccaaatgcggtcctttcttcgtttccgcttttcgcctcattccggcggggtttcttctcgtcgcattcgccgcttccagaggaagaactctcccctctggcttcaacgcttggctttccatcaccctcttcgctctcgtcgatgccgcgtgctttcagggttttcttgcagaagggttgcaaaggacttcagctggtttgggcagcgttataattgattcgcagcctttgactgtggctgtacttgcggctttgttatttggtgagtcaatcggagttgttggagctgctgggcttgtacttggtgtcataggacttgtactgctcgagttacctgccctatcatttgatgaaagcaacttctcactatggggaagtggtgagtggtggatgctacttgcagctcagagtatggcaattggcacggtcatggtccggtgggtctccaagtactctgaccctgtcatggctactggatggcatatggttattggtggtctcccacttgtgctattcgcagttcttaacaatgaccccgcagtgagtttgagtctcaaagagtacagttcgactgatatattggcactcctctacacatccatttttggaagcgcagtcagctatggtgtgttcttttatagtgcaactaaaggtagcttgaccaagctcagttcacttacgtttttgaccccaatgtttgcttcaatttttgggtttctctatcttggtgagaccttctctcctgtacaactagttggggccttagtcactgtggctggaatatacatggttaacttcagaagcacatctgaatgaattgtcatttttgcctggttctttcaacctaatccaatggaaaacaactctgggaattagatgttttccatgaactcaaattgggaacgataaaagcaagtttggacatggagaggagaaattgcagtgatatacaacttggagcccttgtgctcatgctagtgtaaatacaattttgttttgttagttaatttaggcctcgagcctcttcctatgcaatatataccaaaaacttgaagttacctgggcagaacacaagccttatatcggaataaattgtttccgtaaaggtttttttgttgtataaaatggcttaagtgattatgactgaacaaaatngtatatattatgactgttgatggcaagtttcgagt

SEQ ID NO: 7709 - DNA, 1409 bp, Glycine max
cacacacacaaaacagaacacaacacatacaccggccccgggggcggacgcgtgggggcaacaaaaaacacagatccatcacacacatgaacaattgatctttgtcctttgtatataatttgattctaattttttggcactaagagagccactcaaggctctgggatgtactatacgccattcggggttctgattttcggcggagagaaggttcaagagacccagtgggagaaggagcgataagagagagcatggctggtaaggttttgaaagaaacaaagtcgctgtcggcggcggaggtggcggtggcggaggcggagacggcggtgtcgtcggtgaagtgctgctgctgcgggctgatggaggagtgcacgcacgcgtacattgggcgcgtgagggagcgctacgggggtcgatggatatgtggactgtgttcggaggctgtgaaggaagagagggagagagagaagattgtgataacaatggatgaggctctgaagcgacacatgaggttctgccaacagttcaagtcttctggtcctccagataacaccaatgaggatttcattctggcagtgaaacagatcctctttcgcactttggattctcccaggaaagaccgtttcatttgtcgaccacttgggagatctcacagctgtttctcaaccatgcaaggaactccaacacagggggagacagactgatctgttttgaacatgattgtctcttttagaaaatatttgtgatatctaaaagaagaaagagtgacccatcacatattcattagtacaaatcttagatacagttcttttagtggttatagtattattctttgttataattgaagtttcacctcgacaattggagttttactaattatcaaggtgaaatttttgttctgatcagagagtaatagtggtaacccttgaggtactctatctaagttttgtatagataaatattcgagtgcaaataaaatggagacttattgaataattgaagataatgttaagaataaacaatgtagttcatgatccacaagcattgtgtgtgtgagtcaaggttgagttactaagctcagttgtgtgtcttgttttactgtgttgtggttagtcaggtaggaatcgttgggttatggtttaggttaaggtgttgagttgttggttgtttttgtttgacatttgggattgagtggatgattgttgagaggagtcttccttccttgacttcaatctaaatgtcacttttggttactagtaatggaatttcagtttttctatggttggcccaaaaaaaaaaaaaaaaaaaaaaaaaaaaaaaaaaaaaaaaaaaaaaaaaaaaaaaaaaaaaaaaaaaaaaaaaaaattaaaaaaaaaaaaaaaaaaaaaaaaagaaaaaaaaaaaaaaaa

SEQ ID NO: 7710 - DNA, 778 bp, Glycine max
atctatatttatccacacacaacacacaacacacacctttgcctctgctccgcataactcctcacacacacacacaaaacagaacacaacacatacacatacacatgttgttgatgagtggaggcaacaaaaaacacagatccatcacacacatgaacaattgatctttgtcctttgtatataatttgattctaatttttggcactaagagagccactcaaggctctgggatgtactatacgccattcggggttctgattttcggcggagagaaggttcaagagacccagtgggagaaggagcgataagtaattcatattccattatctccatttctagatccttccattaactctcataggatcctccaatttcaattcaatcccttccgatatttcggagagagcatggctggtaaggttttgaaagaaacaaagtcgctgtcggcggcggatgaaacaatatctatctgatgagaaatcttaaataaattttcatattatttgactcgtgtatatgaaagaagatcttgtaagaaatgctaaatagatagatttctcagtattaaggatgtctaattcaattaattaattgagtaaaatactcaagtttgatttcttctaataaaagagaaataatctttgactctggcttgtgaagtatgtttattatcatcgttttttgtcattaaattcctaaattaaacaaataacatgaaaattccttgtacctaattaatataaggattttttgttatacaaattttgtgattgttgat

SEQ ID NO: 7711 - DNA, 1356 bp, Glycine max
ctcgagccgctcgagccgtcccctaataaacaaagaccaaaccaaccctttttatttgaaagcttgtaaaggggcacacccctttctctctcctccttccccctttaatttccttttccttcttaattgtcttaatttcccttgtattctggtaatctagctaaccctttttatttccattagccacgatatcatcaccatcgccaccttctaggtgggatccagggtcaacaatatcacactcagcacagttaccaactccaaatctcaagaaatggatagtaagttcagaaaaaacaaccgcaactcatataccagtgaacaagatcaagacactgatcatgatgtagctcaagaaaacattgccgagtcccctccttcttccactgtgttcaacatcgatggcttagtcccatcccccaccccttcatcaaagagaaggagggcaatacagaaaagggtggtgcaaatcccaatgaaggagacagaagggtgtaggctaaaaggagagagcaacaccccaccctcggattcatgggcttggagaaagtatggacagaaacccatcaagggttccccttatcccagagggtactacaggtgtagcagttccaagggctgtccggcacggaaacaagtggaaaggagctgcgtggaccccacaatgctagtcgtcacttactcctccgaccacaaccatccatggccaccttctagaaaccacgccaggcccaccaagaagcctgaaccggttccggacccggtccaacccgaaccggaggagaagttcgcggacctgggcggggacgactccatgataaccaccgcggaggaattgggctggctgggggagatggaaacgacgtcatccacggtgctcgaaagccccattatggccacgggctaccacgctgacgtggcgctgattccgatgagggaggaggacgagtcgctcttcgccgacctcggggagctgccggagtgctcggtggtattccggcaggggctgctgacggagcggcggcggtacaccgcgccgtggtgtgggaccacaagttgagggcctttttggtcaccaaaaaaaaaaaagattgttgaaaaactagaggtgcctgtttgacacgttcttcgtgcggcacaagagaaaaagatagcagcattattttttaaaattaaaaatattaatttatgttattttagtttgttgagagtagaaaatggaaaagagaaaataggaaaagtagggttggggatgaagaagaataaatggaagtttggggggaggagtgagagaatatgtgtatgttgagaagtggttgtaattagcgtaactttgaacagcttgcccaacaagat

SEQ ID NO: 7712 - DNA, 1512 bp, Glycine max
tcgaggcggccgggccggaatttgctctcacgtcccctaataaacaaagacatagccaatctgtcaacacaggaaattcggctcgagaaaggggcaccccaccttctctctcctcctccccctttaatttccttctccttaattgtcttaatttccttgtattctggtataatctagctaaccctttttttccattagccatggtcatcaccatcgccaccttctaggtgggatccagggctcaatatataatatcacactcaacacagttaccagctccaaatctcaacaaatggatagcaagttcagaaaaaagaaccgcaacgttaactcatataccagtgaacaagatcaagacactgatatagctcaagaaaaccttgccgagtcccctccttcttccactgtgttcaacatcgatggcttagtcccctcccccacttcctcatcaaagagaaggagggcaatacagaaaagggtggtgcaaatcccaatgaaggagacagaagggtgtaggctaaaaggagagagcaacaccccaccctcggattcatgggcatggagaaagtacggccagaaacccatcaagggttccccttatcccagagggtactacaggtgtagcagttcgaaggggtgtccggcacggaaacaagtggaaaggagctgcgtggaccccacgatgctagtcgtcacttactcctccgaccacaaccatccctggccaccttctagaaaccacgccaggcccaccaaaaaacctgaaccggttccggacccggtcgaaccggaggagaagttcgcggacgagtccatgataacaaccgcggaagaattggggtggctgggggagatggaagcgacgtcgtccacggttctcgaaagcccgtttatggctacgacgtaccatgctgacgtggcgctgattccgatgagggaggaggacgagtcgctcttcgccgacctcggagagctgccggagtgctcggtagtgttccggcaggggctgctggcggagcggcggcggtacacggcgccgtggtgtgggaccacaagttgagggcaaaaaagtcaacacgaaaagaaaaaaagtagaaaaactagaggtgcctgttagacgcgttcttcgtgcgccacaagagaaaaagataccagcatttttttcctttttagtattgagatattttttattttttttgttttaccgttgttaagacattaattaaaaattaaaagttattgtaaaaattataaaaatattcaaaagaagttataaacaatattattttatgtattttaataaaaaaaatatttttttaatttttttgactaatatcctaaatagcggtagactttacctatattttactttattgagagtagaaaatggaaaagaaaaaaaggaaaataggagaagtagggttgaagaataaaagggcagttagggaagtggttgtaattagcgtaactttccgcgtccatttcaacaacttgcattgcacaatgtttgac

SEQ ID NO: 7713 - DNA, 1676 bp, Glycine max
attgggtttggggaggtcgacggagaaaagaagagaatagagaatggtcaaagtaaaaataaaatgaaggaattaaaaatggaaggcgtgcttctcccacaactccgcgtacgcgcagccttttcaccaaattgtcgaccaaccatcttcgttatttgcaaatttcgtttcctttgaattacaatttacaagacaaggaaggcagcctcggatgttgttgttgtcgtcgtcgtgttcttaggttttgttctgagacgcagtttttcattcttctaatggcccagtccttcggtcagaccgagatcaactgggacaagctagataaaactagattctatgtcgtaggagctggactctttacaggtgtttcggtggcactttatcccgtttctgttgtgaaaactaggctgcaggttgccacaaaggatgctgtagagagaaatgtgttttctgttgcaaaaggactacttaaaacagacggcatccctggtttgtatagagggtttggcacagttatcactggtgcaattcctgccagaatcatattcctctccactctagagaccacaaaggtgactgccttcagaatgcttgagccatttagactatctgaaacttctcaggctgccattgcaaatggagttgcaggcatgacatcatcgctttttgctcaatctgtgtttgtaccaattgatgtggtcagccaaaagttgatggtgcaaggatactcaggccattcccaatatagtgggggtctggatgttgttcgcaaggttttaaggactgacggcatccggggattgtatcgagggtttggtctgtctgttattacttatgcacctgccagtgcagtatggtgggcaagttatggttcaagccaacgcttcatttggagattcctggatcatggtgccaaatatgatgaagtcgcacctagtatgcagaaaattatgttagttcaggctactggagggattattgctggtgcaacttcatcctgcattacaaccccattggataccatcaagacacgattacaggtaatgggacatgaaaatagaagttctataaaacaagttgccaaagatttaatcaatgaagatggttggagaggcttttatagagggtttggtccaagattttttagcatgtcagcatggggcacttcaatgatattgacttatgagtatctgaaacgtgtatgctcaaaagatgaatagatgcaattagtctgaaagcttgtatttaactgatcgatttaccacgattaggatgatgatgttgggtttgcacctttagcattggagttgctgttcaacatttatcactctgactcaagggttaaacttttagcagtacagctatgctgacagattatatgaaaacactcggctggatatgaatatggcagacttccttctagaaaataaattgcatcattatttttttataattctattggatttggcgcattcttttgtagcattgctatggatactgtattatcatgtaagggaagggaatagattgctattaaatgcattgtaaagagatgtgaagaataaatttgaaattctaaatcttatctcttttgttccaaaaagggaaagttattgcagatatttttgtttaaaaattgttaaattttacatttctcaaatgataataattttatt

SEQ ID NO: 7714 - DNA, 2749 bp, Glycine max
tgcagctatgtcgtgaaaggaagaagtttgtgaggcaagcacttgatgggcgttgctcattagcagctgctcatgtttcatacattcaatcactgaaaaatacaggaacagctctgagaaaatttacagaacctgaaggaccaattgagccttctctgtacactactgcaacaccagaacaaccacttgctttaactgaaaggaccctctcattctcttcagcatctgtgtcacatcacatagatgcagctgaacacgaaaatttctctccaactccctcccttcctagttcttctagcaagttcagagcaaatcatatgaaacatagcactatttcttccaagaaagttgaggaaaaaccacctgtacctgttataggaatagtaacatcatcaggtactactactcagaataccagtgtaatgtctggaacagcagcatttgaagattcttctcttccagctggaactccacagtgggatttctttggtctctttcaccccattgaccatcaattttcttttcaagatgggaagggtatgcatcaagatatagggaatgctgatgacatacaaagactaagggaggaggagggaattcctgagttggaagacgacgaagagaaggcttcatctcatggaagggaacactctagggactctgaagacgaatttgatgaagagcctgccgcagaaactctagtccaaagatttgaaaatctaaatagatctaacagtcatgttcaagccaattttgaacctgccacaactaagcctctcagagggcattcagcttctgaagttgaattagtgaatggagaaaaggggaactctgcttatttatctccattaaagacagcacctatgccagctttgcctccacctgaaacaaataaaccaatggagaaggaaagtcgtaatgaaaataaagtcacccctaagaatttcttttcaagcgtgagagatattgaattgctctttattaaagcttcagaatctggccaagaggttccaaagatgcttgaagcaaacaaagttcactttcgtccaatattccaaggaaaagaaaatggttctctggtgtcctcgtttttgaaggtatgtttctcatgtggggaggacccaagccaagttccagaagaacctgctcaaaactcggttaagtacttaacttggcataggacggtgtcatctcgatcctcctcatccagaaaccctttaggagcaaactcaattgacaatgctgaggaccatgcaaataatctctttgataattcttgtatgatctccggaagtcatgcatcaaccttggataggctatatgcttgggaaaggaaactctatgatgaagtgaaggctagtgagatagtcagaaaggaatatgacatgaagtgtaaattcttaaggcaactggaatcaaaaggagaaaagacctctacagttgataaaactcgtgctaaagtcaaggatctgcactcaagaatcatagtttcaattcataggataaactctatatcaaagagggttgcggagttacgagacaaagagcttcagccacaacttgaggagttgattgaagggttgaatcggatgtgggaagtgatgcatgaatgccacaaacttcagtttcagataatgtcggcagcatataacaacagccatgctagaatcaccatgcattcagaattacgtagacagattacttcctatcttgaaaatgaactccaatttctatcatcaagctttaccaagtggattggagctcagaaattctatctggaggctataaatgggtggcttctcaaatgtgttcgtcatgaagaaaaatcatccaagagaaaaaggaggtctcaatttgaccttagctattatgatcctccaatatatgtcacatgtgcggtctggttggataaacttagtgccttacctgtaaaggatgtagctgattcgattaagagtttggcgacagatactgcccagttcttaccacaccaggacaagaaccaaggaaaaggtgctcatcctcatatgtcaacatggaaggctgatattggtggcgaatcagcagatggtttattgagagatgacatatcagaggactgggttgcaggtcttgatcaatttcgacgaagcttgattcgatttcttagtcaattaaataatttgtctggttgttctgtcaaaatgtacacagaacttcgacaagccattcagaaagtcaaaaattaccagcgtttgaattctcagtctcaaaatggtcatttgaattctcagtctcaagatggtcatccgaattccgaatctcaaagttgatccatcagagttacaatctcaagtggtttaggctgaaaacaaacatccacacgataagagaattgcgatgaaacattgtggaattgcagaattatagcattgtgttgagcatacaagtccactggatgtagcatttgtacatggtaggatgtaataaagtcattacagattgccacacttatttgttcatttagttctaagaatagaagggagctgatagattgcactagagagactatgagtgcatggttaaggactcagtaaaagctgtaagtactaggttctgatggtgaagaaatttgggtgcaatttttttgctaataaagggtttgtaccaggacttatactcccctccttgattttctttgcttgtgccattttttcatttacgttatgtgtatataattattgattaataatattgtttgaattttata

SEQ ID NO: 7715 - DNA, 1965 bp, Glycine max
gggccgcattcccgcttggacctcagttaatcctcagatggcagtggaaaatatcaaagtccacgaagagtccaacgttgcccctccaccatcatcaacacaatcactatccctccctttcactttgtatgacactttgttcctcaggttcccttccattgactggatcttcttctattccctcaatgctcaacaatcagaaccttctttcttctatgccaatgtcattccaaagctcaaagcctctctctctcacaccctccaacactaccctcctctcgctggcaacattctttggccttctgattccacaattccaatcatcagttacacccctggtgatgccgtttccgtcgttgttgctgagtccaatgctgaattcaaccacttcatagattactcagtgccccatgaagcaacagagtctcgttttttagtaccccacttggaatcctcggattctcgtgcttctgccctagctcttcagatcactcttttccccaacaaaggcttcagcattggcatcagcatccaccatgctgctgttgatggaagatcttccaccatgttcatcaaggcttgggcttctctgtgccaacaaattattatgaacgatgaaacaacatcacaaagtgtggtggtgccatctttggtgccggagttggagccttcctttgacagaacactcatcaaagacccgggaaattggaaccgcttcttgttagcaaaatggtgccctaatattgctaatggaaacagtgatggtgatgataatgggaagcgaaccgtgaagattctaccttccccaccaagactcaaggaagcgttttcagccacgtcagtgattaaaccaacaattgaggaagcagttagagccacgtttgttctcacacgagaggatttggagaagataaagaaaagggtcttctccaagtgggaccaagtgaaagacccagaaccagaaccagaatcagaatcagaatcaaaatcaacggttaattcttcttcaaagccaccaactttatcatcctttgttcttgcatgtgcatattctgttgtgtgtattgcaaaagcggttcacggagttgaaaaggagaagcaaaagtttggtttctggttcccggtggattatagggctaggttagagcctccaatccctgatacctattttggaaactgtgtgtggagccacttggtggatgcagaacccttggacttcataaaggaagaagggctcgtccttgttgcaaaaagcattaacagaaaagtgaagaccttacacaaggaagaagttttcggtaaatcgtcttctcggttcatggctttggctaaagaaggagctgaaatgttgggagtgtcgatgtctaacaaatttatggtttatgagactgattttggttgggggaagcctgctaaggtggacattataaatttggatagggcttcgaatttgaccatggggttgttggacagcaaggatggggatggaggtgttgaagtggggctcgttatgcatcagaaggtgatggatctctttggtactatttttcatggaggactgaaagatgagtgatggattcggagctcttgtttgttaattaattcacctgagatgtgaaacattgcatctgagttcggtttatttaagttataaatgcttttgaaggcttctttgtcgaaaatatagagtttttctggtagaaaagcttttaaaaaactccaagaggaaggttgtgagtttctatttcctgtttaaggtggaattgttctttcttttgtgactgtatttaaaggtttttgtttacattaattttgtccttttagtattgtaattgtagagtcatgtgtagtataataattatgagttgctctattataataaatagagtaccaactcacgtagcttgtgtacgtgttaaaataatatattcaacctcctctgttttgaagtcaaaaaaaaaaaaa

SEQ ID NO: 7716 - DNA, 665 bp, Glycine max
  misc_feature (75)..(75): n is a, c, g, or t
  misc_feature (77)..(77): n is a, c, g, or t
  misc_feature (79)..(79): n is a, c, g, or t
  misc_feature (81)..(81): n is a, c, g, or t
cagtggctgagggccttccgtcccctggttttcatgataaatgtaataatcagaaaagttctgatgttaattttnanananaatgaacaaattgggaggatttgtgaagctttgccaaatgaagatttaaaaattgcagagcaaccagtcttggagttaaacacatcaatttctgatacttcgatggaggacaaacgggaaactgatgcacttgaacttgatgagatgaaaatggaagatgattccactgctgcaaaacatttattgccagatgttataatgaaagataaaaggcttagtgaagtgagcactgattctgatcagtttgcctcaggtggattgagagtgaagcgaaggacgcctcagggactacctttattccccttcaggcgattgctgaatccaacgccttttaagaagaaaggtaaaacaagcaagagcagaactaagctcaagtaattttttttcgggattatcattgttacatggcttatatgtgagctaattctttgtaacgtctattaatactagcatataatgttagtaaaattttataattttatatatcttgttatgtaatatggaaaattatatttgattgtgatatgtttatatcacaattcagtaagaaattctaaattagtgtcaaaaaaaaaaaaaaaaaa

SEQ ID NO: 7717 - DNA, 1420 bp, Glycine max
cactcatgaaaaattgctgaatggcattctttcatgtcaacaaatcagtacgatgtaactgcttgaagcagtccttgtattaacttgatgtgactggagagttcttctatagtgctgttttctgttttctctttctcgaaatgttatctttcactcatgaatctttcctctcaaatcttcattttgttataatagaaaaacattttatttgctatacttggttctttctacagccctggaacatctgtagcaactagtggagtattgttgggtctaattcttcttggaagagcagcttttgttttccccttatccttcatatccaacttggctaaaaaatcaccaaatgagaaaatcagcttcagacagcaagtatggttaaatatttgtcagtgagtgccctttttcagatttcttgtgttactaccaagttttactgataggtttctcgttgtttctcaattctaggtgatcatttggtgggctggccttatgagaggtgctgtttcaatcgcacttgcagctcgtcagttcaccatgtcggggcacacttcactaagaagcaatgcaatcatgatcacaagcaccatcactgttgtgcttttcagcacagtggtgtttggtctgttgactaagccactaataaggcttttactgccccatactccacatcataaagaatcaagcatcacgataaccacagatccatctactccaagtccaaaatcagtcactgtcccacttcttgggagtgcccaagaatctgaagtcgatattgatggccatgatattcatcgtccaagcagcatccgtgctttactttccactccaacacacactgttcatcgcttgtggcgtaagtttgatgatgcattcatgcgtcctgtttttggtggcaggggttttgttcctatagaacctggctcaccaactgaacgtaatggccatcaatggcgttgagaaaaaagccaagaaatatgtaatttgtttgtaaactgcataagttttgtggagtgagcaatgcgtgtataagaatcctgtcctgagattttgtttagctctttgggtagtgagaacgctgtgcaacaccataagcatctcaactcatctctacgtcttccgtaaaatgtaatatttgattattagatttcttgtactaaaagtttgaatagctaaagctaaattatttttatttttttcaaagaaaaaaaaaaaaaaaaaatcgtatgctgcttctgcctgtaagagatgaatttttagagcacctgattaccagcaaacatctcacaatcacattcttatatgtgcaaacatgatagtgcacattaactatgaatcatgacattgcagaattggcaaaatttattctaaataaagagcttccaaaggctcatcattgtaattaaaaaaaaaaaaaaaa

SEQ ID NO: 7718 - DNA, 1959 bp, Glycine max
aattcggctcgcggttctgttgtttcaaaattgcaaacgttatccacctcagaccatgcctccgtggtctccatgaacttatttgtggcacttctttgtggttgtattgtccttggccatcttcttgaggagaatcggtggatgaacgagtctatcactgctcttttgattggtgtttgcactggcgtagtcattttgctgtttagtggtggcaaaagctcacatattcttgttttcagtgaagatcttttctttatataccttctgccgcctataatattcaatgccgggtttcaggtgaaaaagaagcagttttttgttaacttcatgaccatcatgttgtttggtgctattggcacattaatatcttgtaccatcataactttgggtgccacacaaatttttaagaggttggatgttggtcctctggaattaggggatttcctagcaattggtgcaatatttgctgcaacggattctgtttgcacattgcaggtgctaaatcaggatgagacacctttgctgtacagtcttgtatttggggagggtgttgtgaatgatgctacatcagtggtgcttttcaatgcaatccaaagctttgacctcaaccaaatcgacccttcaattgctgggcactttttgggaaatttcttgtatctatttattgcaagcacaatgcttggagtgttgacaggtctacttagtgcttacattattaaaaagctgtacattggcaggcactctacagatcgcgaggttgctcttatgatgttaatggcatacctctcctacatgcttgctgaattgtcctatctgagtggcattctcactgtattcttttgtgggattgtcatgtctcattatacctggcataatgtgactgagagttcaagaatcactaccaagcattcttttgcaaccttgtcttttgttgctgagatctttatcttcctttatgttggtatggatgccttggacattgaaaaatggaaatttgtcagtgatagccctggaacatctgtagcaactagttcagtattgttgggtctaattcttcttggaagagcagcttttgttttccccttatccttcatatccaacttggctaaaaaatcaccaaatgagaaaatcagcttcagacagcaagtgatcatttggtgggctggccttatgagaggtgctgtttcaatcgcacttgcatataatcagttcaccatgtcggggcacacttcactgcgaagcaatgcaatcatgatcacaagcaccatcactgttgtgcttttcagcacagtggtgtttggtctgttgactaagccactcataaggcttttactgccccatactccacatcataaagaatcaagcatcacgataatcacagatccatctactccaagtccaaaatcagtcactatcccacttcttgggagtgcccaagaatctgaagttgatattgatggccatgatattcatcgtccaagcagtattcgtgccttgcttacgactccaacacacactgttcatcgtttgtggcgtaagtttgatgatgcattcatgcgtcctgtttttggtggcaggggttttgttcctgtagaacctggctcaccaactgaacgtaatggccatcaatggcgttgagagaaaaaaagccaagaaatttgtaatttgtattgtaaactgcataagttttgtggagatcaagcaatgcgtgtataagaatccggtcctgagattttgcttagctctttgggtagtgagaagtgagaaggctgtgcaatgcaccataagcatctcaactcatgtctgcgttttccgtaaaatgtaatatttgattattagatttcttgtactaaaagtttgaataactaaagctaaattttttttccaagttgtatttgttgggtttatggtatgctgcttttgcctgtaaaagatgaatttttagtgcccttgattact

SEQ ID NO: 7719 - DNA, 2115 bp, Glycine max
  misc_feature (16)..(17): n is a, c, g, or t
tcgagtacctacgtanngcccctttcaagcgcccccaccatagttggtgttagtcttggtgtagtgtagctagggagggatatatatctgagtaagatggcatcagagcttgaattgcccccaggcttcagattccatccaacggacgaggagctggtgttgcactatctctgccgcaaatgcgcgtcgcagccaatcgccgttcccatcatcgccgaaatcgacctctacaaatacgacccctgggacttacccggattggctacttatggagagaaagagtggtacttcttttcaccacgggaccggaaatacccaaacggttcgaggccgaaccgggcggctggcaccggttactggaaggcaaccggggcggataagcccattggtcagcccaaaccggttgggattaaaaaagctttggtgttttacgcagggaaagctcctaaaggggacaaaagcaattggatcatgcacgagtatcgtctcgcagacgtagatcgctccgttcgcaaaaagaacaccctaagggtatatacactccgtacttctttctagttcaagattattgctcgaaattacgactttgtccctacgctctcatcggctgaggataagtccaggattttggtggaaaccatgcaaaatgtatggtcgtaatatgttatcatgtgaaaactaccgcgcggaaccttcactagttgaagacttgccagcatgtggtctgggcttgggcccaagaaacttagccatcacattagatccaataaaaaaacaataattgatgcggaaagaaataaatcttctgccaatcgcaattatcactttccatttttagaaaactattccttctttatctctctcacctgcctccgattgcaatacttataataataaatgaaaatgaagaaataatctgacggtggttgtggtcccccccctttttttgtcgcagttggatgattgggtgctttgccgtatttacaacaagaagggcacgatcgagaaactgcaaccaagcagcgatgttgctcatagccgaaatatcgaatcctcggagatcgaagacaggaagccggagattctgaaaagcggaggaggttgtcttccgccgcctgtgccggtgcctgcgccgccgcaagcgacggcgaagacggattacatgtacttcgacccgtcggattcaatcccgaagctgcacacggactcgagctgttcggagcaggtggtatcgccggaattcgcgagcgaggtgcaaagcgagcccaagtggaacgagtgggagaaaagcctcgaatttccatttaattacgtggatgccactctcaacaacagcttcatggcccaattccagggcaataatcagatgttgtcgccgctgcaggacatgttcatgtactggcccaacaagtccttttgagcacatcatgatggttttaaattacgatccgcaattgctcttaagattttctgactcaccatgcgaccacaatcgtaatttaaaaccatgtcacataaaatccacgcgcgccgcccattcgcatttgcacggtagcacgagactcaaggtccatgagtgtgcctgtgcgaccacacacatacgattattgatcaagttagcttagctaggccaaagtaagaaagaaagaaacattgaagctggaaacgcatgtgttggctccaccgtttgctttggtattttgctatgtgatgatgacgacgacgatccaacggtgcatgtgtgttgacctgttcctagtagtagtagtagcatgtgtacagctattgtagaatgtagataggtacactactacacgttgttgtcatgtgatcatagaaaggtctctcaccgtacaaaaaaaaaaaaaaagtgatagaaggtctatttgatagaccttctaattaatatatgttgaattattattagcatgtgttacatctaatttattaggcgtgcctttgtcttttctcatttttttaggtctttttaaattgagtatcgtgatatcctactgtgtttactttttcatttcaatatcttttgttttttatgtactactataatataattaatataaaacaattttagttatttttaaaaaaaaaaaaaaaaaa

SEQ ID NO: 7720 - DNA, 2114 bp, Glycine max
cccacgcgttcggtggctcctggcggcacgtgtggcggtatcggctataaataaaggggtctctcttatgttctaagtttgaagcggcgccaccatagttggtgtagctagcgagggagggatatagggggaagcgtttattcattcattaagatggcatcggagcttcaattgcccccaggcttcagattccatccaacggaccaggagctggtgttgcactatctctgccgtaaatgcgcgtcgcagcctatcgccgttcccatcatcgccgaaatcgacctctacaaatacgacccctgggacctacccggtaacattatcttcaacttctgatatattcttattcttaattcttaattcattcattttttgaattgttattgtacaggattggcttcctacggagagaaagagtggtacttcttttcaccacgggaccggaaatacccgaacggttccaggccgaaccgggcggcgggaaccggttactggaaggcaaccggggcggataagcccattggccaccccaaaccggttgggataaaaaaagctttggtgttttacgcagggaaagctccgaaaggggacaagagcaattggatcatgcacgagtatcgtctcgccgatgtagatcgctccgttcgcaaaaagaacagcctaagggtacatacatacatgaatgatgatgcatgccctttctagttcaagattattaggataggataattgcatgaaattacgactttgccctcaagttgaagctgaggatgataatcatttcccatgcaaattgcaaaatctatggccgtaatatcttaaatgttatctcaccgcgcagaaccttcaccagttgaagacttagccatcgcattaaaaacaataattgatgtggaaagagaaaaaattaaaaatataaaatcttctgccaaatcgcaattatcactttctatttttagaaattattccttcttatcactctcacctgccaccgcctgcgagattaaattaatcttacgttggtttccgattatgcagttagatgattgggtgctttgccgtatttacaacaagaagggcacgatcgagaagttccaaccaagcagcgatgttgttgttagccgaaaaatggaatcatcggagatcgaagacaggaagccggagattctgaaaagcggaggaggttgtcttctgccgccggttccgccgccgcaagcgaaggcggcggtgaagaaggattacatgtacttcgacccgtcggattcaatcccgaagctgcacacggactcgagctgttcggagcacgtggtatcgccggaattcgcgagcgaggtgcagagcgagccaaagtggaaggagtgggagaaaagcctcgagtttccgtttaattacgtggatgccactctgaacaacagcaacagcttcacgacgcaattccagggcaataatcagatgatgtcgccgctgcaggacatgttcatgtactggcccaacaagcccttctgaacaaaccgatccacgccgcccattcgcatttgcacggtagcacgagactcaaggtctatgagtgtgcctgtgcgaccacacacagacgattatttatcaagttagcttagctagggcaaagaaagataaaaacattgaagctggaaacgcatgtgtttgttgggtccaccgtctgcaccggttctttttggtgttttgctatgtgacgacgacgacgacgatgacgatccaacggtgcatgtttgttgacctgtccctagtagtagtagcatgtgtacagctattgtatgtagaatgtagataggtacactactacacgttgttgtcatgtgatcatagaagctctcttaccgggaaaaataaaaattgatagaaggatggaaggtgtatttggaccttccctaattaatatttgttgaattattatcattagtatgtgttacatctaatttagtaggtgctcctttctcttgttttttaggtcctttttaatcgagtatcgtgatatcctactgtgtgtttacttttttattttctatctttagtttaatttattatgtaataatgtaattaatagtctaaaacaagtttagcttttttttttcttt

SEQ ID NO: 7721 - DNA, 1457 bp, Glycine max
gcggcacgtgtggcggtatcggctatatatgccgggtacgccccccccccccaagtttgaagcggcgccaccatagttggtgtagctagcgagggagggatatagggggaagcgtttattcattcattaagatggcatcggagcttcaattgcccccaggcttcagattccatccaacggaccaggagctggtgttgcactatctctgccgtaaatgcgcatcgcagcctatcgccgttcccatcatcgccgaaatcgacctctacaaatacgacccctgggacctacccggattggcttcctacggagagaaagagtggtacttcttttcaccacgggaccggaaatacccgaacggttccaggccgaaccgggcggcgggaaccggttactggaaggcaaccggggcggataagcccattggccaccccaaaccggttgggataaaaaaagctttggtgttttacgcagggaaagctccgaaaggggacaagagcaattggatcatgcacgagtatcgtctcgccgatgtagatcgctccgttcgcaaaaagaacagcctaaggttagatgattgggtgctttgccgtatttacaacaagaagggcacgatcgagaagttccaaccaagcagcgatgttgttgttagccgaaaaatggaatcatcggagatcgaagacaggaagccggagattctgaaaagcggaggaggttgtcttctgccgccggttccgccgccgcaagcgaaggcggcggtgaagacggattacatgtacttcgacccgtcggattcaatcccgaagctgcacacggactcgagctgttcggagcacgtggtatcgccggaattcgcgagcgaggtgcagagcgagccaaagtggaaggagtgggagaaaagcctcgagtttccgtttaattacgtggatgccactctgaacaacagcaacagcttcacgacgcaattccagggcaataatcagatgatgtcgccgctgcaggacatgttcatgtactggcccaacaagcccttctgaacaaaccgatccacgccgcccattcgcatttgcacggtagcacgagactcaaggtctatgagtgtgcctgtgcgaccacacacagacgattatttatcaagttagcttagctagggcaaagaaagataaaaacattgaagctggaaacgcatgtgtttgttgggtccaccgtctgcaccggttctttttggtgttttgctatgtgacgacgacgacgacgatgacgatccaacggtgcatgtttgttgacctgtccctagtagtagtagcatgtgtacagctattgtatgtagaatgtagataggtacactactacacgttgttgtcatgtgatcatagaagctctcttaccgggaaaaataaaaattgatagaaggatggaaggtgtatttggaccttccctaattaatatttgttaaaaaa

SEQ ID NO: 7722 - DNA, 2020 bp, Glycine max
ccacgcgtccgcaacgccaccatcgcattctcttttttctttctttccgcactatcttttctcctaactcttttttatttctccttgcaaaaaaaatttgattattattattgattttatttaactgttgttgttgttgttggagggtgatcgtagtttatgagtgagtgaggttaatggaatgtgaagagtgacgggacggtgatgatagtattgttacgcgtgtatggaattcgatgccgcgattcccgtttctcgagagcacctccctcaagatgcaatgtggcaaattaacttgaggtcaagtgaaacaatggaatcagaaccttatcctgagcatccaggagaaccagattgttcatactacattaggactggcctttgtagatttggagcaacatgtcgatttaatcatcctcctaacaggaagctggctattgccgctgcaaggatgaaaggtgaattcccagaaaggataggacagccagaatgccagtactatttgaagacaggaacttgcaaatttggagccacatgcaggtttcatcatcctagagacaaggctgggattgctggaagagttgccttgaatattttaggctatcctctccgcccaaatgaaccagaatgtggttattatttaagaactggacaatgtaaatttgggaacacttgcaaatttcaccatcctcaaccaaacaatatggtgctttccatgcgaagttctcctgtttatcctactgtccattctccaactacaccaggtcaccagtcatatgcgacaggaattacaaattggtctagttcatcgtatattcctagcccacgttggcaaggcccttcaagttatgcacctttaattctacctcagggaatggtttcagtgcctgggtggagtgcatacagtggtcaaatgggatcagacagtccacagcaaacaatggcaaatggccaaagctatggaacttctcgacaaagtgaaccagcaaattcaggatcccagggggcatattctcaatttcgttctggctctgttcctgtagggttctatgcgttgcagagggagaacatatttcctgagagacctgatcagcctgaatgtcaattctacatgaagactggagattgcaagtttggtgcagtctgtcgtttccatcatccacatgaaaggatgattcctgctcctgactgtgttttgagtcctataggtcttcctttacgtcctggagagcccctgtgtgtgttctattcacgttatggcatatgcaaatttggtccaagttgcaagtttgatcacccaatgggagtcttcacctataacatgtctgcatcacctttagctgatgccccaggacggcgtatgttaggttcttcatcaggaacttctgcattaaatttatcatcagaaggacttgttgagtcaggctcagcaaatccaaggaggctttcattatcagaaactcgacagattccttctggtgatgataacattgatgaagagggataatgatgtctcttggaaatgggtcatttgctttttacaaatttttttcaggggagaaaaagggtaatctgtaaattgattttcccattgctgaagatgtacagactacagagttcatgtcaagctgattctgtcaaacctgctatttaatgcagttgacagattcagttgttctgaatttcatgctgtcacattgtataaattttacaaatatttgtcacatttggtgaaaacccaatgtgaacatttcttcagtctatctatttaatgttttcctaatatgtaaaaagtgtttttctgaaaatctataatgatcagtatttggctctaaaaaaaaaaattctttggtgcaggtttgaaattcagtgcaaagacttttctttatgctgtctactgtgcatacatagaaatctttttcaacagcaaaccaacagtatgatcaatatccttttattttccacattttttgtgtcaactgtgcatacatagaaatattttttacattcttatcagaat

SEQ ID NO: 7723 - DNA, 1487 bp, Glycine max
  misc_feature (17)..(17): n is a, c, g, or t
  misc_feature (20)..(20): n is a, c, g, or t
  misc_feature (28)..(28): n is a, c, g, or t
  misc_feature (1450)..(1450): n is a, c, g, or t
  misc_feature (1454)..(1454): n is a, c, g, or t
  misc_feature (1463)..(1463): n is a, c, g, or t
  misc_feature (1469)..(1485): n is a, c, g, or t
tcgagtcagctacgtanggncccccccnaaaaagcatggacactaaattctgttactacaacaactacaatgtcaaccagccccgcgctttcggctcggcacggctgcgagaagacgacagaagggggcaccatgaggaatgttcctgtgggggcaggacggcgaaagaacaagaactctacctcgcattatcgccacatcactatctccgaggcccttcaagcagcaagaattgatgctcaaaatggaactcatcttccaactttgaaaggcaatggtagagtcctcagctttggattagatgcacatgcacctatttgtgattccatggcatctctcatgaatcttggagagaaaaaggctcttaatggcacaagaaatgggtttcatcatggctttgaggatcaaagactccccgttccttgcaaaagtggggaaaatggtgatgactcttcaactacatcctccattacaatttcaagtcccaagggagaaaataacaaaagcaccttccaacaacaaccattgccccaaaatcatggtttccttcctcaagttccatgcattcctggtgttccttggccctatacatggaattctccagttcctccacctgctttgtgtccttcaggatttcccctaccattctatcctgctacattttggaattgtggcatgcctgggaattggaatgttccatggttttcctcaagttcacctgcttcaaacctcaagtctccaagctccagtcccaattctccaactttggggaagcactcgcgggacagtgacatgattaagcaagactctttgcacaaagaagaagcttcaacgccaagaaacgggagtgttttggtcccaaaaacgttgagaattgatgatccaagtgaggctgcaaagagttctatatgggcaactctaggaattaagaatgagtcagtgagtgggggagctatgtttaaggccttccaatcgaagaagggtgaaaagaatcatgttgaagcctctccaatgttgatggctaaccctgcagctttatctagatccctcaattttcatgaaaactcctgaattagtggcactggtgaaaagtccttacagcaaagttagtcacttcttgagttatttgtctagctagcaagagacggtgaccatctttgagtgacattgaccttgtatagaagaagcgaaagggtggtagtctctgatttcctcggcacaagtgagacgacgaggactaattctgtctttaatttcattcgacaatattaaaatagagtatataggttttttttcatgtgcttagtttgatgagtgagttcatgtatatgtacatatataaaaatatgtgaaatactgatctttagcctagagagacggaaaagatcttttactttcttgtagtataaaataaaaatcctgactgtagaaaagttagtgagctcctttngagnataaaatangaaatnnnnnnnnnnnnnnnnnag

SEQ ID NO: 7724 - DNA, 1365 bp, Glycine max
tcagctacgtaggccccccccccgtgctgtttgggttagtgtttacactgtttcttgcttggaagaggctctccctacactacagtgacctggatttgtgatgggtggaagttctattgatgatgattgggagctcacttcctcatctaatgaggttcggacagtggtcttagttggacgtaccggcaatggcaagagtgcaacaggtaataccattcttggaaggaaggccttcaagtcaagggcaagctcctctgctgtatccacctcatgtgaattgaaaacaacagaattaaacaacggacaaattgttaatgttattgacaccccaggattatttgatttgtctgccggatctgagtttgttggtaaggaaattgtcaaatgcattgatttggccaaggatgggatccatgctgtcattgtagtgttctcggttagaacacgctttactgaggaagaagaaactgctctacggagcttgcagacattatttggaagcaaaattgttgattacatgattgtggtcttcactggaggagatgaattggaagaaaatgatgagacacttgaggattatttaggccgtgaatgtccagagcctttaaaggaaattcttgttctgtgtgacaatcgttgcgtactttttgataacaagactaaggatgaagggaagcgctttggacaagttcaacaacttctctcttttgtaaacatggttttatctcgtaatggtggacgaccttatacagatgagttatttactcaactgaagaagggagcaatggagctgcataaccaacaaagagaggttgattctttaaaaggatattcaaaaggagagatattggagtttaaaaagcaaatgcagcaaacatatgatgaccaattaaagcgaattactgagatggttgaatcaaagttgagggaggcaactatgaggcttgaggaacaattggcagaagagcaagctgcaagacttaaggcggaggagaatgcaatgttagctcaaatgagatcagatgatgaaatacgaaaactcagagaacatcttgagaaggcacatgaagaacttcgcaagcgaggtggaggtggttgtgccattctttgatagtagctacttcaaacttcagaagagtttatttatgttatttttctcttggagatcgtgacatcaaatagctgttgcatttgcagggttaatacctgaataagtgccatgactattatgcaattatttttattcttatgttcacatcatgcattatgagattggagatattttctaatctggttttcatgcttctcactccagtaatttcaatacgagttatagtgttttctgtcaaaaaaaaaaaaaaaaaa

SEQ ID NO: 7725 - DNA, 904 bp, Glycine max
tcgagtcagctacgtagtgcccccccccgaaagaaaagagaaatggcaacagaaacaaaagtgcaagaattaggtggcatcaccgatgtgcatggagctgccaacagcgtcgagatcaacaatctcgctcgctttgctgtagaggaacaaaacaaaagagagaattcagttctggagtttgtgagggtgattagtgcaaagcagcaagtggttgctggagtgaattactacataacattggaagcaaaagatggtttgattaaaaatgagtatgaagcgaaggtttgggtgagggaatggttgaactccaaagagttgctagaattcaagccagtcaatgtttctagcacaccaataggtggcattaccgatgtgactgcgaatagcctcgagatcgacattctcgctcgttttgctgttgatcaacacaacaaaaaagagaatgcaaatctggagtttgtgggggtgattagggcaaagcagcaggtggtggaagggttcatatactacatcactttggaagcaaaagatggtgaaaccaaaaatgtgtatgaaacgaaggtgtgggtgagatcatggttgaactccaaggaggtcctcgaattcaagcccatcagtattaatcctctttcggtgtcggtctagtcttaataaggttacagaaataaatggtcgcaaggtgaaagttgtactaaaatttattttttataagaaaaatcgaaggtagtattaaatatgttatatgtatgtattgtgcggaataaatgcagccacgtactatatataatggtacatacggtgtagggctgtacaaattgggcatcctatttcaatattaacgaccactaataaatattaccattggagttattacgtattaaaaaaaaccgagactagttctctc

SEQ ID NO: 7726 - DNA, 1239 bp, Glycine max
tcagctacgtaggccccccccccgatacgagttgttatgacttatgagtctgttgtgtcgtgtctaataaagaagggcacaaccaacataaggcatggccttatcctctccctccctcttttcagctgtaaacgccacatattcagtaccccatttccatgcactgccactttcactttcttcttcttactttccaattaatgttagaccctccacccatcatgtccttgtctctgatcataatcacaaatggagaacaaaagtttcatttttcacttccttcttgaagcagaaaggtaaagatgccaagatcatcaaggaagaactccttgaggccattgcaccacttgatcgaggggctgatgccactccccaagaccagcaaacagttgatcagattgcgcgcgaacttgaggcagttactccaataaaggagcccctcaaatctaacctactcgatggaaaatgggagcttatatacactacctcgcagtcaatcttacaaaccaagagaccaaagttgttgagatcagttgcaaattatcaagcaatcaatgtcgatactctaagggcccaaaatatggaatcttggccattcttcaaccaggtgacagcagatttaacacctttaaatccaaggaaagtagctgtaaaatttgatactttcaaaattggaggcattatacctattaaagcacctggaagagctcgtggggaactggaaataacatatttggacgaagaactgcggttatcaagaggtgataaaggaaacttgttcatcttgaaaatggtggatccgtcttacagggttcctatatgatggcattgtcagcattgcaatgcagtacttgtgttcttcctctctagggattcaaactaccatcatagctcactgaaaatacacgttggagcttatactagcactgcactattattcaagttgacttgaagcattttgggaccgttcttccagacttccagtacaaaagataaactgaaatagtataatcttaatctctgtaatgagttctactctttatctcctcaaggtcggtgaataaaataaaaaaaaataatcattaatattaatgagggcgagtcctggtgcagcggtaaagttgtgccttggtgacttgtgacaattatgtgagcttatcaattttttccctacttatttttccgtctaaacaaataagagaaaatatctcttcatttcccaaaaaaaaaaaaaaaaaa

SEQ ID NO: 7727 - DNA, 1340 bp, Glycine max
  misc_feature (1329)..(1331): n is a, c, g, or t
ggcaatatattattttggcgcccctccaattcttttgaatcctcacccccacacaacaccactccacacattttcgttcttccctttcacccatctcatctcaacaattgaatctttgaggggtctttcagaatcagaatgatggcagcaactatggagcagcagcagcaacgcccccaacaacaagacgaagctgaagaaatacaacatggccctttacccgtcgagcaacttcaggcatcgggcatagccgccacggacgttaagaagcttaaagacgcgggaatttgcaccgttgaatccgttgcttacactcccaggaaagatcttttgcaaatcaaaggtatcagtgaagctaaagttgacaagataattgaagcagcttctaagctggtgcctatgggtttcaccagtgctagtgaactccatgcccagcgcgatgcaatcattcagataaccacgggatcgacagagcttgacaagatattggagggtggagttgagactggttctatcaccgagttatatggtgaatttcggtctgggaagactcagttgtgtcacactctctgtgtcacttgccaattgccactagaccaaggaggcggggagggtaaagctatgtacatagatgctgagggcacatttaggcctcagcgactcttacagatagcagataggtttggattgaatggtgctgatgtattggaaaatgttgcttatgctagagcatacaataccgatcatcaatcacggcttctgcttgaagcagcttcaatgatggtggaaactagatttgctgtaatgatagtagacagtgctactgccctctataggacagatttctctggaaggggggagctttcagctcggcaaatgcatctagcaaagttcctgaggagccttcagaaattagcagatgagtttggtgtggctattgtcataacaaaccaagtagtttcacaagtagatggttctgcagtctttgcgggacctcaaatcaagcctattggaggcaacattatggctcatgccacaactacgaggctagctctcaggaaagggagaggggaagagcggatctgtaaagtgataagttctccttgcttagcggaagccgaagcaaggtttcagatttgtgcagaaggagtttcagatgttaaagactaactgatttcagaatgtttgaattttttgttttcctatttgcatatcattttgtaaggtgtaccagttgactttcaacttgcaacttgcaagtatccagtatcaaaattttcaatatatgtcagtttggtgccccctattttttaaaaaaaaaaaaaatannnaagggcggc

SEQ ID NO: 7728 - DNA, 1430 bp, Glycine max
gccccccgacaattcttctaccaccaaatcaacaatctgcaaagataaaataaacaaaaagaactcgaaagaaggaggaaaacaaaaagaaaaatttagtaactaccgataccatataataataagaatagtattattaaaagagaaagggaagggaaggtaacacgctatggcggcggaatcgggtggtacgccgacaaactttgatcttcccgaggaggtggtgcaagtgctaccgtccgatcccttccagcagctcgatgtggctcgcaagatcacttccattgctctatcgacacgtgtcaacaccctcgaatcagagctgtcctcgcttcgcgcccagatcgccgacaaagacaacctcatcgccgaccttcaatctcagctcgactccctcgacgcttccctctcccaaatcgccgacaaactcctccaaaccgaacaagataaggagagcttgctccaggagaatgcttcgctttccaacaccgtcaaaaagctcaatcgagatgtctccaagttggaggttttcagaaagacgcttatgcaatcacttcaggaggaggatgataactctggagcagctccagacattgttgctaaaatacagagtcaagcaagtttgacttccacgtcgcagattggagataatgatgtttcattgccaccgtctgtatcttcttcaacaggaaattcttttgccaaggatcatgaatctgatgccataagacctagagtatcacagaatctcctcttagcatctcaaggttccacccctcggattactccccctggttcccctcctagtttgtcggcatcagtatcacctacgagaacatctaaacctgtatcaccacagcgacattcaatttcctttgcaaccacaagaggcatgtatgatgacaggtcttcaatgttttcctcaatgtccttaactcatggttcaatatcaagctctgatgcaggaacaggatcacaaactggacgaacacgggtggatgggaaagagttctttcgccaagtcaggaaccgtttgtcttatgagcaatttggtgcattcttggctaatgttaaagaattgaattcccataaacaaacaaaagaggaaacgctacggaaagctgatgaaatttttgggcctgaaaacaaggatctgtacactatatttgagggattgattaatcgcaatctccattgacattgtgcttaagagattctttccaaatttgtaataacggatactatcgtgcatgtctccttatttatagcaacttttttttctcccctctgtataatacaatacttttttttgaacatgaaaaccgaatgacagtcttggcaggactacaaggaaaaaaaaaagaaaaaaaaaaaaaaaaaattgcagttggtttccttgcagtatggatgggaggtactctagttttaat

SEQ ID NO: 7729 - DNA, 1442 bp, Glycine max
  misc_feature (1408)..(1408): n is a, c, g, or t
aattcggctcgagggggacctgtgcaatatgcctttacacaatgaaaccagggcagggacatgccatttttactgcagaatgttctcactctttccatttccattgcatcacttctaatgtgaaacatgggaaccagatttgccctgtctgcagagcaaaatggaaagaagttccttttcagagtcctgcttcaaatatgccctatgatcgactcaaccaagtatctcctcgggaagaaggctgggcgactgtcttacggaggcttccttctcctcaaggtgacgctgctcggcagatttcatcactttatcatgtcactgagccagctatttttgatgatgatgaagccctggatcaacaaacttcagttacccatcctaaaaacgagattgataatgatgtaataaatacagtggagatcaaaacatatcccgaggtttcatccgttccaaaatctgcctctcgtgatgcctttgctgtattaattcatctcaaagctcctcattcagggagaaaacaaaatattggagaaaacaataccgaatcacctcctctggttgaaaactcgcgtgcctcagttgaccttgttacagttcttgatgtgagtggtagcatggcgggtactaagctggcactgctaaaaagagctatgggttttgtcattcagaatcttggtccatcagaccggctgtctgtcattgccttctcctccacagcacgccgcatatttcctcttcggaagatgactgacactggacggcagcaggcattacaggctgtgaattccttggtttcaaatggtgggacaaacattgctgaaggcctgagaaaaggcaccaaggttttttctgacagacggtggaagaactcggttagcagcatcattttactctctgacgggcaggatacatatacagtcaatagcaggcctaatgtcggaacagattacctgtcacttgttccaaactccattcatcgtaataacggtacgggcatgcagataccagtgcatgcatttggttttggctctgaccatgatgctacttcaatgcattcaatatctgagatatctggaggtacgttttctttcattgaagctgaggatgtcattcaggatgcatttgcacagtgtattgggggactcttgagtgtggtggtgcaagaattacaagtacaagttaggtgtgttcaccctcaattgcaacttagttcagtaaaagcaggaagttaccaaacaagcttgatggggaatgcaagactggctactatcagtgtaggagatttgtatgctgaagaggaaagagactttttggtgacagttaatgttccagttgatcaatcgagtgatgagacgtcgttgttgaccgtgagatgtctttaccgagatcctataacaaaaaaaatggnggctttggaagaaaacagtgaagtaagaattctg

SEQ ID NO: 7730 - DNA, 1186 bp, Glycine max
  misc_feature (13)..(13): n is a, c, g, or t
  misc_feature (29)..(29): n is a, c, g, or t
  misc_feature (35)..(35): n is a, c, g, or t
  misc_feature (55)..(55): n is a, c, g, or t
  misc_feature (61)..(61): n is a, c, g, or t
  misc_feature (85)..(85): n is a, c, g, or t
  misc_feature (90)..(91): n is a, c, g, or t
  misc_feature (96)..(96): n is a, c, g, or t
  misc_feature (98)..(98): n is a, c, g, or t
  misc_feature (117)..(119): n is a, c, g, or t
  misc_feature (140)..(140): n is a, c, g, or t
  misc_feature (147)..(147): n is a, c, g, or t
  misc_feature (159)..(159): n is a, c, g, or t
  misc_feature (175)..(175): n is a, c, g, or t
  misc_feature (198)..(198): n is a, c, g, or t
  misc_feature (211)..(211): n is a, c, g, or t
  misc_feature (218)..(218): n is a, c, g, or t
  misc_feature (247)..(247): n is a, c, g, or t
  misc_feature (260)..(260): n is a, c, g, or t
  misc_feature (274)..(274): n is a, c, g, or t
  misc_feature (316)..(316): n is a, c, g, or t
  misc_feature (389)..(389): n is a, c, g, or t
  misc_feature (391)..(392): n is a, c, g, or t
  misc_feature (398)..(399): n is a, c, g, or t
  misc_feature (409)..(409): n is a, c, g, or t
  misc_feature (415)..(417): n is a, c, g, or t
  misc_feature (440)..(442): n is a, c, g, or t
  misc_feature (456)..(456): n is a, c, g, or t
cggcggtggtccntgcgggtgcgcggcgntggggngtgcgcggcgtggcggtcgntcgggngtgcgggtggcggcgcgggggggngcccnngggtncncgggtccgtttggtggcgnnngtcggcggtgcccggggggcncggcccnccgcccccgggngggggcgggggggcgngcggctccgggggcgggggccgntgctgggcgcgtncgttgcngcggcgctcggggtccgcgtgtgcgcttnctcgggcgtgggnggggcgcggggggncgcgttttggggcggggggggggcggggggccgcggtcgccntccgccgcggcgttctccctctcgtgggcgggccccgcggggggggctcccggggggggggcggcccctcttncnncttttnnttcccccggncccccnnncttcccccccccccctttccttnnncctcttttttcggnaaatgactggtaaccctagcaccccaacctcattcgttcccccctgttgccccaaccctagcacccccttccctggcggcgccaccgcagctgcgcccttccctgccggagtgagcctcaaaccccgctgcagcaaagcccttccctaattgtgcggcgcaaattgagaccccctcagttcccgcccccattgtgcgacgccggcgacgaagggaaagtatttggtggtttgtgatgtgaatttgagagcctccagtgttcagcaagtcaaaatttgggcctcaaggatcttattgtttgcagagttggacagacagggtctgaaaaagaagtgagaacataagcattaagcatcaaaatggaattagcagacagagctgttggatttctgttatcctttatcagcttatcaatatttacctattatactttctgggttatcatcctgccatttgtggatgatgatcactttgtgcacaagtacttcttaccccaagagtatgccatactgataccagtttcagctggtgtggcacttctttgcctcttgtgcatatttattggattcgtgatgctcaaatccaaaaagaagaaggcctaatggctaatactgtcaatttgttgcacaatttgttctaatttttgaaacagtgaatttattaaatgcattttcgatcatttcgttcgaaaaaaaaaaaaaaaaattattagtaatcaccttttttttttg

SEQ ID NO: 7731 - DNA, 1311 bp, Glycine max
aaaaaaaccctataaaacttaaatttcaggcataaactgagagagagataacatcgttgcagtggcgcgcccaatggctctgggaatctctaacatactgcactgccccaaattgagtttctcccacaataattttctccccaaagttccaacctctatcagcctcaggtttccccagacagcagcatggagtgatagaaagattatctgtgctgctgcatctgcggcaggaagctctaatcccgatggtgaatttaatccttatgaggtgctaggtgtaagccctattgagaaatttgacatggtcaaggcagcatatgctaaaaaaaagaaggaggctgagatgaatggcgatgaagcaactgcttcaagactggaaaaggcatatgacaaactcatgatggctcaattgtctaatcggaaaaagggtgtgacttttggatcatttaaggtttcaaaggagatcaagtatgctgacaagcttccagttataccttgggggccaaggcttactaaatcaagtcaaaatgacatgcgcatcaacttggcaatatctgctgtttttacagcttggatccttgtcaagcgcagtgctgaatataaacctttgcagtttttagcctttgcctttgtttataggctttttgagaagttaaaagcctctgaatctcctgtaacccccaaatataatgaagagggtgaagacacaggagaaggactccgcatgggaaaacgactgctccgatcactagccttggtttttggatgtgtagctatttcatctttggcatacactttcattttgaacataattgagtttgcaggtggttttattcctactcttttgtacaacagtcaggagttgataatcaccacttcatcggcactcatgctttatatcatggcatcttattatagatagtggagtgtgtcttgaagacgaagaaaccatgcatctattcaccatccctttttttttttaagtctttttcctcccttctctttcttttgttcttattgtgaactaaagtgcttttcttacaaattttgtcaaaagagatgctttttccttgttttaatatactaaattagggatagtgtcaactttcttatggtacttttttcttttcttttttgggaagggaggggggtcatttatattgattttgactattcacatcatagtggtatataagtcttgtattcttgctcaaaacacacacacacaacaaaaaaaaacaaaaaaaaaaaaaaaaaaaaaaaaaaaaaaaaaaaaaaaaaaaaaaaaaaaaaaaaaaaaaaaaaaaaaaa

SEQ ID NO: 7732 - DNA, 837 bp, Glycine max
gcgagaagacgacagaagggtacggctgcgagaagacgacagaagggtacggctgcgagaagacgacagaagggtacggctgcgagaagacgacagaaactcaataatagtcccttttctgaaattctcctaactctctctctctctcaacaatggctcgtacttttgttcttatgttggttgctgctgctgcattgttgttgagctccacgatggctcaatctccagcttcttcgccggctttatcaccgaccaacacgccggtggccactccaccgaggagggcgttgtctccgtctcctgttcctgctgcggtgccaccgtcgtcttctcctccggctccacctacttcttctccttcggagcccccaattgcagctgctactccgaacatccctccctcgaccatctcgactccaccatctgaagcaccaggaccagctgcaaacggtgccgttttcaacagagttggcggatctgctctcattctaatcatcgcttcggccatgctcgtatagaacaaattctgtgggattattcatgaatacttgagttttttgaactccagtacttttttttcctggtgtcgttgaagacgattcatttattttaattattttatttatttattcattcatatgattgatgcatacacacatatgtataatctctttgcgattataacatatatgatagatgtgcattagcatttgtcatttgtaactatttaattaattaattaattgctcgtattttaatacgatttcgattaaaaaaaaaataagtgcgaccaaaactgataaagctggaactttcctatttaaataattatgcctt

SEQ ID NO: 7733 - DNA, 1111 bp, Glycine max
cccatgctttcgcccacgcgtccgcccacgcgaacaacaccgataggaggaattggagaagaaacaggaacagaaaggtttgggaaggaagcagaaatcgggggtggtgtgagagacaagcatggcgacgtgtcttcgccttgggagatttacgactattgattcgctctctctcttcgtttccaccgctagattctccttttcttcatcatcttcgtcgtcgtcctcgtcgtcatcttccggtaagtccaagacggggaagaagctgatggatcgtctttccaccgttatcgacgccgtcaatgatcgcaaactacctcctgagctacgtggccagcgcagcaatgtcaggtcagaaactgacattatcaacgttgttgagcaaagaatatggcataccatggaagaagggaagtttgagaatttgccaggcaaaggcaagccgcttaagctcgacacaaatcctcatgcagatccagctgaagacaccctgtaccgtatcctgtcaaaaaacggatgtgcaccggagtgggttgaacttaacaaagagattagatctaaaatatctgaatggaggaagtccttgaagaaagcttgggctactaagtgcagtggagatcactctgagtgggttgaaagttcagaggctttgaaatctcagttacgagaaatcaatgataaggtgtgccgggtcatccgctgtgtgcctgttgctcggcaaatgtttggccttaagtgggagaaagagctaggttacttagaagaaaaatgagaatcattgttgttaaatttgagccagttggttcactatagtagaagattaaaatttgttattttcttgagaaaagtcatgccaggcgactaatcaactaggaactagcttaagttattcagttcaactattgttgattacttttaatttcttagcattatgttactggttatgattcctctttcaggcttattagtatggctatatttatatggttcataacctccgatcatgtacatcccaaggatacaatacaagtaaagatagtgaaaatgtatgtgactcaccaatattagttgtcctgacgattgtattatcagtttttgctttgagacaaaa

SEQ ID NO: 7734 - DNA, 2050 bp, Glycine max
tcagctacgtaggccccccccccaaatttgaagtgagttgtattttataatatatctgctgaattgtggaaaaactgtcagttaaagtttcacagggacactattattgacatattctttgagaggcatttggggcaattgattgaggttataacagcatctggtccttcagaaaatactgctgatgcaaatggcaaatcaataggtcctggacgaagaattcagtgtcagagtggaacaaagccggagatactatcaaacatatgtgaattattatgcttttgtgtcctacatcatccatacagaataaagtgcaactttcttcttaataatgtgattgaaaaaatattgctattgacacggagagcagaaagatacttggttgttggtgctgtccggttcgttcgaactattctctctcgccatgatgagcatctgataaattattttgttaggaataatgttctgaagccaattattgatgtctttgtttctaatggcaatcgctacaatctgctccattctgctgttctggaactttttgagtttattcggaaggaaaatctgaaattattgctgagatacatagtcgattctttttgggaccagctggtgaaatttgagaatttggcttcaattcactcactgaaagttaaatatgagcagtgtttggataatggtgggacaaatgatgatgccactactgcagtggaccttcgaagaagaaatgatgagcgtgctctggagagagaagaagaacggtactttaatgaggacagtgacgaggaggatactgcttctgttccacgtaatctgaaaggacaccagcaacctaatctatccaatggagttgctgcaagctattcacagttaagtccaaggtcgctggttgattatgaggatgatgaggatgatgaagattacaagccaccgccaaggaagcagccagaaacttctgaggaagatgacgggataatggagtctcttgggctgaagaggaaattaccttcaaaagataaggagcctgaacttgtgaagaaacagaagttatcgaagaattctaaatctaaagatagtgtttttgctgccttgtgttcaacattgagccaagctgtgctacccagtaagaaaacatcaatcagcattccttcctgtgctcgaacagatgggaggatgagctcaagcgaagataatcagggggatgtacaaaatatttctagaagcagcagttccaataatagcaacattgcagcagaagacaatcacgtagagaaagaaggtgaagcctctagaagcttttctgattgcttgcatgcaaaatcagataacatacaattgggtggagaagaacgtccattggttgccccaaaatcctcaccagagatggctgtaaatggatcctaagctttcagaatcatatgcaggaagacagattatttgttttatttgacgtatagattttctggtgggtaagtggttctgactacatacatagagctttgagacgaaggaaatttacctacaagggggtaaattctgcttttgcgttgcatcgaggacgtgggaatactgtacagtgccacaaagaggcggcgggaagatattaatacagcaacgtgggtgtatctggctcctattcttcagtttgctattttgggcttttgagcttagtagttgttgtttttgtatgacattcctgagaaataattctgtattttccccttctccaaaatttacctcttccagctcatttattttcaaagtttctgccagaatatccaagtgccggtgaggggttatcattcatattatactacattatataacccttctcagtatttgaacttcctgatagagggcgccaatatcttgccctacacaggttttccgtgtgtttttttttcctcttttgtttttttcttctaaggcccatttttcacaaatgtgggaatcatcaaccgttgtaaatctgtattaaactgttgaatattgcaaagtactcttatgcagtttgtccatatcgcaactggattcactatttattattatt

SEQ ID NO: 7735 - DNA, 1817 bp, Glycine max
ggctcgagctctactctcttattctcaacgtcctccccattccccccccttcttcttcttcttctctcgcgccgcaataataatactaaaacatgtccaactctgatggagccattaacgccgtccctcccaacgacgccaacaacaacacaatcgttgagtaccagcagcgaaccaccaccaccaccaccgccgccgccgccgccctcgccgtcaagaaaccgccttccaaggaccgccacagcaaggtcgacggccgcgggcgccgcattcgcatgccgatcatctgcgccgcccgcgtcttccagctcacgcgcgagctcggccacaagtccgacggccagaccatcgagtggctcctccgccaggcggaaccctccatcatcgccgctaccggctccggcaccactccggcgagcttctccactgtctccgaccacaagcccctcctccctccccctacccccttcatcctcggcaaacgcattcgccctgacgacgactccgccgccaaagacgacgccgtctcgctcgtcgccccccccacgccgcccgccctctgggccctacctccccgccccgacttcggccaggtctggagcttcgccgccgcgcccgaactcgtgtcggtgtcgccgcagaattcaatgtttcaccatcaccatcaacaccaccagcagcaacagcaacaggccgccatgggagaggcctctgccgcaaggctcgggaattacctccccggccacctcaatttgctcgcctcgttgtccggcggccacgggaattccggccggcgggacgacgagcctcgctgaatgaatcaatttctgaaattatgatggatttgattgtgatcttcttcgtatataaatatatgtattattgtgtgtgggtgggtgagtttgtattttgtctctgtgactttgttgttgtgtgtggactactgtggacaaggagaaggattgaagattcttagtgaaatttttagggttagttttttttttatttttaatttttggtagtatttcgagtggacaagtccatgaattaaggaattcaattggattattagggttttccttgtttggaaaactgattaggttacttgttaggagatgatgatgaatttgtttagaacattgctggaggagagacaacagagagtatgatgatgagatgaataaccagggattgaggcttggaagtgggtttcaggacctcgatccattgatcggtatgcagatgcagatgcaaatgcaaatgcagacgcagatgcaagtgtaatgaaatgaaaaattaatttaatgatgttattgtggaaaatatcacaccagagtccaaggcgaatgaattcaaggttaagcttcttcttgtttcttctgtctcgctttcactgtgggttttgatcaacttgacttactttctttcactttcctaatttgctcattaaaagtgattagtgttcatagtcttagtttgagtgattgtgtgtttgacaatcaagcgtcactcccattttcttggagtaaacttctttccaatgtttattgagaattcatgttattgcgcatcattgaaggattgtggtccttctaattatgcattctaccttgcttagttgctctctccttcactttcggggatgcctaacagcctgcttctgcaatgtaagacctctgtttctagatttttatctgaaattctcagccatttcttagattcgtcagcgtgacaataatgtcttttctagtatgtaactggatttccgtggggtgttagtgaagtgaataaagacccatctgctcatttctctctaa

SEQ ID NO: 7736 - DNA, 669 bp, Glycine max
aatcaatctcaagagacagatcatataattttttttagcaaaatccatggcagatcttcaagaaaaactggatgctctgaagggtcttgttggtgtgctaaataacatggatgagggtgaaactcacaacaacaatgcaacctcctcacccaataattcccatagtcctgctcctatgcctggaaggaatcgctctgttggaaaatataacaacagtggcactcagaagattaaaggtctgagtaaccaaaccggcttcaccgaaggcaacgctaacggagccatcaactttggcaatttacatgcctaaataaatcaatgtaccaagatcttgaaatccataaataataatgtgacgtacaaattaaaataagagcttcacagtttgagtgtggatccaatattttcagctttttattatatataaatatatgacttcttagattaacgtgcagcaacaacaacaaaaagaaaaaaaaaaaaaaaaaagaaaaaaaaaaaaaaaaaatataaagataaaaaaaaaacacaaaaaaaattataaaaaaaaagaaaaaaatatatggggcggccgccgcttatggatcttctcaacccggaattaaattcgggccgggtccttggagggggaccattttttcttatagagagtcgtttaaaacttggggg

SEQ ID NO: 7737 - DNA, 812 bp, Glycine max
aaaaaaacatgtattttagcttttaaaaagtccccattctcttcttcttcttcattcaggcgcgctccctttctctccgatcaatccaaacccttttcttgttcttcacaattccaattctctggcgatgtcaacggcggcggcgggcggcgacgtggaggcagggttcgcgaagctccagggtgaggacttcgagtactacatgcagacctactccatcgtccttggccgcaactccaagaagtccacggtcgatgtcgacctctccagcctcggtggcggcatgaacatctcccgccaccatgcccgcatcttctacgacttcgcccgccgccgcttcgccctcgaggtcctcggcaaaaacggctgcctcgtggagggcgtcctccacctccccggcaacccccccgtcaagctcgattcccaagatctcctccagattggggacaaggagttctactttctcctgcccgttcgcagcatccttgttgggcccgtcggcccgaggcattaccctaaccacgccgcacccgggcccgtcgtgccgcactataataattaccatttgggccccggcccggtgaagaaggcgccgcgacgggagtactacgaggaagagtttgatgatgaggatgatgttggtgggaggaagatgcggagggatgggtatgatggatatggctacgctggtggcgagagtcttcgctgtccgcacctatggataagaagtctgaaggtagatccccaagtagatccgaatggctgataaatcttcagcttcagcagcctggaagaaaaagatggtagtatca

SEQ ID NO: 7738 - DNA, 1299 bp, Glycine max
tcagctacgtaggcccccccccccagttaattatcactttttgttttcagttgaagagacatgttggactatgaatgggggaacccgtccacgataatgctctccggaaacgaagacagctccgccgcgggctccgaccaaacccaccgtcaaatcttcgaccactatgcgtcccacacactcatccccgaccacttcctacacgcgccaacgcactccaccgccaccaccgccgccgcagccaccgtggatttcacccatcaccaccacttcaccccgcaaccccaccaccacaaccaaaaccacatgaaccaccaccaccaccatgccttcttcgacccacgcgcttttcatggcgcgtcgaacacctcttaccccccaccccattccatgctctcccttgacccgctacctcacgtcaacgcagttgggcctgggcacgggcccggttccgggccaggcggacttctccttgtcccaaagtctgaagacgtcggtcggcccatggactttgtcggctcacgaattggactcaacctcggaggacggacttacttctcatcctccgaggatgacttcgtgagccggctctaccgtcggtctaggcccgtggaaccgggttcgactgcctcgtcgaactcgccgcggtgtcaggccgagggatgcaatgctgatctgtcgcaggccaagcactaccaccgccgccacaaggtgtgcgagtttcactccaaagccgccaccgtcatcgccgccgggttgactcagcgattctgccagcaatgcagcaggttccatcttctttctgagtttgataacggaaaacgtagctgcaggaagagattggcagatcataatcgccgcagaagaaaaacacagcaaccaactcaagaaattcagaaatctcagtcttctttggagaatgttgcaagatctccaccggactccggagctcagtcttcctcgtcggtgactgtggcagtgtcgccgccagactatttccggcagaggccataccaaagcacgaacccttcatctactacttcaagctcattgtttttctcaagcgggtagagtgcatgttggagcagtttaatttgcatggataattaatatttgcaagaaattaacggaggagcgtcaacaataattatattatagtgaactactacttccacttgtaactcccaatttaatttcaaactcttaatctcgtgttattaatttgtacgaattgtgatttaaagcatctatgttaatccggtaatccccccttaattttctaaaaaaaaaaaaaaaaaa

SEQ ID NO: 7739 - DNA, 1645 bp, Glycine max
gaattcggctcgagcttgaccatgatgatactgaaaagcagatgctgagaaagttaagtaaacaacttagtggtgaggacccgacgtagatcccccccccccaaaagaaaaaaaaaaagaaaacaaaaacatttccctgctacttcatcttcttcttcttcttcttcatcaccggtggttctgttcattcttccttgcaccttcttctttgaagatcgaaattgtgtttttgaaaaaatgggagttccagagaaagaccctctttcccaattgagtttgcctcctggttttcggttttaccccaccgacgaggagctcctcgttcagtatctatgccgcaaggtcgctggccaccatttctctcttccaatcattgctgaaattgatttgtacaagttcgacccatgggttcttccaagtaaggcgattttcggtgagaaagagtggtactttttcagccctagagacaggaaataccctaacgggtcccgacccaacagagtagccgggtcgggttattggaaagccaccggaaccgacaagatcatcaccaccgaaggtagaaaagttggcataaaaaaagccctcgttttctacattggcaaagcccccaaaggcaccaaaaccaattggatcatgcacgagtatcgcctcctcgactcttcccgaaaaaacaccggcaccaagcttgatgactgggttctgtgtcgtatctacaagaagaactcgagtgcacagaaggcggtgcaaaacggcgtcgttccgagcaacgagcacactcaatacagcaacggttcctcttcctcttcttcgtcacaactcgacgacgttctggaatcgctgccagcgattgatgaacggtgtttcccgatgccacgtgtcaacacgctgcagcaacagcagcacgaggagaaggtcaatgttcagaacttgggtgaaggggggttactggattggaccaacccttcggttctgaattcggtcgttgatttcgtatcggggaataataatcataatcaattggtgcaggaccagacgcaaggcatggtgaactacaacgcgtgcaatgacctctatgtccctacgttatgccatgtgggcacgtcagttccgcaaaagatggaggaagaggtgcaaagcggcgtgagaaaccaacgggtccagaacaattcctggtttcttcagaatgatttcacacaggggtttcagaattcggttgacacgtctgggtttaagtacccggttcaaccggtggggttcgggttcaggaattgaaccctgttatcgattaataatagtagtaatcttttaaatcggtaaataggtgggggattctttgggcttaactcgtgggggttttagattaatcctttagaaaagggaagaagaagaagaagaagaaggtgaaaattttggtcctcattttcagctaaagatgtagggtatacaaacgttcaatgaaccaatccacgagataaagcaatgacgggaccattttaatttgttacgacgtagttttcggcccacacaagcccttactcagccacatgaatcacatttgtacttcaaatgaacagcaagaattttttttactatatgttaggtttcgtgctaacaaaaaaaaaaaaaaaaaaaaaagggcggc

SEQ ID NO: 7740 - DNA, 939 bp, Glycine max
  misc_feature (835)..(835): n is a, c, g, or t
tacggcggcgagtaggcgaccccccgcgagagaaaaaaaaaaacattttcatcatcttcttcttctttttcatcaatcatcaccagtggttcttttccttctgagaagatcgaattgtgttttgcaaaaatgggagttccagagaaagaccctctttcccaattgagtttgcctcctggttttcggttttaccccaccgacgaggagcttctcgttcagtatctgtgccgcaaggtcgctggccaccatttctctcttccaatcattgccgaaattgacttgtacaagttcgacccatgggttcttccaagtaaagcgattttcggtgaaaaagagtggtactttttcagccccagagacaggaaatacccgaacgggtctcgacccaacagagtagctgggtcgggttattggaaagccaccggaaccgacaagatcatcaccaccgaaggtagaaaagttggcataaaaaaagccctcgttttctacgttggcaaagcccccaagggcaccaaaaccaattggatcatgcacgagtatcgcctcctcgactcttcccgaaagaacactggcaccaagcttgatgattgggttctgtgtcgtatatacaagaagaactcgagtgcacagaagacggcgcaaaacggcgtggttccgagcaacgagcacactcaatacagcaacggttcctcttcttcttcttcgtcccagctggaggacgttctggaatctctgccatcgattgatgaaaggtgtttcgcgatgccacgcgtcaacacgctgcaacaacaacagcaccacgaggagaaggtcaatgttcagaacttgggtgcanggggtttaatggattggaccaacccttcagttcttaaattcatcaccaatttcacttcgaggaataatcaagtagtacatgaccatactcagagaattgtgaac

SEQ ID NO: 7741 - DNA, 696 bp, Glycine max
  misc_feature (644)..(644): n is a, c, g, or t
tgcggggccgcgcgggcggctgcgtgttgtttacagatggggattgtgcctccgaaccaaaacctgaagcctagaaccttcttccgtctcacagtttgccggaatcagcgatggatcctcagcctgagccagttagctacatctgcggagattgtggaatggagaatacgctgaagcctggtgacgttatacagtgccgtgagtgcggttaccgtatcctttacaagaagcgcactcgtcgcattgtccaatacgaggcacgctgaagaaaactgctctgacattggcaagtaatttccatggaaattgttactacatctgtgttgtgatattgaagaactacttttaattctacagtaccattgcttttgggtgatgtttagaaaaggataaaaactttgaaatgtgaatatgttacaaatatttgtgtttcattagtttgcaattttatcactacgatggttaaaaaaaagtttcaactaggaaaaggattggtgctcttaatggatcaacttgctatgatttagaaaacagtctgcccacgcaacgcttcatttgtggcttgtaaaatgagttccattcgaaatataacatattttggcatagttatatgctttgttcggcgaggcctccttttcgtcaangaaatgggggaaacattgaaatacgagccaattgaaattgcaacaggtgaca

SEQ ID NO: 7742 - DNA, 606 bp, Glycine max
ttacggcagaagacgacagaacgagattttcttcgttgagcagaaagctaaaggctaaagcctagaaccttcttcctttacacctcgctggaaccagcgatggatcctcagcctgagccagtcagctacatatgcggagattgtggaatggagaatacgctgaagcccggtgacgttatacagtgccgtgagtgcggttaccgtattctttacaagaagcgcactcgtcgcattgtccagtacgaggcacgctgaagaaaactgctataacgtttgcaagtaatttccatgaagaaattgttactacatctgtgttgtgtgatattgaagaactacttttaattctacagtagattgctttttgggtgatgtttagcaaaagataaaaactttgaatgtgaatatattacaaacatccgtgtttcattagtttgcaattttatccctactatggttaagaaaaaagtttcatctaaaaggattggtgctcaaaatggatcaacttgctatgtgtttggtgttttggttatatagtctgcccacccaaagcttcaaatgtggcttgtaaaatgagttccattcagaaatagtaacatattttggccc

SEQ ID NO: 7743 - DNA, 2232 bp, Glycine max
ccacgcgtccgtacggctgcgagaagacgacaccacgcggcagcacaagcagaaaaggagaaggtttgggattttagagcgtatgtggttttggttggtaactgaagagtgtgtggaggaagaagaaggaatcggcggtgttcaactgacgatcgcatctcaaagtttggtcacgatcgttgctttgcttgttcgacatttttttcccttttggtttttctgaggcattttcttagttgtatggttgtttgtgttgttttctcgctgctgaaattatatatgggctaagggggcacttttcatgggaggtgtggaagatgaagaaccatccatgaaacgaatgaaattatcctctaaaggattagttggcttgtctaacggttcttctaaagagcctgttggaggcttgtccagtgacttgatggctcggcccctaccatccaaaggggacgaacatgttggttccaaaggggttataaagaaagaagaatttgtcaggataattgcaaaggcattatactctcttggttacggaaagagtggggcacatctagaggaggagtctggaatacctttgcactctcctggggtaaatctgtttatgcagcaaatacttgatggaaattgggatgacagcgtagccacattgtataaaattggtctggcagatgaaagtatggtcaggtcagcctcattcttaatattggagcagaaattttttgagcttctaaatggtgaaaaggtcatggaagcgttgaagaccttgaggacagagattgctccactttgcattaatagtagtagaattcgagaactttcttcctgcttagtttcagcatcttctaggctagacattctaagggtgaggtctcgatcaaagcttctggaggaattgcagaaactgcttccccctacagtaatgatacctgaaaagaggttggagcatctagttgaacaagccctaatcttgcaacgagaggcatgcccatttcataattcattggataaggagatgtcattatattcagatcatcattgtggaaaagatcagataccttccagtacattacagatattagaagcacatgatgacgaagtctggtttgtacaattttcgcataatgggaaatatttagcttcagcatcaaaagatcaaactgcaataatttgggaggttggcataaatggaagactgtctgtaaagcatagattatctggtcaccagaagcctgtttcttctgtttcatggagtcctaatgaccaggagctcctcacatgtggagtggaggaggctattaggcgttgggatgtctctactggcaaatgcctccaaatttatgaaaaagccggtgctggtctagtctcctgttcatggtttccatgtgggaaatatatactttgtggcttaagtgacaagagcatttgcatgtgggaattagatgggaaagaagtggagtcttggaaaggacaaaaaacccttaagatatctgatttggaaataacagatgacggggaagagattctaagtatttgtaaagccaatgtggtactgttattcaatagagaaacaaaggatgagagatttattgaagagtatgaaacaataacctcgttttctttatcaaatgataacaaattcttgttggttaatcttttgaaccaagaaattcatctatggaacattgaaggtgatcctaagcttgttggcaagtacaaaggtcataaacgcgcccggtttattatcaggtcttgctttggtggcctgaagcaagcttttattgctagtggaagtgaggattcacaggtttacatatggcacagaagctcaggggagctaatagaagcattggctggtcattcaggatctgttaattgtgtgagctggaatccagcaaacccccacatgttagcctcagccagtgatgaccgaacaattagggtatggggcctaaattgtctgcacaacaagtaccaaaatgttcacagcaatggcatccattactgcaatgggggaacttagtatgacaaactcattccaattgatttctcttttttatcattgcaattgtgtaaataccgttactattatctcaagtggaccattcatgccaaacatgcatgtgacttttcatatatatatctcataataaatccgtgttccattaatgtcaaaaaaaaaaaaaaagcggccgctctcgaccacccaagcggacgcaagctacagacgcgtgc

SEQ ID NO: 7744 - DNA, 1730 bp, Glycine max
atagaaaggatcatttattaatggcctatccctagcaccgccggtctgttgatcagacggtcctgattcaatcatgaagccacgatattccctgcgcacagcaccactcccccccgccgcgctcggccccccccccaacgccaaatcatcgcctctctttctctctctcactaattcgaagctgaatccgaatctcgaaactcgttccgctattatccatcaaaccgtggtgttgtcgtgtttctctctatcgctgcttcgactcgcggcaatgttattagggttagggttagggttacggtgactcttcgcgattgtagcggtaacagttcgtcgtcgcggttgcaaaagttttcgctcaattgataagttagagtttcggttatcatcatgtccgatccttcgaggggtcgcgtcaccattactctagggcgtagcggtcatgttgtgaagagggatgtatctgctgcagatgtttcttctttctcttctcttcactcagctggcactaagcgttctgtaagagacagaattggaagtaatgcagataattctgggtggtatggaaatggacatagcggcaataaacgacaccgaggagatgtaagcatgcaaaatggactggatggcaatgaccttcgattgaagctcatgcggaaaagtgcatctaggcagactgacagcaatggcaataagaggcatatggacctccgtgaaaaactttcaaaggcaagtcaccctctgactaacagttataattcaaagcagcatgggccagaatcaagggaaactagtctgttgaggcaaattccctcagctagaagttctgatgatttactgcgtatgaaatccatgagaagctcatactctccttggacattggatcatattaggagaagatcaccagatgggtttccaagtacttccagggggatttccccccaaagggatgtccaagacctacatagaaggcctgtaagcaggacactatgatggtgtcagttcagtttcatatgtaggtagggatgttctagaaacttcgaggcctccagtaagtgcacctcaatctttcatgtcacgctccacaatgtccacattacctccagtaactgccaagcctgtagcatctcatcctggccaacttcctccatcgggcagtgttgctcaaaggtcttcatatgtgggtgatgaacaagtacaagtacaacagtctcaccaaactgtggatggcctgttacatgcattgggacttcaaaaatatgccattctctttaaggctgaggaagtggatatgactgcattgaagcagatgggagaaaatgacctcaaagagcttgggattcctatgggtccaaggaaaaaaattcttctcgctctcttgcctcgtaccaagcgtcaacaatgatcgatgtctatcctgcatgatgctgaaactgacattattggaacaccagtctttacatttaattttattttttataatttggatgatggtaaagcacagatctgagaatgtttacgaatataacaccccttgtcccttgtagggttcaagtatccttttttgaaaaacaagttcgggttaaaatgctcgtctattggagatattggtctgtaatatatggtgtccgtattttctctctctttttttttaattgaaagaaataggaaattgaatcagagtatgttcaacttaacaaaaaaaaaaaaaaaaaaaaaaaaaaaaaaaa

SEQ ID NO: 7745 - DNA, 1333 bp, Glycine max
  misc_feature (1037)..(1037): n is a, c, g, or t
  misc_feature (1045)..(1045): n is a, c, g, or t
  misc_feature (1048)..(1048): n is a, c, g, or t
  misc_feature (1051)..(1052): n is a, c, g, or t
  misc_feature (1059)..(1059): n is a, c, g, or t
  misc_feature (1070)..(1071): n is a, c, g, or t
  misc_feature (1073)..(1073): n is a, c, g, or t
  misc_feature (1075)..(1075): n is a, c, g, or t
  misc_feature (1079)..(1079): n is a, c, g, or t
  misc_feature (1083)..(1083): n is a, c, g, or t
  misc_feature (1093)..(1093): n is a, c, g, or t
  misc_feature (1102)..(1102): n is a, c, g, or t
  misc_feature (1105)..(1105): n is a, c, g, or t
  misc_feature (1112)..(1112): n is a, c, g, or t
  misc_feature (1117)..(1118): n is a, c, g, or t
  misc_feature (1124)..(1124): n is a, c, g, or t
  misc_feature (1126)..(1130): n is a, c, g, or t
  misc_feature (1132)..(1132): n is a, c, g, or t
  misc_feature (1134)..(1137): n is a, c, g, or t
  misc_feature (1142)..(1142): n is a, c, g, or t
  misc_feature (1144)..(1144): n is a, c, g, or t
  misc_feature (1151)..(1153): n is a, c, g, or t
  misc_feature (1157)..(1158): n is a, c, g, or t
  misc_feature (1160)..(1163): n is a, c, g, or t
  misc_feature (1165)..(1165): n is a, c, g, or t
  misc_feature (1167)..(1168): n is a, c, g, or t
  misc_feature (1171)..(1171): n is a, c, g, or t
  misc_feature (1174)..(1174): n is a, c, g, or t
  misc_feature (1177)..(1178): n is a, c, g, or t
  misc_feature (1183)..(1183): n is a, c, g, or t
  misc_feature (1186)..(1190): n is a, c, g, or t
  misc_feature (1192)..(1192): n is a, c, g, or t
  misc_feature (1195)..(1195): n is a, c, g, or t
  misc_feature (1199)..(1202): n is a, c, g, or t
  misc_feature (1206)..(1207): n is a, c, g, or t
  misc_feature (1211)..(1213): n is a, c, g, or t
  misc_feature (1219)..(1221): n is a, c, g, or t
  misc_feature (1225)..(1226): n is a, c, g, or t
  misc_feature (1228)..(1228): n is a, c, g, or t
  misc_feature (1233)..(1237): n is a, c, g, or t
  misc_feature (1240)..(1240): n is a, c, g, or t
  misc_feature (1242)..(1244): n is a, c, g, or t
  misc_feature (1246)..(1250): n is a, c, g, or t
  misc_feature (1256)..(1256): n is a, c, g, or t
  misc_feature (1259)..(1262): n is a, c, g, or t
  misc_feature (1266)..(1269): n is a, c, g, or t
  misc_feature (1271)..(1276): n is a, c, g, or t
  misc_feature (1279)..(1279): n is a, c, g, or t
  misc_feature (1282)..(1285): n is a, c, g, or t
  misc_feature (1290)..(1291): n is a, c, g, or t
  misc_feature (1294)..(1305): n is a, c, g, or t
  misc_feature (1311)..(1311): n is a, c, g, or t
  misc_feature (1313)..(1318): n is a, c, g, or t
  misc_feature (1320)..(1320): n is a, c, g, or t
  misc_feature (1322)..(1323): n is a, c, g, or t
  misc_feature (1325)..(1331): n is a, c, g, or t
  misc_feature (1333)..(1333): n is a, c, g, or t
tccgggcagcttcgtttttgatattggagcagaagttttttgagcttctggcgggggaaaaggtcatggatgctttgaagacgttgaggactgagattacaccactttgctccgatagtagtagaattcgtgaactttcttcccggatgctttctccatgtggccaggttggttcttctaagcgagatattgtactggtgaggtctcggtcaaaactactggaggaattgcaaaagctccttcccccaacagtattgatacctgaaaagagattggaacatctagttgaacaggcccttgtcttgcaacgtgaggcgtgcctgtttcacaactcattggataaagagatgtcattatattcagatcatcactgtggaaaaactcagataccttctaggacattacagatattagaagcacacgatgatgaagtttggtatgtgcaattttcgcataatgggaaatatttagcttcagcatcaaatgatcgatctgcaatcatttgggaggttgacatgaatggtgaactgtctgtcaagcataaattgtctggtcaccagaaacctgtttcttctgtttcatggagtcctaatgaccaagagctcctcacgtgtggtgtggaggaggctgttaggcgttgggatgtctctaccggtacgtgcctgcaagtttatgaaaaaaacggtcctggcctcatctcctgtgcatggtttccaagtgggaaatatatactttctggcctcagtgacaagagcatttgcatgtgggatttagatgggaaagaagtggagtcttggaaaggacaaagaacccttaagatttctgatttggaaataacaggtgatggggaacacatgctgagtatttgtaaagacaattcaatactgtacttcaacaaagaaacgagggatgagagatatattgatgaggaccagacaataacttccttctctttatcaaaggatagcagactcttgttggttaatctttttgaaccaaaaatacatctttggaatataaaagggatcctaacttgncggaaagnccnaanncccaacnccccccggtcnntntnaaancttnccctgggggntaaacaacnttnattgctnggggnnggaggntnnnnngntnnnnttggncnaaaaccnnngggnntnnnnangnnttnccnggnnttttngannnnnanctngggnnnngganncccnnncccccnnntttnntnccccnnnnnccngnnntnnnnnttgggnccnnnncccnnnntnnnnnnccnttnnnnccccnnggnnnnnnnnnnnngggggnannnnnnancnncnnnnnnncn

SEQ ID NO: 7746 - DNA, 753 bp, Glycine max
ttgacgcgtgggttggaaaggacaaagaaccctaaagatttctgatttggaaataacagtcagctacgtaggccccccccccatttgtaaagacaattcaatactgtacttcaacaaagaaacgagggatgagagatatattgatgaggaccagacaataacttccttctctttatcaaaggatagcagactcttgttggttaatcttttgaaccaagaaatacatctttggaatatagaaggcgatcctaaacttgttggcaagtacagaagtcataaacgcagccggttcgttatcagatcttgctttggtggtcttgagcaatcttttattgctagtggtagtgaggattctcaggtttacatatggcacagaagctcgggggatttaatagagacattgcctggtcattctggagcagttaactgtgtgagctggaatccagctaacccacacatgttagcctccgccagtgatgaccggacaattcggatatggggcctaaagcgcctgaatgtaaagtaccctaatgtacgcaccaatggcgtccattactgcaatggcggcgaatttagatgaacctacgcaaactgtttccaattccatttctttttttaaccttgcaattgtacgtgtaaataccttcactatcacaagtagacgacattcatacctaaacatgcatgtgacttttcatcaatctcaaaataaattcttattttattttaaaaaaaaaaaaaaaaaaaaaaaaa

SEQ ID NO: 7747 - DNA, 869 bp, Glycine max
tctcgagccgaatcggctcgagtacggctgcgagaaggccccgtacggctgcgagatgacgacagaaggggaggaaaaaaatttagatccgcccagtgacattcccgtttccggctctctccgaaatttcttagattgcttctgtgtcagagaaatcagtgcaacaaaaatggacgacaccgaaaccaaaggaagaatcgaagaaactgtgcgtaggattttgcaagaatcggacatggacgaggttactgagtctaagattcgaaaacaggcctccgaacaccttggcctcgacctgtctcagccttatttcaaagcctttgtcaaacaggtcgtgaaggcttttctccaagaagaagaacaacgacagaaacaacaacaacaagatgaagatgaagaagaagaactaggaggaggttccaagggcaaggagtacgatgatgaaggcgatctcatcatctgcaggctttcagataagagaagggtgacgattcaggatttcagagggaaaacattggtctccattcgggagtattataaaaaggatggcaaggaacttcctacttccaaaggaataagtttgacagaagagcagtggtcagcctttaagaaaaatgtgcctgccatagaaaaagccattaagaaaatggagtcaagttgacacatggctttgcttgtttctttttgttgaatatatcctgcaccgcaccatggtgtctctttgatattggaccattttgttaaaggacttggagtcactgtttaagtgttttgcaacctgagtgcctaaagccatttcaggaagactaaactgaatgccagtaactttaaaaactcaatacatttaattctgttatttccttggaaaa

SEQ ID NO: 7748 - DNA, 1089 bp, Glycine max
tacggctccgcgacgtcggcaccacgcgactcatcgttctctctgttctttctctctcaaaggaaagaaaaggaaagaaaagaaaagaaaaagaagagagtgtaggtaaacagaagcacacactacacagttaccaaaatcaggttcaaacgcacagatctgggagaagagaagaagaagaagaagaagatgggacaggatcagaaccagagatcgctgatctacgcgttcgtgtctcgcggcacggtgattctcgccgagtacactgaattcagtggcaacttcaacacaatcgcgttccagtgcctccagaagctccctgcctccaacaacaagttcacctacaactgtgacggccacaccttcaactacctcgtcgacaacggattcacttattgtgttgttgcggatgaatcgattgggagacaggtgcctgtggcttttctggagcgtgtgaaggatgactttgtggccaaatacggcggcggaaaggcagcaaccgtggctgcgaacagcctgaacaaggaattcgggtctaagttgaaggagcacatgcagtactgtgttgagcatcctgaagagataagcaagcttgctaaggtgaaagctcaggtttctgaagttaaagatgtcatgatggagaacattgaaaaggttctggaccggggggaaaagatagagcttctggttgacaaaactgaaaatcttcatcaccaggcacaagacttcaggaattctgggaccaaaattcgtagaaaaatgtggctgcaaaacatgaagataaagctgattgtgttggcgattttgatagccctgatcctcataatagtcctttctgtctgccgtgggttcaattgtggaaaataaggcatcgttttccgacgaggagtcattttaccttgtgattattatatgaggaaaagatatcgaatgaatgcatgattttgtatgtagtaaaagtatcagatcgcttatactgttcattttaaaggtttcacagtatgatataagaatgcttttggaagtattttttttgtttgtctattgtagttcgattttcgttcattcatcttatcatcattctctcgc

SEQ ID NO: 7749 - DNA, 790 bp, Glycine max
attattgttgttgtaaggcaagtgagcgtaggttggaagcagagagatggaaggttgggacccgaatacgaagtcgacgctgacacagatccctctgctgacgacgaaggcgggtccacgagacggagcggcatggacgcagaggcttaaggaagagtacaaggctctgatagcgtacacgcagatgaacaagtccaacgacaacgattggttccgtatctccgccgccaatccggaaggcactcgctggaccggtaaatgctggtacgttcacaacctcctcaagtacgaattcgacctccaattcgatgtccccgtcacttacccttccaccgcccccgaactcgaactccctcaattggatggcaaaacccaaaagatgtataggggtggaaagatctgcttgactgtgcacttcaagcctctctgggccaaaaattgccccagatttggtattgcacatgcactttgcttaggtcttgcaccgtggcttgcagcagaggttcccatcctcgttgattctggtatgatcaagcacaaagatgacaccgcaaccacatcaactgaatcttagttagcatgtcttgctaaaactgtagaagtataattttgttacctgattggtcaaaggaaataaaatgagctgtttgaccacaaatttacaggatcttccttatgtatccgcagatattgacatactctggcaaattaatatatattgcatatgcaacatggctgatgaattagtgattttgatctaagcttgattctcaatctaattgtcggttac

SEQ ID NO: 7750 - DNA, 1388 bp, Glycine max
tcgagtcagctacgtaggccccccccccgacacatcaaaacattctttgcagtaacaacttcaaattcatttgcaatttagcagcaaagcaatctatagccttcgattaccaacatgaaaatcaagcaaattctcttgttctcactcctactacttgccccctttttctcaatcaccactttagctcaatcaccagctgcagcccccaaagccccagcaaaacctgcaccttcaaaacctgctcctgccacaccggctccagcgcccgcaaaaccattagtcccttcattaccccagtcaccctcttcaggtgttgattcttctggcagccaagacattgtgaagatcctaaggaaggccaagtcattcaacactctaatccggttgctgaaaaccacccaaatcatcaaccaagtgaatgcacagcttgtgacctcaaaaaacggaggcttaaccatccttgcaccagatgatggtgcattttcagaactcaaagcaggttactttaactccctaggagataggcaacaaaaagcactgatacagtatcatgttcttcccgtttatgtgtccagctccaactttgatgctctgagcaaccctgtgctgacattggccagtgacagccccacagggtatcagataaacgtgacagcatatggtaacagtgtgaacatatcaactggggtggtgaatgccacactcacaggcattgtgtacactgataagacacttgccatatatcatgtggacaaggtgctcattcctttggacttctctaagccaaagcctatagctccagcaccagctgtggccaaggctcctaaagctgataaggagaactcttcagcagaagatgaggaccaggctcaggcagccaaggacagctctggtgcaacaagttttgttagcattcatggaacaacgttggtgtcctttggagttgctattcttgcagcagcagctacaatgtcgttttgattttgaagaacatccatttctccaagtttctaatatgttttgaggacaagcacgcaactgctgtggagttctgtttatgttgttttcttcttgagctgtgtattgagtaggaaaagtggtgtctgtgagttatgtgaacgtttgttctgttcttgttttatcatcaagcgaaaaaatatgtgattgttttattgtcaaaggcaaaaggattatctgcttgtttttatgcttttcagttatatgcaccgctcggaatcttcttcctcttcctcgtctatgggcagcatcaattgcagcctaatttgttgaaactgagaccggggaagcatattagtctcggaaatatgtataactatgaaataataataataatatttttgaattttattaaaaaaaaaaaaaaaaaa

SEQ ID NO: 7751 - DNA, 1449 bp, Glycine max
  misc_feature (1424)..(1425): n is a, c, g, or t
  misc_feature (1427)..(1427): n is a, c, g, or t
tcgagtcagcttcctcggccccgcccccccctctttctcttgagataagatttgagtttgggcatgtgtgagctgtggctttgcagggaagaagagtgtcagtagaaaataaatgtcctcttcccagggacactctctatttcacagatctatatctaagtgtcggtgatcccctttctccttccttctctgagagacaatgacaatgacgtgggcgcgattcgattcgtggaagcagcaatactacaccacaagcggcgtggtggtaggttacgcagtatgctccagcctcctggccatcatcaacaaatacgccatcaccaaattcaactacccaggcctcttaaccgcgctccagtacctcacctccgcactcggcgtctacgtctttgggaaattagggtttctccaccacgaccccttcaccctccccaccgccaaaaaattcttccccgccgccctcgtcttctacctcgccatcttcaccaacaccaatcttctccgccatgccaacgtcgacaccttcatcgtcttccgatccctcacccctctcctcgtcgccctcgccgacaccgtcttccgcagccagccctgcccctccaacctcaccttcctctccctcctcgtcatcctcgccggcgccttcggctacgtcgccaccgactccgccttcaccctcaccgcctactcctgggccttcgcctacctcatcaccatcaccaccgagatggtctacatcaagcacatggtcatgagcctcggcctcaacacatggggcttcgtcttctacaacaacctcctctctcttatgatggctccctttttctccttcgtcaccggcgagaacgtcgagattatcgccgcggttagatccggcggccttttcgaccccgccgccttctacgccgtctccctgtcttgcctcttcggcttgctcattagtttcttcgggttcgcggccaggagggccgtttccgccaccgcgttcaccgtcaccggcgtggtgaacaagtttctcactgtggcgatcaatgtacttatttgggataagcatgctagccccattggtttggtttgcttgttttttaccattgttggtgggattctttaccagcagtctgtgactgggcttgggagtgctccggcccagcccaaacagttggatactgaaagcaacaaaggtggtggcgaagatgatgacgatggtgatttgacaggtgagagtgatggcttgattaaagctacttctatataagcatttgtactatttattttcacgtttaagctgtaatgcctgtataattattgtcttatttcagcaacattaggaaagaaattatatgcaatgtgaggtgtattgttttcagaaggatatctatggaattttaattttgcttccaaaaaaaaaaaaaaaaaataaaaannanagcggccgctctccaggatcca

SEQ ID NO: 7752 - DNA, 1904 bp, Glycine max
tttgttcgcccttttttttttttttttttttttttttttttttaagaaccagagtgatgtatttgtattgccaacttttggtatcaatgttgccttaaattgtactccaacatcacacggatccttattctctatctaaggtgtacatgtacatctcaattctcaaaagctctatttacaaactgtggaaaatggaaattattctatgcagaaaaattctgttatatattgcaatgttcacatgattatcctacagtaaaatactgatcttccttcgctgtcaaatggattcaaatccatatagccagttctgtttataatccgtctctgaagcggattatgcagtgtaacgggttcccttgactattttcagctcattatgtatgtcttacacggtgccttgttgtcgtaaaggttgagtttcagcatgaactacattattttgctggtccaatggcatgtattgtgacatgatagccatgatctcagagtccatgtatgaccggagcctatatttgtagaacacgtaaccagctagaccagcaccaacaacaactgctatgaccacaaaggcaaggaaccgtccaaattttgattcacttctttcgatacaagcatcttgttcctttatatataggaggttccccttgcatttacaatcgtaactaccccaagtattcttgcagctgcagccatcacactgacaagcacttcgttccttacattcatcaacgtcttcgcatttattagtaccatccccacgaaacccaactgggcactgacagccatttaccttggagtctgagcaagctgagaaagttagtccttttttagtttcaggaccaacaaccaccattgtttatagaacaccttgcaggtccaaaagcttcacatgttgtataaccatcacccttatactgaacaccgttcacaacagggcactcgcaaactcttcccctgaaagtatccttgcaagcagttatgttagcatgtttgtcttgccaacatcctccatttctttcaagacactcattagtctcaacatctccacttaaacaaactgaaggttcagtagtctccttaaatccagaacatacagccttgagtacagcagttctctccaattttcctctatactggacattgtttataaccaacgttggcaagatggtgacatcaccgcgagatcctctaccgatctggacttgttgctcattctttagcacttcattctccacatctgcttcaggatcacccatgcatttcttaattttatccataggcagatctaatgatttcatgacttcctcagcacaatccttgctgtatcttttctccttcatagaacatctgacatggaaatctgtcacataatcccaccagacccatgaacggttgctctcattggcaactctatgaacacaaagctgcctcaaattttcatacaccacatccttcccttcatatccctctccaaaatccttctccggatctggagcacaatatctcccatggtttatacattgagacttgcactgactgctaagaatgaagggtggtggacaaaaccaagttatgtagtgtggagtgaacaaggtgtaaccacccctctcaagaatctgagcatgacccttaaaattcttcacaaaattcatctgttcgtcgcaacgagctccacattcgtcattgctgttggtccagaactcatactcaaccctgctgtcagggtgaggtactgactctctccaatcaattcttagcaaaacttcatctttgttattcaaagcgtctttcagcgtatcaccaacggatttctctatcagagccgatggaattgtgatcttctctatgtagccatctgcatcagagctctcggggggggggggcctacgtagctgactcga

SEQ ID NO: 7753 - DNA, 1096 bp, Glycine max
  misc_feature (1046)..(1051): n is a, c, g, or t
attcttcccgcgattttcctttgtttctatggcttctgcagaagtagagttccgatgctttgttggtgggcttgcttgggccaccgaccacgatgctctcgagaaagccttctctcaatttggcgaaatcgtcgaatcgaaggtcatcaacgatcgtgaaactggaagatccagagggtttggatttgtgaccttcgccacagagcaggcgatgagagacgcaattgaaggaatgaacggccagaacctcgacggtcgtaatataaccgtgaacgaggctcaatcccgtggaaaaggtggcggcggcggcggcggcggctacggaggaggtggtggtggttacggtggcggcggaggttacagccgcggtggaggaggatatggtggcggaggaggccgccgtgaaggtggttataaccgcaacggtggtggaggaggatatggtggcggtggcggcggatatggaggtggtggaggttatggtggcggtgggagagaccgtggatatggtggtgatggtgggtcccgctactcgagaggaggcggtggttcggatggaggaagctggaggaattaagattacgtgaatttttaggtttttagtgggtgaaaaaatggggggaggttgtgttgtatcatccccttgccttgatattaattgtgataattttaggtttggaatatgcgttgtggtttgagcatctgttactgttatggttgggtttttgacatctgataatgaatctgtgtactggaaggattactgggtcttggtcatccagattgaaatacctgaaaatccttgctacttatacatctcaatctgctttgcagcttggttagaagacgataagtcccaaacaagtgttcaatgttcttttcttaccaattctatatcaaaattgtattaaaaaaccaatattgtactcgagtgaatttgctaactcaaaataaaatgaccacaaatttcaggggatatattgggcaagacatctgcaaaacaggttttatttgaattgtattgctcgagtcttatgagaagcatnnnnnncatacgattaacaattgaatcaaggaataactcaaagtgcgtgtg

SEQ ID NO: 7754 - DNA, 630 bp, Glycine max
gctccggccagttgggcgtgccaaaccttcaaggcaaagtaacactctccacgatcaaggagaacaatagtgggacgataagactgaattttggagggcttatcgccctcgaagttctcacatccgtgtgagcctttagcgggatacaccacagagccaacgatgaatcctccgtagtccggaagaccgaagttaccgatggcgccatcgcgcttcgccttcagcttatgcggggacagaacagttatactgctcttctccaccacaaacctggcatcaacaaccaccaccaccaccaacaacaacaacaaaacagccgcagccacgaaaggtttcatggtttgtttgtatgtgctgttgttgttggcagtgaaaaacagaagaaaaaacaggggaagcaagagtaagaagaaggacgcgtgggaaggaagactttgcaagttaccggtggaaagttttttgcttaaagagagtgttgttgtgttggtttaaggtgtggagggttgcgtttcgcaatcaaacggtgacgtaaagggagggtaagcaaacgacaggtgaaaggaacaggagaggtggtggtggacggagtcaggggagctaacttccacataaacagaacagccggacgaa

SEQ ID NO: 7755 - DNA, 809 bp, Glycine max
tacccctgcgagacgacgacagaaggggaagtatataacttcttctaggtgtccggaaatcgttcctatcatcacttctcaaatctcgaaccctctcgttcgtgccgatcactaggtcacacttcatcaatggcgggtagaggcaaaaccctaggatccagcgccgctaagaaggccacctcaaggagcagcaaagccggcctccaattccccgtcggtcgtatcgccaggttcctcaaggccggaaagtacgccgagcgcgtcggcgccggagcccccgtctacctcgccgccgttctcgaatatctcgctgctgaggttttggaattggctggaaacgctgcgagagataacaagaagactcgaattgttccacgccacatccaattggcggtgaggaacgacgaagagttgagcaagcttctaggagatgttaccattgctaacggcggtgttatgcctaacattcacaaccttcttcttcccaagaaggctgggggctcatccaagggtgctgctgctgacgatgactcttaaatagggattcactgttcacaaagttcttgaatttagattctatgtttgctctcttttttttttcctttttatttgtagttatgataattgtgccctttgtagtagtagttaggttttcagtcagatgtgtttaaagaatgctcttacgcatcaagaaaggttgttcaaaatttaaattattttaatgtcacctttgagtcttgatctagcatttgatttctaaatgcattctatcaaacttcaatttaaactgtttgattaggctttgaggg

SEQ ID NO: 7756 - DNA, 795 bp, Glycine max
cgcgtacggactctggttattcagctgcgaaccgggattgccccatttcgctcatttttatggaaaatgttctttgagaaacacgaagattacaagttcaatggtttggcatggctctttttgggtggcccctacaagcagctcattgctatataaggaggaatttgagaagatgcaagagaaatatcctgacaacttcaggcttgacttcgctgtgagccgagagcaaacaaacgagaacggagagaagatgtacatccaaacccgaatggctcaatatgcagaagagctgtgggaattactgaagaaggataacacttttgtgtacatgtgtggactaaaaggaatggaaaagggtattgatgacattatggtgtcattggctgccaaagatggcattgattggactgagtacaagaggcaattgaagaaatcagagcaatggaatgtcgaagtctattaatttctgttcacttgcacaaatatcatctcctactttgtgctgcaacaagtctatcaaccctcctgcgttgtgtagatatatgacgtccctgtaatttttctttgacgatttttatactgttcatgaacaacttcaatgccagttttacaagtactatttttgagggatgatgcaatatagatgaatccaagttcactatgtcatttccaaattaaaaaaaaaaaaaaaaaaaaaaaaaaaaaaaaatgcattatatatcccaaaaaaaaaaaaaaaaaaaaaaaaaaaaaaaaaaaaaaaaaaaaaaaaaaaaaaaaaaaaaaaaaaaaaaa

SEQ ID NO: 7757 - DNA, 1605 bp, Glycine max
cattccaacgtacacatatgtaaggtgatagttgaaagccggagataccatcacagtgtcacaccacgtacacttatcctaatataatatccgccactgcatttgcttccaaatctcgtccactcaaatcttatactcctctcttgtctgtgtaatcaaaacaacaacattcattcatactcacttccttgcctactacacattcttcatcacttcattcaacatttctccccttagcttgtttcaccaatggctgctgcggttagtgctgcagtctcttttccatccaccaagtctacctctcttccaagcaggacctccctcattgccccagagagagttgtgttcaagaaggcttcattgcaaaacagagatgtttctagcagtggacgggtagtttccatcagagctcaagtcaccactgaggcaccagccaaggttgaaaaagagtccaagaaacaggatgaaggtgtggttgtgaacaagtttaaacccaagaccccttacattggtagatgcctgctcaacacaaagatcactggggatgatgctccaggagaaacttggcacatggtcttcagcaccgagggagagattccttacagagaaggacaatcaattggggtaattccagatggtattgacaagaatggcaaacctcataaactgagattgtattctattgctagcagtgccattggtgattttggagattccaaaactgtttctctatgcgtgaaacggctggtgtacacaaatgaaaatggagaaattgtcaagggagtctgctcaaatttcttgtgtgacctgaagccaggagctgaagtaacaataactggacctgttgggaaagaaatgcttatgccaaaagatccaaatgccaccatcatcatgttgggaactggaaccgggattgccccatttcgctcatttttatggaaaatgttctttgagaagcacgaagattacaagttcaatggtttggcatggctcttcttgggtgtccctacaagcagctcattgctttacaaggaggagtttgagaagatgcaagagaaaagtcctgaaaacttcaggcttgacttcgctgtgagtcgagagcaaacaaacgagaaaggggagaagatgtacatccaaacccgaatggctcaatacgcagaagagctttgggaattactgaagaaggataacacttttgtgtacatgtgtggactaaaaggaatggaaaagggaattgatgacattatggtgtcattggctgccaaagatggcattgattggactgagtacaagaggcaattgaagaaagcagagcaatggaatgtcgaagtctattaatttctgttcacttgcacaaatatcatctcctactttatgctgcagcaagtctatcaaccctcctgcgttgtgtagatatatgacgaccctgtaatttttctttgacgatttttatactgttcatgaacaacttcattgccagttttactagtactatttttgagggatgatgcaatatagatgaatccaacttcactgtgtcaaaaaaaaataataaaaactcgcgtttaatgagaagtacttaggtattgttggtacaaaaaaaaa

SEQ ID NO: 7758 - DNA, 1153 bp, Glycine max
  misc_feature (1)..(9): n is a, c, g, or t
  misc_feature (12)..(17): n is a, c, g, or t
  misc_feature (21)..(21): n is a, c, g, or t
  misc_feature (779)..(779): n is a, c, g, or t
  misc_feature (784)..(784): n is a, c, g, or t
  misc_feature (791)..(791): n is a, c, g, or t
  misc_feature (797)..(797): n is a, c, g, or t
  misc_feature (799)..(799): n is a, c, g, or t
  misc_feature (801)..(803): n is a, c, g, or t
  misc_feature (808)..(808): n is a, c, g, or t
  misc_feature (812)..(812): n is a, c, g, or t
  misc_feature (814)..(814): n is a, c, g, or t
  misc_feature (816)..(816): n is a, c, g, or t
  misc_feature (818)..(818): n is a, c, g, or t
  misc_feature (829)..(829): n is a, c, g, or t
  misc_feature (831)..(832): n is a, c, g, or t
  misc_feature (835)..(836): n is a, c, g, or t
  misc_feature (846)..(846): n is a, c, g, or t
  misc_feature (849)..(849): n is a, c, g, or t
  misc_feature (852)..(853): n is a, c, g, or t
  misc_feature (858)..(858): n is a, c, g, or t
  misc_feature (860)..(860): n is a, c, g, or t
  misc_feature (862)..(862): n is a, c, g, or t
  misc_feature (866)..(866): n is a, c, g, or t
  misc_feature (870)..(870): n is a, c, g, or t
  misc_feature (876)..(878): n is a, c, g, or t
  misc_feature (880)..(881): n is a, c, g, or t
  misc_feature (885)..(885): n is a, c, g, or t
  misc_feature (887)..(887): n is a, c, g, or t
  misc_feature (902)..(903): n is a, c, g, or t
  misc_feature (916)..(916): n is a, c, g, or t
  misc_feature (918)..(918): n is a, c, g, or t
  misc_feature (925)..(925): n is a, c, g, or t
  misc_feature (927)..(928): n is a, c, g, or t
  misc_feature (933)..(934): n is a, c, g, or t
  misc_feature (938)..(938): n is a, c, g, or t
  misc_feature (944)..(944): n is a, c, g, or t
  misc_feature (951)..(951): n is a, c, g, or t
  misc_feature (955)..(955): n is a, c, g, or t
  misc_feature (977)..(977): n is a, c, g, or t
  misc_feature (980)..(980): n is a, c, g, or t
  misc_feature (983)..(983): n is a, c, g, or t
  misc_feature (990)..(991): n is a, c, g, or t
  misc_feature (997)..(998): n is a, c, g, or t
  misc_feature (1006)..(1007): n is a, c, g, or t
  misc_feature (1011)..(1011): n is a, c, g, or t
  misc_feature (1023)..(1023): n is a, c, g, or t
  misc_feature (1026)..(1026): n is a, c, g, or t
  misc_feature (1028)..(1028): n is a, c, g, or t
  misc_feature (1030)..(1030): n is a, c, g, or t
  misc_feature (1040)..(1042): n is a, c, g, or t
  misc_feature (1044)..(1044): n is a, c, g, or t
  misc_feature (1049)..(1049): n is a, c, g, or t
  misc_feature (1054)..(1054): n is a, c, g, or t
  misc_feature (1056)..(1056): n is a, c, g, or t
  misc_feature (1058)..(1058): n is a, c, g, or t
  misc_feature (1074)..(1074): n is a, c, g, or t
  misc_feature (1078)..(1078): n is a, c, g, or t
  misc_feature (1080)..(1080): n is a, c, g, or t
  misc_feature (1089)..(1089): n is a, c, g, or t
  misc_feature (1092)..(1092): n is a, c, g, or t
  misc_feature (1099)..(1099): n is a, c, g, or t
  misc_feature (1101)..(1101): n is a, c, g, or t
  misc_feature (1105)..(1105): n is a, c, g, or t
  misc_feature (1108)..(1108): n is a, c, g, or t
  misc_feature (1111)..(1113): n is a, c, g, or t
  misc_feature (1118)..(1119): n is a, c, g, or t
  misc_feature (1130)..(1131): n is a, c, g, or t
  misc_feature (1133)..(1133): n is a, c, g, or t
  misc_feature (1138)..(1138): n is a, c, g, or t
  misc_feature (1141)..(1141): n is a, c, g, or t
  misc_feature (1143)..(1144): n is a, c, g, or t
  misc_feature (1152)..(1152): n is a, c, g, or t
nnnnnnnnnagnnnnnnaggntatttgaataaattcttttcctttaacatcttctataataatgcatttaaacatgccagtacctttcactactggttattccacattcgaagaaataaactcacccactaagcactacacaaatcacacagagttgcaagagaaagataaaagaagatggcgactcttgattccgacgtgcctatggttcccgccggcgagccctcgagcagcgccggtccttcttccaagaagcccaagcgcttcgagatcaagaagtggaacgccgtcgctctctgggcttgggacatcgttgtcgataactgtgctatctgccggaaccacatcatggatctctgcatcgagtgccaagccaaccaggctagcgccactagcgaggaatgcactgtggcttggggagtttgtaaccatgcttttcacttccattgcatcagtcgatggctcaagactcgtcaagtttgtcctctagataacagtgagtgggagtttcagaaatatggccactagaattatgatgtggttgagctcctcggacatttggaccatctatcctagattttgaatatttactgttctatctgttattttcgtttgcttgtgtactgaatttattatgttcaagaaatcagcttgtctgatggaatttgatatacgccgtggtaacatgtaaagttttactttaatgttttatgtatttcatatgcttcctttcagctgtttgtgtttgtggtgcttaccccctgcgtccgggggttttncgtanttctttnttgggngncnnngtggngtgncncngnctctttacctntnnagnngttgattttntanttnntagtntngntttntatntttttnnntnngtgnanatttttttctgtgtnnattacaatctaantngcgttgntnntaatnngtanttttgngttgctntgtntttttataacaataattatttnttnagnaattgtnntttttnngctttaanntttnactgtttttttnttngncntaatataatnnntnttgtngtgtntntntttaagtttgtttttntatntntgtttgatnttntttattnanattnatntgnnnatttnntgtattgtttnngntattnttntnntttgtatng

SEQ ID NO: 7759 - DNA, 837 bp, Glycine max
cccgggttcgaaccaagcgtccgccacgcgtccgcccagcgtccgatgtattcaacattcaaagaaataaactcacgcactaatcactactacacaaatcacacacacacacacagagttgcaagagaaagagagcgagattccgatggcgactctggattccgacgtgcctatggttcccgccggcgagccctcgagcagcgccggtccttcttccaagaagcccaagcgcttcgagatcaagaagtggaacgccgtcgctctctgggcttgggacatcgttgtcgataactgtgctatctgccggaaccacatcatggatctctgcatcgagtgccaagccaaccaggctagcgccactagcgaggaatgcactgtggcatggggagtctgtaaccatgcttttcacttccattgcattagtcgatggctcaagacccgtcaagtttgtcctctagataacagtgagtgggagtttcagaaatatggccactagaactatgacgtggttgagctccttggacatttggaatgtctatcctagcttttgaacatttacagctctatctgttattttcctttgctttcctactgaatttattatgttcaagaaatcagcttgtctgatggaattttatatacacggtggtaatatgtaaagttttattttaatgttttgatttacgtatttcatatgcttcctttcagctgtttgtatttgtggtgtttgagttgtgtgagttggttaatttttctccctttccatgtattgctctgtagttgatgataattgataatggttcttatttacttcaattttaaatcgcattcaagcat

SEQ ID NO: 7760 - DNA, 955 bp, Glycine max
gggggcccctttttcttgtttttgctgttcaggggtctttttttgagacccagattaatgtatatatatattggacttctaaccccctttatatgcgagctagaattgaagttggccatataacataatacaacactatccttgcttcttgttagacatggcaactactacactcatgaagcttgctttcatgcttctcatgaaccttgttatctgcagcgcagaatcttccatcggcagaaagtccaatcctaacccagaagagttcgtgaagtcctcgtgcagggcaacacggtaccctgttctatgcgtcaagtctctgttggcctacgcaagcgtgattcgccgaagcgaccgacaactagccacgaccgctctgtcggtaagcatatcgaggagccgatcctccgcatggttggtgaagaagatgttgaaagcgagaggcatgaagcctagagaatacagagcggtgcaagactgcgtggagaacattggtgacagcgtggaccgtctcaggcaatcggttacggagttggggcggacgggcgaggacttcgtctggcacatgagcaacgtccagacttgggtcagcgctgccctcaccgacgacagcacttgtcttgacggcttcgctggttccgccatgaacggaaacgtgaaggctcttataaaggacaggattgtccacgttgctcaagtcacaagcaacgctctcgctttggttaaccgctttgcctcaagacacccaagtgctactcaaactccttaactcttatatatttctaatatccccagcatgcctttctgtctttttaaatttcttctcttggaaaatcctacctatgctactaagtctttgtaatatagggcttttttatatatgctgtatctaactagttcctattcaataattgaattcccttttgtcagacgcaattcaaaaaaaaaaaaaaaa

SEQ ID NO: 7761 - DNA, 3190 bp, Glycine max
tcgagtcagctacgtagggcccccccccacctttccctttctctctttttttccttcatcaatggtggcggtaacttttgagaaagctctgtcttttggctcttggagctcaaaagcaagagcaccttagattataagatcggtttcgctttcattctgtcccttttctcagagagagcaacgaggtcttatagttaaatctgatgctgaagattgaggaacttaaagtttgaagtttgaggagtgtttgtgattacaaagaatatggatcaaaatagggatgagagctggaggaaattagtgaagaagatgcttcctcctggtgcttccatacctgctgatgcttctaatcttgattactccatagctatggaatatgttggtccaccagtttcatatgaagtaccaagagttgagccctttgatacaaactcaagagcaattcccactgctcaaccactctctggatcacaaagatcaaatactcacggggggcatatggtgattgaaccaatccctctaccggtgtctcgtattgctgttggcgtaacgagctctcctaatcaaagtccaagggtgtcaggaagttcagattctgtggtttctgtcttacagaacccagatctttcttctgcatcaccttcggcttcgcctgcttcagttcataatcttccaagcaatcctcctaagccagctaatgaagcgaagagggccccggttgtcacttttaatactgttgatagacctcagaggaaagaggtggaggttgtgaagccagtttatgcggaatacgttggagtttcgaacgaaaggaagaaaaagaaaataagagtttgttacaggtgcggaaaagggaagtgggaaactaaggagtcttgcatagtttgtaatgccaagtattgcagcaactgtgtgcttagggcaatgggatcaatgcctgaaggacgcaaatgtgtaacatgcatttgtcagccaattgatgaatcgaggagactgaaattgggtaaatattcaagggtgttgtcccgactgttaagccctctagaagtcaagcaaattatgaaagcagagaaagaatgttctgctaatcagcttcggccggagcagctgattgtcaatggattgcccctgaagccagatgagatggctgaattacttggatgccccttgcctccgcgtaagctgaagcctggtagatatcggtatgacaaagaatctggtctctggggaaaggagggggagcaacctgacagaatcataagttcaaacttgaatttcactgggaaacttagccttgatgctagtaatggaaacaccgaggtttacatgaatggtcgagagatcacaaaacttgaattgagggtactcaagctggcaaatgtacagtgtccacgtgatacacacttttgggtttatgatgatggtcgttatgaggaggaaggtcaaaataatattagaggaaacatttgggagaaggcctcaacaagattcgtatgtgccttattctctctaccctttccccatggtcagcctcatgggcaaaaggatgaaactagtcactataccacagttcctaagtatctggaacagaaaaaaactcagaagcttcttcttcttggaattcaaggatctggtactagcactatatttaagcaggccaagtttttgtatgggaacaaattttctgctgaagagcttcaggatgccaaactgatgatccagagtagcatgtataagtatcttagtattttacttgatggaagagagcgctttgaagaggaggctgtttctagaatgaatggacaaggttctcccggtcaaactatggaaacaggtagcaatggtgaagcaagtaatactagtgaatgcatctattccctcaacccaaggctaaaacatttctctgactggctcctggacattatagccactggggatttagatgccttcttccctgcagccacgcgggaatatgcaccattagttgaagaagtatggagggaccctgcaatacaagaaaccttcaaaagaaaagatgagcttcactttcttccagatgttgccgagtacttcttaagccgggctgttgagatatctagcaatgaatacgaaccttctgaaagggacatagtatatgcagaaggggttactcagggaaatggtttggctttcatggagttttctcttgatgaccgtgtcccaaagtctgatacttatttggagaacttggatgctcagctgccaccactgaccaagtatcaactcattagggtgaatgccaagggcctaaatgagggctgtaagtgggttgaaatgttcgaagatgttcgagcagtggtcttttgtgtttccctaagcgactacgatcagttgtcgctttccccagacagtagtggcagtggaacacttgttcaaaacaacgaggtacaaagcaaggagcttttcgagacgatggtgaggcacccttgcttcaaagacacccctttggtgctagtccttaacaagtatgatatcttcgaggaaaagattagcagggtgtccctaaatacatgtgaatggttcagcgatttttgtcccgtgcacgcacatcataataaccagtcactggcccatcaagcttacttctatgttgccatgaaattcaaggacctttatgcatccctcacaggtaaaaaactctttgtggcacaagcaagggcaagggaccgagtaactgttgatgaggcattcaagtacataagagaggtcctcaaatgggatgaagagaaggaagagaatttctatggtccacctgaagattcattttacagcacagacataagctcctctccctttgtcagacaagagtgagtgagtgtccataaaaaaaatgttattatttggctgttgaaaagggtggaaaatgtaacatgctggccagcttgtgttctgtgatcttttatgtattctgaaatgttacgtgaaagttattgatggttttggtagagttctttaaagctgaacctttgtagtgtatagctacatgcttgctttttctttgcatgtggagtggagctgttaattggttctcgtgcctttcagactttatggaacatttactctagcagcaatagtagggaacgcagagtgaaaaaaatataattatatgatgcagtaatagaaagatttgccaaagtaggattatcgaaaa

SEQ ID NO: 7762 - DNA, 981 bp, Glycine max
tctgacggctgcgagaagacgacacttcatcgtagcgccagactgagaggaagagagagggagattctttgtttgctaccttctctcggaaaaatggttacgttcaggtttcaccagtaccaggtggttgggagggctcttcccacggaagcagatcagcaccccaagatctaccgaatgaagctctgggccaccaacgaggttcgcgccaagtccaagttctggtattttctgaggaaactgaaaaaggtgaagaagagcaatggccaagtgcttgccatcaacgagatttttgagaagaacccaaccaaaattaagaactatggtatatggttgcggtatcagagtaggactggttaccacaacatgtacaaggagtaccgtgacaccactctaaacggtgcagttgaggcaatgtacaatgaaatggcttctcgtcacagggtcaggagcccttgcatccaaattatcaagactgcgaccatcccagctaagctttgcaagagggagagcaccaagcaatttcacaattccaaaatcaagttcccattggtctacaagaaagttagaccacctaccagaaagctgaagaccacatacaaggccaaaaagcccaacttgtttatgtaacgtggttgatgaatgagttacaaatacttggtgtctatcaggcgtttttagtagagacgtacccgttggttttttactgccagattttgtttgaggttcttttagactattttcattgggtttatctttatgtttctgttggatattatcttttgatcattttgataattgagtagaattgaacaaaatttatatatatggctgttaaccaaaaaaataataattctgaaaaaaaaaaaaaaaaaaaacgaaggaattaggctattgccccccagtcgtaatgcaaacatttttcgatctatatcttaatagatgctgtcgaatgacctgaaatcaggttgatttttggat

SEQ ID NO: 7763 - DNA, 987 bp, Glycine max
  misc_feature (966)..(966): n is a, c, g, or t
cccacgcgtccgtacggctgcgagaagacgacagaagggtacggctgcgagaagacgacagaagggtacggctgcgagaagacgacagaacttgaccgcgcaccacactgagaggaagagggagtgagagagagtgttcttcgtttgctaccttctcccagaaatggttacgttcaggtttcaccagtaccaggtggtcgggagggctctcccaacggaagcagatcagcatccgaagatctaccgaatgaagctctgggccaccaacgaggttcgcgccaagtctaagttctggtattttttgaggaagctgaagaaggtgaagaagagcaatggtcaagttcttgctatcaacgagatttttgagaagaacccaaccaagattaagaactacgggatatggttgcggtatcagagtaggactggttaccacaacatgtacaaggagtaccgcgataccactctaaacggttcagttgaggcaatgtacaatgagatggcttctcgccacagggtcaggagcccatgcatccaaattatcaagactgcaaccatcccagctaagctttgcaagagggagagcaccaagcaattccacaactccaaaatcaagttcccattggtcttccagaaagttagaccacctaccaggaagctgaagaccacatacaaggccaaaaagcccaatttgtttatgtaatgtggttgatgaatgtatcagaaatacttaagggtgtcttccaggcgttttcagtagaaacgtactcgttggttttttacttcctgatttttgtttgaggtttttttattgggtttatctttatgtttctgttggatattatcttgatcattatgataattgagtagtagaattgaacaaatttatatatatggccgtcaatccagatcttattaattctgaatattgccccaagtcattcagttggctattgcataaaaaaaaanccgagactagttctctctctc

SEQ ID NO: 7764 - DNA, 1396 bp, Glycine max
cgttttaatctaattggtatagaatagtgttttagaaagagtgtctagcattttgaataaatatgtgatccaagtccatgaataggccagattgttatggggtggttggattcagtgtggggaagaggacgaaagtttattaaaaggaaagacagtgatgctggcgatgcaggtaaagcactggaagaactcagagcttctctctacaatgagatccgaacatcagaaggagccaagcgccaacagcaaagatattgtggaccagtggtggcactgtccttcaattttatggtttctgttgggattatcatggcaaacaaattggtgatgggtaaagttggcttcaactttccaattttcctcacatttgtacactacatcactgcatggcttctccttgccattttcaagacactctcagtgcttcctgtgtcccctccatctaaaacaactccattctcttctttatttgcacttggtgttgttatggcctttgcctctggccttgcaaacaccagcctcaagtataacagtgttggtttctaccaaatggctaagattgctgttaccccaacgattgttcttgcggagttcattctttttggaaacaccattgattttaaaaaggttttggctttggctgtcgtgtcagctggtgtagctgttgcaactgtaacagatttagagttcaatttatttggtgctctaattgctattgcatggataatcccaagtgccataaataagattttgtggtctactttacaacagcaaggcaactggacagctctggcgttgatgtggaagacaaccccgatcacagttttcttcctcggggcattgatgccgtggatagatccaccaggagtcctatccttcaagtgggatgtgaacaactcaactgcagtttttgtatctgctctccttggttttctcttgcagtggtcaggggcattggcattgggggccacttctgctacaacccatgttgttttaggacagtttaaaacatgtgtgattctgttgggagggtatctattatttgagtcagatcctggggttgtgagtattggtggtgctgttgttgctctctctgggatgtcagtttacacgtcattgaatttgcaagagcctcaggagccttcatcgaagccgaaatcaacaagtgaagacaccaaatccacagattcaaatgtaaatactactaccactaccactacctctaccaccattgtctgtgtcatatagtagatgatgaatcatgaatacaagaacatcccatttttcagacactcatcttaagtccttggttttagcaattagcgaaactttatgtatagacagtaatggaaattcgttgagattttttaagggtagcttgcttttcccaaagttc

SEQ ID NO: 7765 - DNA, 977 bp, Glycine max
  misc_feature (320)..(320): n is a, c, g, or t
aattctcacaagcgattaaatatagaagaatcatttaagataagagtgtattactaagaggagagaaaatgaaagttgtgtacttccttgttgtcatcttggctttaacatcctctgtggtctctgcctatgaccctagtcctctgcaagacttttgtgtggccgccaaagaaaaagatggtgtatttgtgaatggaaagttctgcaaagatcccaaacttgtgaaagctgaagacttcttcagacatgtagaaccggggaagactgaccgcccgggggcttcaaacgtgactcaggtgtttgttgatcaactaccgggnactaaacacgctgggcatagctttggctcgcatagatttcgcaccaaagggtttgaacgctccccacactcaccctcggggcactgagatccttatagtccttgagggtactctctatgttggatttgtgacttccaatcaagatggaaatcgcctcttcaccaaagtgctgaacaagggtgatgtgtttgtgttcccaattggtctcattcatttccaactcaatgtgggatatggcaatgctgctgccattgctgctcttagcagtcaaaatcctggagccatcaccattgcaaatgctttgtttaaagctaatccacctatttcttctgaggttctcgccaaagctttccaggtggacaagagcataattgattatcttcaaaagcaatcttggtacgacaacaataactaatttgggagtatggatgagcatttcacactagctagttactgtataattgatcactttattgtttcaatcaccccatacaacagacctaataaataaaatttaatgtatgggggttattaatttttatacataatatttgttctgtttggagtttgatttgatttaatacatattgcttgagtttaattaataaaagaacctattcttgccccaaaaaaagaaaaaaaaaaaaaaaaaaaaaa

SEQ ID NO: 7766 - DNA, 1628 bp, Glycine max
aattcggctcgagaccaaaccccgcaagaaatacatggaaaccgtttcttttgtgtaaaaataaaattaaaaaagatcaattgcagctattcttgtcgccgtttctttaatttgtctcttacttcacgcaagttgttcacggctcctctttatatgtacacgtactatctctcatgcatttcattcatcacatacaacactctctccaaagttcaaattaagactgaggggtgagaaagagagaattgatatgggtgccggtctagttgcgttcctcttaatggttcttgtgcaattggtctatgcagtgatgaacattacttcaaagcttgcaatagaatctggaatgagccctcttgtccttgttgcttatcgacaactctttgctactgtgtccattgctccctttgcttattggctcgagtggaatacgcttcccaggattacacagcgtcttatgattcagatattattttcgtccctgaccggagttacaggaaatcagatgctttattttgtggggctgaaatattcatccgctacaattgcatgtgcactgacaaatttgctcccagctttcactttcatccttgcagttctcttcagacaagagaatttgggaatcaagaagagggctggtctagcaaaggtattcgggacaatattgtgtgtgagtggagccttgcttttgtcattttaccatggaaaaaccattggtttaggccaatcaagtattcactggagatatgctgagaaaatggaaggaactagctcttctggcaaaggaaacatgttcctaggccctttggtcgtaattcttagcacccttgtttgggcagcatggttcataattcaaaaagacataagcaagacatttccagctccttacacgagcactggcttaatgtgtttcatggcaagctttcaatgcgtgatcattgccgtgtgtgtcgaccacagggcctcagcttggtcactccacaatgctatgagactttcctctgccctttatgcgggaatattttgcactggattagcctattgcctcatgtcgtggaccattgagagaaaaggtcctctttatgtctctgtatttacccctttgcagcttgtcctcactgccattttgagctgggctttgcttcgggagaaattatatgttggaactgccgtagggtctctcttgatagttttgggactctattctgttctctggggaaagagtgaagaggtgaataagggagacggtattgaagaagatgcagttaaagaagcagtcaaggattcgaagaatgacatggaattgcaatcatatgtgccatccaatggtaataatggtcgtgttattgcatgaagaagggacgcggcagagtgagattcctcgcaagatgctagtagctaaggattgagaaagtttcggttatttgtctttattctatttttgctccctaccagtaaatttgaattttgatatgtgtaatcttgtgtcacatttgaaagtggtccacaactctttgcagttgcattgaagacatgtattaatattattattattattatttatatattaataaacccggaatcagttattcctttaaaaaaaaaaaaaaaaaaaaaaaaaaaaaaag

SEQ ID NO: 7767 - DNA, 1209 bp, Glycine max
tcgagcagctacgtaggcccccccccctcttctttttccttctttctccacaagaagccacacacacctctgtttctttctctgctccacactttctcttcctccattattgagcttccactagttttttttcccctttctttcttccaaggacttaattgcactgcttaaagtctcaagctttacaacttttggaagatacccattttttgcagccatcacttacttgcccaagaagagaggggctttcttttggtttcaaccattttctgcttttggcttcaaaaggaacatcatagatgatagccagctccttctgcaatgctgattctatgttttcaagagaagaggggatagatgttagaaagatgatggaacataaaaggagaccctgctctgttgaccaaagcagttatacttctattgcatctaaaaggcaaaaggctgatttatcgatcagcactaaggagaggaaggaaaagattggcgaacgaattgttgctcttcagcagcttgtttcaccatatgggaagacagatacatcttctgttctaaaggaggcgatggaatacataggattccttcataaacaagttaagctgcttagtgctccataccttgaaagttcaccagcagccaagatgcagggtgtggagccatgcagcctgaggagtagaggcttatgtcttgttcctgtgtcagttactattggagttgctgagagcaatggtgcagatatctgggcccccattaagactactacttctcctaaatttgagaaggatgtctcccaatttcattgacaaattttctcatctttgcagcctaaaggttgctaaagttgctaaactagcatgaaaattactatgatgatacatctagatggaatcatagtagctatatatatatatataatagttaaagcattaaaaaaaaaaaactctagtcaaaaagctgtcccacacctcttagattttaaacgggtgatgggggtaagcttccaattagccatatgtgcccttaattaattaattccatgtgctgattattaagtgtatatttgaaaaattctagttgtataatgtttccatgaactgattagcttaatcaaagtcgtttcaagaatttgatgagtaaaaaaggaaaaaaagcttaaaagaaacaaccaaaacaaaaaccaattaaaaaaaataaaaagtaaacggccgg

SEQ ID NO: 7768 - DNA, 1573 bp, Glycine max
  misc_feature (1558)..(1558): n is a, c, g, or t
tcgagtcagctacgtagggaatctcaacgcgtaacaaaatatcccaaactctcactcgtcgacggccaccggatcgacctcaattcgccgtcgtccaatcgctctcagttccaccgcctccgccgccggcatccaattcagtttggccttgcatctctctcaggtattaagattctactaaaaaaaaggttgatcagcgtaaagatggagctcactattacacagcctgatgattggcatcttcacctccgtgatggttcccttcttgaagctgtcctccctcacagtgcgaagcattttggaagggccatagtaatgccaaatttgaaaccacccatcactaccacgtctgctgctgtcgcttatcgagagtccattttgaaagcaatacctaaagatagcaacttcactcctctcatgtcactttacctcacagacgtgactacccctgatgagattaaacttgcaaaaaaaagtggacttgtttatggtgtgaagttgtatcctgctggtgctacaacaaactcccaagatggtgttacagatctttttggaaattgtttttctgttcttgaggaaatggctgagcaaaatttaccattattggttcacggagaggttacagattcaaacgttgatatttttgaccgagaaaaagtcttcattgaaacaattttagtgcctttagttcaaagacttccacagctgaaggttgtgatggagcatatcactactgcagatgctgttaaatttgtagagtcttgcaaagaaggttatgtagcagcaactgttacaccacagcatcttcttctgaatcgtaatgctttgttccaaggtggcttacagcctcacaattactgtcttccagtgctcaaaagagagatccatagacaggctattgtttcggctgtcactagtggaagtaaacgatttttccttggaactgatagtgctccacatgataggcgtaaaaaggaatgttcctgtggatgtgctggcatatacaactcaccggttgctctatcactatatgccaaagtttttgaagaggctggtgcacttgataagctagaggcttttacaagctttaacggacctgacttctatggcctccccagaaacaagtcaaagattaaactgaggaaagctccttggaaagtacctgattatttgtcatttccatttggagacatcgttcccatgtttgctggtgaaacccttgaatgggaggcattgccttgttgatttgctgtgtctatttgaaagtttggtatccttcagcttaaattattgattgctgagatgagaatttatgcagcgttcaagaactagagtcaagcaattttgttctaattttatcagtcagttctgcatttattttgcagattgttctcatttctatttcctaggtcaggtgaatttaagtatgaaccagaacacccactgtgactaataaattatgggaatttatatagtattcagagctatggtaattttgtagttctaatttgatcaatcaactatgcatgaatttttcagattcgccttatttcctaanaaaaaaaaaaaaaaa

SEQ ID NO: 7769 - DNA, 1557 bp, Glycine max
aaatccatttcacccctcccagttcccaacttttccgagccggtacctagaacatccaatcgaacaatgattggccacaacacaaaacccaacacaaccccaaaactcgctcacaacacagcagaatgtacccattgcttgcgatctaaattcacaatgacaatgtggtgaaaaacgctcggatttgaagatggacatggacgtggaagaagcttctgcacctaaagagagaaagcccgttttggtgatcttggtgggcgctccagggagcgggaagtccaccttctgcgaagaagttatgggttcctctactcgcccttgggttcgcgtatgccaggacactattggaaatggtaaagcaggaaataaagctcagtgcctaagcagtgcaactaaagcattgaaggatgggaagagtgtatttattgataggtgcaatcttgacagagaacagcgttcagaatttataaagcttggtgatggaccccaaatagatgtccatgcagttgtacttgatcttcctgctaagctttgtatttctcgatcagtcaaacgaactgggcatgaaggaaatttgcagggtggaaaagctgctgcagttgtgaatagaatgcttcaacataaagagcttcccaaattaagtgaaggctttagccggataacattttgtcagaatgaaagtgatgtaaaaaatgctcttaacacatacagcacacttgggccactggatagtcttcaatatggctgctttggccagaagaatcctgattccaaaattcaagttggtataatgaagttccttaaaagagcagaggtcccagttgctgctgcatctagagagagtggcattgaagaccctacttcccagactccgggtaaaaataactcctgctgcaaagataagcaaacattttcctcaattcctgataatgacaactcagagacgaaggaagtagaaaaccaagcagttggctctgttgattcccatgccaatcaagtttctctggatgatattcccactctggcatttccatctatttcaacatctgattttcaattcaaccatgagaaggcagctgatattattgttgagaaggttgcagagttctcaaataagtttaggaatgccagacttgttcttgttgacttgtctcataaatcaaagattctgtccttagttaaggctaaaattgcaggaaaaaacattgatgcccaaaagttctttacccatgttggggacattactcatctttattccaggggaggtttgcgatgtaatgtcattgctaacgctgccaactggtaaggttctatttctatgattttagtgtatatgtaattccatataacattaattaataaatctgaattaaaaatttgataaaaaaaaaaaaaaaaccttacccaggtacatgttactgaccattatgactgttaaatggtatgccaatttgtatctgttggtattgcctcagtctctacttatctgaactacataaggaattttctggcgactgtgattttatgatcaaatgctacattatctaacagttacgg

SEQ ID NO: 7770 - DNA, 1389 bp, Glycine max
tcgagtcagctacgtagggccccccccaaaattttcccattttcaattactccctatattaacccaacaatgcaaaacaacacactgaactctcttcactgaaacgacacacacaaaaaaaagctttagtttaggatgacccaagtgaggaacaagcaagtggttctaagagactatgtcaccggattccctaaagaatccgacatgaacattgttgaaggcaccataatattgaaggttccagaaggttccaatgatgtccttctaaaaaatctctacttgtcatgtgatccatacatgcgactcctcatggccaaggaccgttctttcggagatggctccttcacccttgcctctccattgaaaggatatggtgtgtctcaagtgctggaatctggacgtccagattacaagaaaggtgatttagtgtgggggattactaaatgggaagagtatagcttggtcccctcatctctcatacatttcaaaattgagcacactgatgtcccactttcctactacactggaattcttggtatgccaggaatgactgcttatgctggtttctttgaggtaggttctcccaaaaaaggagacactgttttcgtttcagctgcctctggtgctgttggtcaacttgttggccaatttgctaagttgactggttgttatgttgttggaagtgctggaagtaaagagaaggtggatctgctgaagaataaattaggatttgatgaagcttttaactacaaagaagagccagacctcaatgcagctttgaaaaggtactttccagaaggcattgacatttactttgagaatgttgggggcaagacacttgatgcagtactcccaaacatgaaatttcatggccgcatacctgtctgtggaatgatctcgcagtacaatcttactcagttcgatggtgtaacaaatttggcaaatctcatatttaagcgggttaaaatggaaggttttattgcaactgatttctatcatttatatccaaaattcttggagtttgtcctgcctcatatcagagaagggaaggttgtgtatgtggaagacattgctgagggccttgagaagggccctgcagccttggttggcctctataccggtcgcaatgttggtaaacaagtggttgttgttactcacgagtaaaattatataaatatattgttattctctaagctttaattccgaattttcaattttctgttggatattgaaccttgcttttatggtttatgcagtcattcttctattttgttgatagaaattactacattagtgacattttgtgataaataaaacctctaatatatgctaatttgttaaaaaaaaaaaaaaacgcgagatagttctctctctctctctctctctctc

SEQ ID NO: 7771 - DNA, 978 bp, Glycine max
tacggctgcgagaagacgacactctgccgcagtgttgtagatgttgatcatttgatgatgctgtccctgttgccggaaacgaaatgggtttgattcctaaccctaaccctaaccctaatgctaaacccaagcaacctgcgttttgcttaaaatggccatggaatgatgcaaaccctagccctagccctagcccctgcaagtttgagggtcctttgccattgaaatctctccaaaaccttggcttaatcgctttcaattttgcgagctctgtttcgagttggaagaagaaaacgagtccagctgcagcgtcggagtcggaggcagaggcagaggcgtttgcgtcggctctggcgagcgggaaggaagcgactttgttggagttctactcccccaagtgcaggctctgcaattccttgctcaaatttgtctccgaagtcgaaaccagaaactctaattggctcaacattgttatggctgatgctgagaaccccaattggctacccgagctccttaattatgatgttagctatgttccttgctttgtgcttcttgacaacaatggaaaggccctggcaaagacgggtgtcccaaatagccgtttacatgttattgcaggactctcccatcttctcaaaatgaagcgtcctcaacaaaataatggatgatgagcctagtgcatgaaaaccaaccttctgttcaagtaccaaggcaccataacaggagttatacagttaacttgatggttgaaggaaaaagtgggaagaaaggagtcgtgtgctcaactctctcactaatattctaacaaaactaacttcgaacattttggattgccttggtttaactttaacacggaatcatcattatatgtaaattaactcacattcttatgtttccaagaactacttgcaccaatgctaaccaaaaagcatggtgagtcttgtattgttgtcatctttgttttgcatgtcaacgtgcatt

SEQ ID NO: 7772 - DNA, 1828 bp, Glycine max
  misc_feature (1)..(2): n is a, c, g, or t
  misc_feature (1808)..(1808): n is a, c, g, or t
nnggtccgcttgaaaagcagtctcataccctctctgtctctctctctctctctctctcactttgtcctccaaactcaagtgtcggaaagtttgcttcttttccactctgaatcaccctatttattttgggtctctcatctttcttcttccttccaagttgtttttggtgttggtgttggtgttgaattgagttgagaagaaaagaagaggtcatagacacacacacaagacatgtctgctgttgagtcagctgaacacaacaacatcagaggagtaccaactcatggtggacgctatgttcagtacaatatctatggcaatctcttcgaagtttccagaaagtatgtccctcctattcgccctgtcggtagaggtgcttatggtattgtttgcgctgctgtaaatgcagagacaggcgaggaagttgccattaagaagattggcaatgcattcgacaacagaatagatgccaaaaggaccttacgggaaattaaacttcttcggcacatggatcatgcaaatattatgtccattaaagatattatacgtcctccacagaaggaaaacttcaatgatgtgtaccttgtttctgagttaatggacacagatctgcatcaaataattcgttccaatcagcaattgactgatgatcattgtcggtattttctgtatcaattgttacgagggctcaaatatgtacattcagcaaatgttttgcaccgagatctaaagcctagtaatttgctattgaatgccaattgtgaccttaagattgcggactttggtcttgctagaaccacatctgaaactgactttatgactgagtatgtggtcactagatggtaccgagctcccgaattgcttcttaattgttcagaatatacagcagccattgatatatggtctgttggttgcatacttggtgaaatcataacaagacaaccgctctttcctggcaaagattatgttcatcagctgagacttatcacagagctgataggttcgccggatgatgccagccttggatttctacgaagtgataatgctcgtagatacgtaaaacagcttccgcagtatccaaaacaaaacttttctgctagatttcccaccatgtctcctggtgcggttgacttgctagagaagatgctcatctttgatccaaacaggcgtattacagttgacgaggcgttgagccacccatacatgtcacctctccatgacatcaatgaggaacctgtttgcaccagacctttcagttttgactttgagcaaccatcattcactgaagaagacatcaaggaactcatctggagagaatctgtgaagttcaatcctgcaaccatatatgtttagtgaaatatctgatgactaatatatacattttatgaccactacttggcaagttgcagcgcacagaagatatgaaaacgtattggagatactgagattcactgagtttgttgaaggtttctttcgttttagtctcatctcagatacttggataatcatattgttgagatgtactgaggaaagaaaggatcaaaatatgtttcagcagaatatcctaaagctccaactccttgttgtacttctatccttctttttagattcaaggtccatagtttagtgcattgaactgttcttgccagtttttcctatcctttacatcaagaaaaattcacaagaaaacttttaatttgtggggacagacagtatctcatattcccattgtatgacatttaaattaaattaaatgtaatggtttgttagagtattccaaataactttaagaaccataaagccatttnttaaaaaaaaaaaaaaaaaa

SEQ ID NO: 7773 - DNA, 780 bp, Glycine max
  misc_feature (774)..(775): n is a, c, g, or t
  misc_feature (777)..(777): n is a, c, g, or t
ctacgaagtgataatgctcgtagatatgtaaaacagcttccccaatatccaaagcaaaacttttctgctagatttcccgacatgtctcctggtgcggttgatttgttagagaagatgctcatctttgatccaaacaggcgaattacagttgatgaggcgttgagccacccatacatggcacctctccatgacatcaatgaggaacctgtttgcaccagacctttcagttttgactttgagcaaccatcattcactgaagaagacatcaaggaactcatctggagagaatctgtgaagttcaatcctgttccaccagtctactgagattttgtatttatgttgtatatgcttagtggattatctgatgactaatatacattttatgatcactacttggcaagttgcagcggacacaagatatgaaacatattggagatactgagattcactgaacttgttgtaggtttctttcatttcagtctcatctcagattcttggataatcatatgttgagatgtactgaggaaaggatcagaatatgtttcagcagaatatcctaaagctccaactccttgttgtacttctatcctttttagattcaaggaccatggttagtgcactgaactgtcttgccagtttttctatcctttacaccaagaaaaatacacaagaaaacttttcatttgtggggacagacattatcccatattcccattgtatgacatttaaattaaatgtaatggtttgttagagtattccaaataattgaacaanncnttg

SEQ ID NO: 7774 - DNA, 1115 bp, Glycine max
ataaaatattgtgttacttataggaaacgaaacccacatcacaatccaattccatgaccctttgtatggctgcagaaaatatgagcgaggtggaagaggagcatggatatgtcttcaaagaagagatccatctcacggtgttcaaaacttctctgttcttcgcgggcgatggcttcaccgtctacgattgcaaaggtcaacttgtgttcagagttgactcttatgggcccgacacccgcgacagagacgaactcgttctcatggatcctaacggacgttgtctcctcaccgttcgtcgaaagaggccgagtttgcatcaacggtgggaaggcttcaaaggggagagaatggacggtgataaacccatcttcagcgtgaggagagcgtcgatcataggacggtcgcgtgcgagtttgacggtggagatgtacgacaacccaggtgaggagtaccagatcgatgggtgcttctcgcagcgttgctgcacggttttcaatgtgacgaaggaatcggtggctgagattcgtcgtaaagtggaccccaccaccagcgtcgtgcttgggaaggaagtgttctccctttgcgttaagcctggttttgatgcggcttttgccatggggtttgtgcttgtcctagatcagatcaacggtgaggattacgttgatgatcgtgctaccacggagcctgcggtgcaccccgccacagaagattagaagggaatagagtgcatttccagatttttcttcaatcacactggcatgatgggtggctttatttaatttaactcactaatccttgggatttggattgtccctcacaaagggaacctctgccccttcttttctgggtcatgctcatgcccttgaaagaataaacttttcaattcccaatgcgattgtgtaaattttacatcaagcataaaaatatcagttgagctttcctactttcagccgattagccctttttatctgtgccttgtcttcattacttgtgatgcttttatatggcatgatatgagcacaatttatattttcattagcttataaatttcgtagttattattactactcgatttagatagtatttatattcactattttcttttttatcatatc

SEQ ID NO: 7775 - DNA, 1626 bp, Glycine max
ccacccctccgacgacagaagggggattcaattgaaattcgagtttcctttttaatcacctggtttttttttttaaatttgaaggagatccaatccaaatgcatcgaatgccaatcacctgaaattccgccagatctctccctcttacacgctcttgataaaccgaaacgaagcaatagctatagcatcacacacacacaccaccgctagggttagggttagggttgggggtgttccgaagtaacaacaatggcggtctccgacggcgtcgtgaagaaaatcgtcctctcctacacctacgtcgcgatatggatcttcctcagcttcacggtcatcgtgtacaacaagtacattctggatcgcaagatgtacaactggccctacccgatctcgctcaccatgatccacatggcgttctgctcctccctcgcgtacattctcgttcgcgtcttgaagctcgttgaaccggtttcgatgtcgcgtgatctctacctcaaatccgttgttccaatcggtgcactctattcactttccctctggttttccaattccgcgtatatatacctctctgtttcgttcattcagatgctcaaggcgcttatgcctgtcgcggtttattcaattggtgttattttcaaaaaagaggcctttaagaacgagaccatggcgaacatggtttccatctcgctcggtgtagcggttgcggcttacggcgaagccaaattcgatgcatggggtgttaccctgcagcttatggcggttgcgtttgaggcaacacggttggttctgattcaaattttgctcaattcgaaggggatttcgctgaaccctatcacctcgctttactacattgctccctgttgcttggtgttcttgtccgtgccttggattatcatggagtacccttcgttgagggacaactctagcttccatttggatttcgcgattttcggcacgaattcggcttgtgctttcgcgttgaacctcgcagttttcttgctggtgggaaagacttcggctttgacaatgaatgttgctggggtggtcaaggattggcttttgattgcgttctcttggtctgtgataaaggacactgtgaccccgattaacttgattggttacgggttggcgtttttgggggttgcgtattataatcattgcaagttgcaggctttgaaggcttcggaggcgcagaagaaggctctgcaggctgatgaagaggctgggaggttgttggagcagaaggatggagaagggactggaaggaagaacgacaaccagaactgattcaagtgctgatctcattatttggtcactctcttcgattaatgttggatgacgcaggttttgtttttggttttgttctgtaatgtactctgctattaggtaattattattatcgtcgtcgttattgttattatcgttataattatattattattatgatgttacatgttacttctcacagtttaattttcatacccatatttagttatgtattggaggctgagattgacttttgttccttatattactgattcgtgtttatgggtagctaatgaaattgcattatgatttttaataacttattaatgtcctgcaagtttatagtggaacagctaagtt

SEQ ID NO: 7776 - DNA, 1673 bp, Glycine max
ctaaccccccgagtcatgcttgtgttcaacgaagacagccacaggcgcagcatgttattgatggcttcctcactcaccaaccaccaaaccacaccgtcgcacccattccatcgctgattcctccaatggcttccactaccaccactttctctctttctctccgcaccaaccaacaaactccattccccaaaccctctttcttctccaataacaaccatctgcatttcaactctaataattgggcctggacctctgtttccactgctcgcaagtcaaggatatgcgtcacttcctctcaagttttggattccttagcagcaaaatccgaacccgctcttcccaccaccgtcgaagtcgatttgggtaatcggagctatcccatttacatcggatccgggttactaaaccaacccgactatctccagaggcacgtgcatggaaagagggtcctagttgtaactaacaaaacggttgcgccactttatctagacaaggttgttgatgctttgacaaggggaaaccccaatgtttctgtggagagtgtaattttacctgatggtgagcagtacaaggacatggatactcttatgaaagtctttgacaaggccattgagttgcgactagaccggcgttgtacgtttgtcgctcttggtggtggtgtgattggcgacatgtgtggctgtgctgctgctttgttcctacgtggtgttaattttattcagattcctaccactgtgatggcccaggtcgattcttcagttggtggcaaaactgggatcaatcaccgccttgggaagaacctgattggtgccttttaccaacctcagtgtgtgctaatagacacggacacattaaatacgttgccggatagggaactggcatcagggcttgcagaggttataaagtatgggctcattagggatgcagagttttttgagtggcaagagaaaaatatgcacttattactggcaagagatcctagtgcaatggcatatgctataaagcgatcttgtgaaaacaaggctgaggttgtgtccttagatgagaaggaaagtggactgagggcaacattgaacttgggtcatacatttggtcatgcaatagaaactggggttggctatgggcagtggcttcatggagaggctgttgcagctggcacggtaatggctgttgacatgtcatatcgcctaggttggattgatgattctctagtgaagagagttggagatattttaaaacaggctaagttaccttcagcccctcctgagaccgtgactgtggacatgtttaaatctgtcatggcagtggataagaaggtagcagatgggttgctaaggcttatccttctaaagggccctctaggcaattgcgttttcacaggggattatgacagaaaggctctagacgatacgcttcgtgcattctgtaaatcctgatctttgtgctccatgtttctattgcagctttatccaattccttttagtgagtttttgtatgttgtgataacctcacttgtatttttcttatgtactttggatgccaaccatggtccccattatatacgcaagagtctattacaaagttgtattattagaaattgaggcatgatcaataattatcatttgagcatatatcatattcttcccatcttttttgttgcttacaacaatgct

SEQ ID NO: 7777 - DNA, 790 bp, Glycine max
aggatttcaagctcgccgataccgtgattaggggtttgttgaagtattggccggttaccaattgccagaaggaggttctcttccttggagaacttgaggaggtgctggaggccacgcaagccgcggagtttcaacgttgcatggttccgctttttagacagatttcgcgctgcctcaatagctctcactttcaggttgcagaacgagccctcttcttgtggaataacgagcatattgtgagcttaattgcccaaaacaggactgtgatactaccgataatatttgaagcatttgagaaaaatatttcgagtcattggaatcaggcagtgcacggactgaccgtgaatgttcgcaaaatgttcctggaaatggacgcagaattgtttgaagagtgccagcggaagcatgcagagaaagaggctaaagtcaaagaactagcagagcagcgggaacttaattggaagagactggcagatgtggctgcacagaacggagtggaggacatggtcacttagccttgttagtttactaccacaaggatggtgaatgtgctcttatccattttggtgccattatttattggtttctttcttttcagcctaatttttttatttttcctcttctatcttattatatcagttggatcattagcaattttaagaaatcagtgattaatgtaacttattggaagttgttagcaatgtctgcagattaagaatgttttgtgaaatactttcttgtatttttctccttttataaagagaaatacggaagatttttcccttttttt

SEQ ID NO: 7778 - DNA, 1566 bp, Glycine max
  misc_feature (719)..(719): n is a, c, g, or t
  misc_feature (767)..(767): n is a, c, g, or t
  misc_feature (770)..(770): n is a, c, g, or t
  misc_feature (799)..(801): n is a, c, g, or t
  misc_feature (805)..(806): n is a, c, g, or t
ggaagtgagggagagattgatttgactatgagcatgcagtgagtgtgatcaataactctacccattgcttcaaattcaatatgctttttggtttcgtttcgtctcggcttgtctttcactttctcaaccacccaacacaacacaaattccctttcttcttcttcttcttcttctaaatagatagaaggaatttagattaattaaaacaacctttcattcattctgttgtgttgggaaatatgatgttcgactttgccaggatttggacccgaaacacgttaataggtctcggcttgggtcagtttctttctcttctcatcacttccaccggcttcacttcctctgaattggctaaaaaaggaattaatgctccaacttcacagtcgtttctgaattatgtgttcttgacgcttgtctatggaactgttctcctatatcgaaggaaagcactcaaggcaaaatggtactattatataattctcggattggttgatgtagaagcaaattttcttgttgtgaaggcataccaatacacctcactcaccagtgtgatgctgcttgactgctggtcaattccgtccgtcatgcttcttacacggcttttcttgaaaacaaaatatagattcaaaaagattactggtgtagttgtttgcgttgctggccttgtcttgggtgtgttttctgatggtcattcaggtgaccgtgcaggagtttcttgngaaaagtgctgatagagttgagcttatggcaatgttaggtctctctgntgncattatcagtgccattcaaataagcatannngagnncaatgaacttaaatctattcattggtcggctgagggagcgcgtcctgtcgttgggcttgcagtggccatgtttatgttttactctttagtccctgttctgcttaagatcaatggttctacaatgctaaatttgtctctgttgacctcagacatgtgggctgtcttaattcgtatttttgcgtaccatgagaaggttgattggatgtactttgtgtcatttggtgccgttaccattgggctcataatctattcaggaggggacagagatgatgatcaacaccctccaaacgctgctatcgatgatcatcgccctgcagtcaaacaagatgaagaagccaattcaggaaatcatagcaaaggagctgcggctggaagctcaaaaacatgggtagcttagtatagacctacagattcatacacagaaaaaccatgaggaaaagtatcctcaagagaatggagattagtctaaatttattatgtattggcagctcctgcaagattgcattccaagaagataatgttccttcagatgctgctcttgttcacatgtcttgtaatttaaaggatcctctaaagtttcgtttgatggaattttgagaaaactcttcatcatctggagatcaatagccaactttttagtcagtatgttgttaattatctgatattttaaagtaagaaattaatttaaagaaatagaaacttttggggtccaaaaaagaagaggaggggaggggggggggggggggggggggggggaggg

SEQ ID NO: 7779 - DNA, 1677 bp, Glycine max
gtcgacccagcgttcctttgagacgtggctggttcaactgaggtgatggctttgaatttgccttctcccgcccaagtgaagcccttatttttctcttcaaataactccacaaaacttccaggtagcttttctttgaagagaaaagatagtgacacaacagtagagagacgagtttattgctctgccgctgctcaatcaccaccaccagcatggccaggaacagctattcccgagccttctgatttcaagacatgggatgggcaaaaacctatttctgtcttaggatctacgggttcaattggaactcagacactgagtatagtggctgagttcccagaaagatttaaagttgtgagccttgctgctggctctaatattactcttcttgctgaccagattaaaacatttaagcctgaagttgttggtcttagaaatgagtctttaattgatgaactcaaagaggctttggctgatgtggatcacaaacccgaaatcatccctggagagcaaggagtcattgaggccgctcgtcaccctgatgccaccactgtagttacaggcatagttggttgtgcaggattaaagccaacagttgcagcaattgaagcagggaaagacatagcattggccaacaaagagacaatgattgcgggagccccttttgttcttcctcttgctcacaaacataacataaaaattcttcccgctgattcggaacattctgcaatttttcagtctatccaggggttgccaaagggtgcacttaggaaaatccttttaactggatcaggaggtgctttcagagaatggcctgctgaaaagatgaaagatattaagcttgctgatgcattaaagcatcccatatggagtttggggagaaaaataactattgactctgctacccttttcaataagggtctagaagtaattgaagcacattacttgtttggagcaagctatgacgatattgagattgttattcatcctcaatctatcatacattccttggttgaaacgcaggattcatctgttattgcacagttggggatacctgacatgcgcttaccgctcctttatacattatcttggccagaaagaatctattgctctgaagtaacttggcctcgtcttgatcttagcaagtatggttctctaacattttatgcaccggatgacaagaagtttccatcggtgaatctttgctatgctgcgggacgtgctggaggcaccatgacaggagttcttagtgcagcaaatgagaaagctgtagaaatgtttgttgaagaaaagattagttatctggatatattcaaggttgtggaactaacttgtcaggaacatcaaaaggaattagtagcatctccgtcactcgaagaaattattcactatgaccaatgggctcgacaatatgctgctagtctgcaaaaagcttcaagtgtttgaatcccatatttctgacatattttagaagttggggctgtggtggattgttggcaactgctagcatattttgtaaatgtatttgttggttcatcaatcttgtaaaatgtaaaggggtagctatataaagtatatgtactcctaaaagggtttcaataaaagttctagcttcagaaaaaaaaaaaaaaaaaaactaatgcaacctaggcagtacttttgtaatgctataattttcct

SEQ ID NO: 7780 - DNA, 904 bp, Glycine max
  misc_feature (901)..(901): n is a, c, g, or t
cctacttctgatataagggatgaagatcaaatcgtcgagtcatcagaacatagacaagtatccccaagctctccatcagaaacaaaagcaaaggaagcgaacatatttgtgaaagctaaggaagagattaaagccatcatacaccatgataagtcagaacaccatcatcataaagaaactcatggaaggaatgatgatattaatgacaatacccctaccgatgaagttaagggtccgaatgtctttgaaagagtaaaagaagaatttgaagctgttttccaagctatacatcccaagaaggaaagctgacaattttccttccttaccatagaaggatgaggaatcctgtttgattagggatgttatgtgcatgatagtgcatgtttgaaaatcaggtggaaaagttcgaagtacttttgcaaaaagattaggacccttaattttgcttttattcgtcggatctgcattagaatgagtgtcataacaatttcaactgcaaaccaaacgtgctcataaaccgtataaacatgtttatatatatatattttggaattttgctatcctaaagtgggccctccttttagagagagaagtaaaagcttgtgtgtgtgtgtagggtgcctcaccaacttagattggagctccttcaatcaatcttggtggtgtgtttgatgataatagaaacaagttaactacatatttgtcttgttgtataacatgaatatacaaaaaatgtgttaaccaacttacataggtcaattgagttcgggtgtcaacccaagatcttgactttctcgttaggcaagaacaacttggcggggtcaacattacaccaaagttcccaagcctaaaaaatcaaaacacatctataaatgtgaatgttctgactataaaaaaaaanaaa

SEQ ID NO: 7781 - DNA, 792 bp, Glycine max
  misc_feature (664)..(664): n is a, c, g, or t
  misc_feature (679)..(679): n is a, c, g, or t
  misc_feature (681)..(681): n is a, c, g, or t
  misc_feature (683)..(686): n is a, c, g, or t
  misc_feature (699)..(699): n is a, c, g, or t
  misc_feature (708)..(710): n is a, c, g, or t
  misc_feature (723)..(723): n is a, c, g, or t
  misc_feature (726)..(726): n is a, c, g, or t
  misc_feature (732)..(732): n is a, c, g, or t
  misc_feature (734)..(734): n is a, c, g, or t
  misc_feature (736)..(736): n is a, c, g, or t
  misc_feature (738)..(738): n is a, c, g, or t
  misc_feature (740)..(740): n is a, c, g, or t
  misc_feature (749)..(750): n is a, c, g, or t
  misc_feature (753)..(753): n is a, c, g, or t
  misc_feature (760)..(760): n is a, c, g, or t
  misc_feature (765)..(765): n is a, c, g, or t
  misc_feature (767)..(770): n is a, c, g, or t
  misc_feature (779)..(780): n is a, c, g, or t
  misc_feature (784)..(784): n is a, c, g, or t
  misc_feature (786)..(786): n is a, c, g, or t
  misc_feature (790)..(791): n is a, c, g, or t
tgcggctcgagctcgagccgaatcggctcgagtacggctgcgagaagacgacagaaggggataagaaagaagatcaaaagaaaaaagagaaacaaatggcagcactgggtggctttaccgacatcaccggagcacagaacagcatcgatatcgaaaatctcgctcgctttgctgttgatgaacacaacaaaaaagagaatgcagttctggagtttgtgagggtgattagtgcaaagaaacaagtggtttctggcaccttgtactatatcactttggaggcaaatgatggtgtgacgaaaaaggtttatgaaactaaggtgttggagaaaccatggttgaacatcaaggaggttcaggaattcaagcccatcactgttgctgttaatcctctttcggtgacggtctagcacatagctaggttatggaagtgactagcttggccgcaagagtaataatatgtatgaactgaataaatgtacctattaactctacaaacggtgtggggttgtgcatgtttgccatcctatatatttcagtataaatattgcccatcgagattaataaaataattgattatgtattaaaaaaaaaaaaaaaagaattctgcaccccggggatccctatttagagcggcgccccgggggactcccttttgttccttatnaggtaattcagttgngnannnnggctactgttctntggaaatgnnnccttcattcccantcnaccgantnangnanccgggggcnnatnctacccntatgntnnnntgccctttnngaantntccnnt

SEQ ID NO: 7782 - DNA, 779 bp, Glycine max
  misc_feature (13)..(13): n is a, c, g, or t
gaatgggtacccntcgggccggcccgcgaggctgcgtcggcccccccccccaagaaagaagatcaaaagaaaaaagagaaacaaatggcagcactgggtggctttaccgacatcaccggagcacagaacagcatcgatatcgaaaatctcgctcgctttgctgttgatgaacacaacaaaaaagagaatgcagttctggagtttgtgagggtgattagtgcaaagaaacaagtggtttctggcaccttgtactatatcactttggaggcaaatgatggtgtgacgaaaaaggtttatgaaactaaggtgttggagaaaccatggttgaacatcaaggaggttcaggaattcaagcccatcactgttgctgttaatcctctttcggtgacggtctagcacatagctaggttatggaagtgactagcttggccgcaagagtaataatatgtatgaactgaataaatgtacctattaactctacaaacggtgtggggttgtgcatgtttgccatcctatatatttcagtataaatattgccatcgagattaataaaataattgattatgtattaaaaaaaaaaaaaaaaaaaaaaaaatttatgcgtgtttcgtccaaagcgtggatggtgatgattcgaactttatagcagaatgatctggtggagcggtcccttctgtactcaatgcgattatggggtcacatcttgaagttcttgccctccttggatctatcttaatatttattgacattaagtgaaatatagatttcatttaagttat

SEQ ID NO: 7783 - DNA, 2925 bp, Glycine max
ttgacaacgaaagacgaaacttcggggatggtgtgtccttgaccttcacagccgcgtgaccttatcattgcctctttcatctctgcttcaatctttctttctttcctttcctttcctttccctgctattgctatgcctagttgctaacaccctcttcctttctttcctttccgaaccttcctcgtttttgatgctttgacttcttccaattgattctctctctctctctctgggttctctggcatcaaagttcgtacctttttgtgatttggaaggatctgatgccagtttggttttctggggtggctgtgttccttgtcccactttccttctttttataggatacttgactaattgaaaaaattccttttgttttcattgttatattatagtcaagttatttgatgtattttagttcttcagtttggaatccggtttgggtttggttatgctgttatggtggctttggaaccctcgcctccggggattcttagatccttttgcactttccctctcctgaaattttgcagtcatatcaaatatttgcgttattttttcttctttcgtaagagcatagctcttgaaatagagaaagtatctttagctttttcttttttatgttaaggaatcttgtgaggggttggatcagatgtcctgtgagttctgtgacatgagattttgtatttaagacatctatagatcagtgttttatcatatacgcagtgtctatagtttcatttgctttataggtttctttgggttctctgtctgtgctgggaaattcaaggctttgtttagttccatctgttggtagtttaaatggctttgggactcttatagggagttctgaagtgtgaagtttttgatataagaagatatgttctaggttcactttggctctctcaagttgttgatcaaatggcttattcagccgaaccctcatcatctttgagctttacctcatcttcccatctatctaatgggtcggttagtcacaacatatgcccttcttatggctctgatcctggacctaacttagaggctatcagtttgagtaagcttagctccaatttggagcagcttttgattgaacctgattgcgattatagtgatgctgaccttgttgtcgagggaattccggttagtgttcatcgatgtattctggcctctaggagtaagtttttccatgaattattcaagagggagaaggggtcatcagaaaaagaagggaaattgaagtataacatgaatgatttgttgccttatggcaaggttggatatgaagccttcctcatattccttggctatgtatatactggtaaactcaagccctctccaatggaggtgtctacttgtgttgacaatgtttgtgctcatgatgcgtgtagacctgccattaactttgctgttgagttaatgtatgcctcttccatttttcaaataccagagttggtatcacttttccagagacgtctacttaactttataggaaaggcccttgtggaagatgtcatcccaatcctcactgttgctttccattgtcaatcaaatcaacttgtcaatcaatgtattgatagggtggccagatcagaccttgaccagatttcaattgaccaagagcttccgcatgaactctcacaaaaagttaaattgctccgccgcaaacctcagcaagatgttgaaaatgatgcttctgtagtggatgctttgtctctaaaaagaatcactagaatacacaaggcgttggactcagatgatgttgagcttgttaaacttcttttgaatgaatcagacattactttggatgaagccaatgctctccattatgctgcagcctactgtgaccccaaggttgtttctgaggtacttggtttgggactggctaatgtcaatcttcgaaattctagggggtacacagtgcttcacattgctgccatgcgtaaagagccttccattatagtatccctacttacgaaaggggcttgtgcatcagatttgacttttgatggtcagagtgctgttagtatttgtaggaggttgacaaggccaaaggattatcatgcaaaaacagagcaggggaaagaaacaaacaaagatcggatatgcatcgatgttcttgaaagagaaatgaggaggaatccaatggctggggatgcctgtatgtcttcccataccatggctgatgatctccacatgaaactactgtaccttgagaacagagtggcatttgcaagacttttcttcccttcagaagccaaactagccatggacattgcgcatgctgagacaacatctgagtttgctggtctttctgcgtcaaactcaaaaggttcaaatggaaacttaagggaggttgatctcaatgagactcctatagtgcaaaataaaagacttctttctagaatggaagcccttacgaaaacagtggagatggggcggcgctacttcccacattgctcggaagtgctggacaagttcatggaggatgacctgcctgacttgttttaccttgaaaagggtactcatgaagagcagagaatcaaaaggacgcgtttcatggagcttaaagatgacgtccacaaggctttcaacaaggacaaggccgagtttagccgctctgggatttcatcttcatcatcctcatcatccctcagagattctgttgtacattacaaggctaggaaagtgtaattttaaaaccatacatagtgtttttgattttgacatacatattatatatagtgcaaattttaaaggtgaagcccaccaactcatctgtaaaattctcgaagcaggaaagttgatgtaaacaacctgcgcatatatttttgaaaatgttttcatatgctttttggtggagaaaaaaaaaaaaaaaaaaaaaaaaaaaaaaaaaaaaaaaaaaaaaaaaaaaaaaaaaaaaaaagg

SEQ ID NO: 7784 - DNA, 857 bp, Glycine max
  misc_feature (16)..(17): n is a, c, g, or t
gcaggggaaagaaccnnacaaagatcggatatgcatcgatgttcttgaaagagaaatgtggaggaatccattggctggggatgcctgtatgtcttcccataccatggctgatgatctccacatgaagctactataccttgagaacagagtggcatttgcaagacttttcttcccttcagaagccaaactagccatggacattgcacatgctgagacaacatctgagtttgctggtctttctgcatcaaactcaaaaggttcaaatggaaacttaagggaggttgatctcaatcgaactcctatagttcaaagtaaaagacttttttctagaatggaagcccttatgaaaacagtggagatggggcggcgctacttcccgcattgctcggaagtgttggataagttcatggaggatgacttgcctgacttgttttaccttgaaaagggtactaatgaagagcagagaatcaaaaggacacgtttcatggagcttaaagatgacgtccacaaggctttcaacatggacaaggccgagtttagccgctctgggatttcatcttcatcatcctcatcatccctaagagattctgttgtacattacaaggctaggaaagtgtaataataaaagcatacatagcgttttttattttgacatacatattatatatagtgcaaatttgaaaggtgaagcctaccaactcatctgtaaaattgtgaaagcaggaaagttgatgttatagtaccttttgtaatcaacttgctcatgtattttgaaaatattttcatatgtttggtggagaaatttacggcattttttttgaagataaatatatagtatctacctttaatctcccccg

SEQ ID NO: 7785 - DNA, 1766 bp, Glycine max
tgccacaggttttccgcccaagcgcgcccaattttcccccccctttaaagggggaccaaaaaaggtgggaggttcccccgccggggggggcggccgctttttggaaattagggggttcccccggggtggcaggaatttcgcacggggcccaatcccttcctagaacatcctaatcgaaaaaggaagtaacacaagccttcttcaagtgtttaattctcctctttaatttctctttagaatactcaacctttctcaagattctaatcaaaaggagagaaaaataaaatggccaccgaaaagcttagaggttgtgcaaatgtttttgcaagctctaaaccctacttggccatgatctctttacaatttggctatgcaggcatgaacattatcactaaggtttctctcaaccaaggcatgagccactatgtccttgtggtctatcgccacgcttttgccaccgctgtcatagctccttttgccattatttttgaaaggaaaggtcaaccgaagataacattcccagttttcatgcaaatttttattcttgctcttcttgggcctgtgattgatcaaaatttctactatgctgggttgaagctcacatccccaaccttctcatgtgcaatgagcaacatgcttccagccatgacttttgtgatggcagtgttttgccggatggagaagatagaaataaagaaggtgagatgcatggcaaagatagtgggaacattagtcacagtggcaggggctatgctgatgaccttatatagaggtcctatagtggagatggtatgggccaaacatccacacaataaaaccaatgcaacaaccacgacagaatcatttgacaaagattggttcttaggatgcacctttcttatcattgccaccctagcttgggcatccctatttgttttacaagccaaagctattcagacgtacaagaatcatcagttaagtctaacttcacttgtgtgctttattggcactcttcaagctattgctgttacttttgttgttgaacacaatccttctgtatggagaattggctgggatgtgagcttacttgctgctgcatatgctgggattgtgacatcaagcatatcatactatgtacaaggactggtaattaagatgaaaggacctgtctttgcaactgcctttagccctttaatgatgatcattgtggccatcatgggatccttcatccttgcggaacaaatttatcttggaggtgtaattggtgccatcttaatcgttatagggttatactcagttctgtggggaaagcacaaagaacaaatagagagcaaagtggcagatgaaattcccttgcctgtaaaagatgctcaaattgctgtaattgcagggccaatgattgatgccacagataattttactgaagaaaaatatggtcagaaaggagaagccaacaacaacaagctctcttcacacataataactatgcctattccagagcttcccactaaagctaaccaagagagaaagacttgagtaatttggaatgtgaataggaattaatgttttttaaatgtatgttccatcaaccccatttttccctttttagcaattattcctttctcctttctcttttttttttcttttttctttgctaccaaaagggtcttgtttgttgcatttaagcaatatataacatatataaatatgtaaaaaattccaacttgctagtcaaagtagaatagagaatcataaagcttatctctccaaaaaaaaaaaaaaaaaag

SEQ ID NO: 7786 - DNA, 1749 bp, Glycine max
  misc_feature (1598)..(1598): n is a, c, g, or t
ccggcccccacggctagccttcttcaagtgttcttcctctttaatttctctatagaatacttacccttttctcaagactaacctctcgatccttctcaaaagaagaaaattaaaatggcaactgaaaagcttagaggttgtgcaaagttttttgcaagctctaaaccctacttggccatgatctctttacaatttggctatgctggcatgaacattatcactaaggtttccctcaaccaaggcatgagccactatgtccttgtggtttatcgccacgcttttgccaccgctgtcatcgctccttttgcctttatttttgaaaggaaaggtcaaccgaagataacattcccagttttcatgcaaatttttatcctagctcttcttgggcctgtgattgatcaaaatttctactatgctgggttgaagctcacatccccaaccttctcctgtgcaatgagcaacatgcttccagccatgacttttgtgatggcagtgttttgccggatggagaagatagacataaagaaggtgagatgcatagcaaagatagtgggaacattagtcacagtggcaggggcaatgttgatgaccttatacagaggtcctatagtggagatggtgtgggccaaacatccacacaataaaaccaatgcaacaaccaccacaggatcattggacaaagattggttcttaggatgcacctttcttatcattgccacccttgcttgggcttccctatttgttttacaagccaaagctatacagacgtacaagaatcatcagctaagcttaacttcacttgtgtgctttataggcactcttcaagctattgctgttacttttgtagttgaacacaatccttctgtatggagaattggctgggatgtgagcttacttgctgctgcatatgctgggattgtgacatcaagcatatcatactatgtacaaggactggtaattaagatgaaaggacctgtctttgcaactgcctttagccctttaatgatgatcattgttgccatcatgggctccttcatccttgcagaacaaatttatcttggaggtgtgattggtgccatcttaattgttataggtttatactcagttctgtggggaaaacacaaagaacaaatagagagcaaagtggcagatgaaattcccttgcctgtaaaggattctcaaattgctgtaattgcagggccaataattgatgccactgataattttactgaagaaaaatatggtcagaaaggagaagccaacaacaacaagctctcttcactcataataaccattcctattccagagcctcccactaaagctaaccaagagagaaaagcttaagcaatttggaatgtgaataggaattaatgttttttaaatttatgttttttgccctttttagcaatttctcctttctcctttttcttttttgatgacataaaaagggtcttgtttgttgcatttaagcaatatatgatgtataattttgaaaagtattccaacttgctagtcaaattagaaaagacaatcataaagcttttattattattattaagacaatcataaagcttctctttatcctccggcctctcttnatagatttcattgactcttgtttttttttctttctttttttatagaaatattattgcttaatttaaattttactgaggctgataattgttgaagttttattgtattaattaatcaaattgttttacattgtcgcaaaccaagtatatgtat

SEQ ID NO: 7787 - DNA, 862 bp, Glycine max
  misc_feature (812)..(813): n is a, c, g, or t
agctcggaattgttggagtcgcttcacatttcaagtgtgacacttcgaagaacaaaaaaagaggccaagtcctcctccgttccagtggcaatggatgcaccgaatccttcttcttccggcgcttctccgttcctcgccaatcttccctctcgcggcctcttctcttccaccgtcgtttcttccaatccgggtggaatgcgggtctatgtatgcaatcatgatacctcaccaccagaaggtcaacatattaagacaaaccaacaaaacatactgattagatcactcaccctcaagaaacaaaagggtgattccagctcaaaggatggatccgatggttcaagaaagaggaatgctgaaaagggtttggaaagagcatcagccaagaaaacaaataatcaaataaattccagacaagagggatcgaacagtcaaacaaccactagggacttccaccacctgactgtggagaggcttcgtgcgcttttgaaatctaaaggcctttcaaccaaaggaaagaaggaggagcttattactcgtctaaaagatgcaactggttaagcgtagcatggtggaaggaatactctgttcattaagcatccaaatgtaagagtagttagtgtttaatgtaacttaggatctggaactaatatacataaacccagtgcaaattacagttacagttgaatattatcgttttggtgctactgtttcatgacaatcagcattaattatgttttttgctgcgtgaattatagaggtcaacggtggctttcaagtaaaatttacgatccacagttgcatattttccaaannaatcccatctcttgttaagttagacatgtaaataggttatatggtgacc

SEQ ID NO: 7788 - DNA, 1692 bp, Glycine max
acggctgtcagctacgtaggccccccccccccccaacaaaaaaattacaaagcacgagggtctcgtttagcaacttgtaaaggacacaacagcatcacttacataacatgcacttccccttctccaccgcattctgtgttctctagtcaatagaaagtgagcactgaatttgctttgtgccgttcctgttttcttataatttgtgcatttttttgcacataaacaaaacccatgggaagggctccttgttgtgagaaagtgggattgaagaaggggaggtggacagcagaggaggatgagatcttggcaaaatacattcaggccaatggggaaggttcttggaggtcattgcctaaaaatgcaggattattaaggtgtgggaagagttgcaggctgagatggattaactatttgagagctgaccttaaaagaggaaacatttctgctgaagaggaaaataccattgttaagttgcacgcttcttttggtaacaggtggtctttgatagcaaatcacttaccaggaagaacagacaacgagataaaaaactactggaattctcacctcagcaggaaaatttacagtttcccaggtgcaggtgcaggtgcaagtgcagggatcatggatacacctaaggtagtatatattcctcccaagcgcaaatgtggtagaacaagtcgttgggccatgaagaaaaacaaaacatacacccaaaaagtcaatgataggattaaccagagacacacacaaattggtttccctcaacagaacagtgacaccgcagttccgacgccaccaactccgtctctagagagtgagggtttgtcaaacgccgttaatgacttcaaggtcctggacggtgacgtggcagagtttgatgagccgagaacggaggagctggaggcggaggtaaataaacgtgacaatagcgttggaggcgtggaagaaagtagtaataccgatgaagacatcttgggactgtgtgaactagagggcattaatgaggacagtgggatgttgttgggttttagtgacattttggaaagttgccttgcggaaacaacatgtggggtttgggacataagtgaagagagagaaagcaatgacgtggtggcggctgatgcttgtcgcgacaaaatagcatcgagtgaggaagggtcatgctcttccatgaatcaagactgggactgggagagcgtgttagagtttagtaacgctgttgataattgggaggaccaagacaaattgctcacttggctgtgggaggacgatgactgcaagagattgggagagacagatactcagatactacaaaacgacatggttattgattggtttctctcttgattcatccaagaataaaataggcttagtgtgtgtgcccccttggtcatgtttctttaatctgttcttcttggattgattagggaatgtgtaaacttaataaatactttttttagttacttatataatcatccttaagacacactaggtaggaatactcttttccttttactttaatttgcatgtcacatgattcgaaaatatcatgcagaagaattggaccagacattagtcactgtagcattcctaggttgtttgaaaatatggatcttattatatacgagttagagtttgatttttttataattaatttatagtacataaataaatatagaattttctgtgata

SEQ ID NO: 7789 - DNA, 2021 bp, Glycine max
tcagctacgtaggccccccccccgtttttctcgtctgacaattgagttgactggaggagttacatgtagctagagcgcaaggcatagaaattgctcttaacgtaatgtatatcagaaacctgctgtagtgcgcgtagtaattcaaaatttgtggtaaagcaaatggcgaaagttttctgtgattttcggttccttctcttggttgccgctggcgtcttcatctatatccagatgaggcttttcgcaactcaatcagaatatgctgatcgcctagctgcagctattgaagctgaaaaccattgtacaagtcaaacgcgatcactgattgatcagattagcttgcaacaaggacgaattgtggccctagaagaagagcggaaacgccgagaccaagaatgtggacaaatgaagtctcttgtacaagatcttgaaagaaaagacctacagaggctgattgataaaatgcaggttccggtggctgctgttgtgatcatggcatgtaatcgtgctgattacctagagaggactattaattctgtattaaaataccaaaggcccatttcttcaagatatcctttatttgtatctcaggatggatcaaatccaaatgttaaaagtaaggctttgagctatgatcagttatcttatatgcagcacttggattttgaaccagttcaaactgaacggccaggagagttaactgcttactacaaaattgcacgtcattacaagtgggctctagatcaactgttctacaagcataacttcagccgtgtaatcatccttgaagatgacatggaaatagcacctgatttctttgattattttgaagctgcagcgagtctccttgagaaggataaatccattatggctgtttcctcatggaatgacaatggacaaaagcagtttgtacatgatccatatgaactttatcgctctgacttctttcctggattaggatggatgctggccagatctacatggaatgagctatcaccaaaatggcctaaagcttactgggatgactggttgagacttaaagagaatcataaaggacgacagtttatccggcccgaagtatgcagaacatataattttggtgagcatggttctagtttgggacagttttttaagcaatatcttgagccaatcaagctgaatgatgtcaaggttgattggaaattaatggatctgagctatttactggaggataaatattctatgcactttgcgaatgttattaagaaagctacacctgtctatggagctgacatggttctaaaggcatctaatatagatggcaatgtgcgcatcaaatataaagatcagtcagactttgaaaacattgctcaccaatttggtatatttcaagagtggaaggatggtgtgcccaggacagcatataaaggagtagtcgttttcagatatcaaacctcacgacgtatattccttgttggtccagaatctttgaagctacttcagatcgaagagtcttaatgctggatgaggaagaaaaatattcacaatgtaagagtagttgttttcagatatcaacggaagtgttgcggagttattgatattgaacttaaaagtgacgtacgatagggatatttcttattttcaaatccactgcctaaaagaggctatgatctgggctaaaaaatgaatacgagaatgcgctggaacaaaattatggccaccatcccgagtattccgagagtgaaattttgtcttgtgatgccaatgggaatctcatatatccctattcttcattcatgtgatagaaagctttacttttaaaggctttgtagatttgcacttgttcgtcattccacgtgcatttcataaccattccggatcataattatatatcctcgtgatttaattttataataaagggcatgtgtgactacctaggatgaaaatgagctaggctggacttggctttattggtgacctattgtcttatttggctaaaaaaaaattgtttccggggatggataagcggccgctctagagga

SEQ ID NO: 7790 - DNA, 2014 bp, Glycine max
gccccctctaagctagctgcaacacaactctgaaatttttgtgagtatttggatgatgaattctcgtgtcgttcgaagtgtttcagaatgttttatcaaaccgttgggccaagctaaagagtcaaacctaatatgtcatttaacaccatgggatattgctatgatgtctttgcactacatccagaaaggtctactcttcaagaagcctgcaacacttgttgatccacaagatttcatggagaatctgttagagaagctgaaacactctctttctctcaccctcttccatttctatcctttggcaggccaacttgtcacccaaaaaacccaagaccctccctcttatactatttttgtcgattgcaacaacactagtggagccagattcatctatgcaactttggatatcactatatctgacatactctccccagttgatgtcccacccattgttcactcattctttgaccatcacaaagcagtcaaccatgatggccacaccatgccactgttgtccatccaagtcactgaactattggatggtgttttcataggctgttccatgaaccataccataggtgatggcacttcttattggaatttctttaacacatggtctgagatcttttttcaaactcaagctcaagggcttgaatatgatgctactgttcccatttcacgccaccctattcataataggtggtttccagatggttgtggtccattaatcaatcttcccttcaaacatgaggacgagtttattgacagatttgaatcaccaaagctgagagtgagaatcttccacttttcagcagagtctattgcaaagctgaaagcaagggctaactctgagtccaaatccaaaaccagcgaaatctcttcgttccaatccttatcagcgcatgtttggagatccgtaacacgagcacggaagctgccaaatgatgagataacaagttgcaaattggccataagcaatcgatcaagattggaaccgcctcttccacacgagtactttggaaacgcagttgatgtggtgagcactgcagggttcacggcaggggaattgcttgagaaggatctaggatgggcagcatggaaggtgcacgtggctgttgcgaaccaaaacgacaaagcggtgagacaaaagctcaaagagtggttgaagcttcctgtggtgtaccaacttggtgtgcactttgatccttgtactgtgaccatgtcgagttccccgaggttcaacatgtatgggaatgaatttgggatggggaaagcggttgcagttctgagtggatatgccaacaaaaatgatgggaacgtgacagcataccaaggatatgaaggagagggaagcatagatttggaaatttgcctttcgcctgatgcagtgagcgcgctggaatcagatgaggagtttatggaagctgcttctgtggccaatttcctacactagatagtgaaagctttttgagaggctatgagattcattaattcacaaagcgctctctgccaccgtttcactcactctgctctcttcgactcttctaaagtggattatgggaaaatcacatttactggttagatgagagatctgacaatagaattagttagcacgctgtacattttaagctttgtgtgtaagagagactggcccagcgtgtgtaggaacatcatatggttaagatctcttagtcttatgttgaaattatgcatcaatcgaggagaaagattttaaatgttgagtactgccagaaagaattgggagaaatgtagaggaaggatcacttggagccatttgggagaaatattcagcagatcttcaattcggttcgggcaagcagatttttcttccgtgactaatgaacggcacttggctcccgagtaataaagttaaagcatccgtactttggttcgtaaaaagtgaaaatttctaatttgaatgtttgattttaaaacataagttaaattagattattcatcttctcatctgaattaaaaaaaaaaaaaaaaagtt

SEQ ID NO: 7791 - DNA, 1639 bp, Glycine max
aatcgagaacccgcaaacagttatttttacaaggatatatccgccccgggcgcccccccccccgtcattgacttcatcaactctttgcaggacgatgagtactcctccagttgttgagcgcgtttcagaatgcttcatcaagccgcagcactccaaccatgaatcaaaccaaatctgctacttaacaccttgggatattgctatgttgtctgctcactatatccaaaagggccttctcttcaagaagccctcatcaccacttgttagtcacaataatttcatagagaacctgttgcagaagctcaagcactctctttctctcaccctcttccatttctatcctttggctggtcgccttgtcacccaccaaacccatgaccctcccttctatgctgttttcgttgattgcaacaacagtgatggagccagattcatccatgcaactttagatatgaccatatctgatatcctctctcccgttgacgttccacccattgttcaatcattgtttgaccaccacaaagctgtcaaccatgacggtcacacaatgccgttgttgtccgtccaagtcactgaatttgtggatggtgttttcataggttgttccatgaaccacactcttggtgatggcacttcttattggaatttcttcaacacatggtctcagatctttcaagttcaaggccatgaacatgatgttcccatttcgcacccacccattcacaatcgctggtttccagagggttgcggtccattaatcaaccttcccttcaaacatcacgacgattttataaacagatatgaaacaccgttgctgagagagagaatcttccacttctcagcagagtctattgcaaaactgaaagcaaaggctaactcggagtgcaacacaaccaaaatctcatcgttccaatcattatcggcacttgtttggagatgcataactcgtgcgcggcgcttgccgtatgatcaaagaacaagttgcaagttgtccgcaaacaacagaacaagaatggaaccaccactgcctcaggagtactttggaaactcaatttatacactgaatgcaggaaccgccacctcagggaaattgcttgagaatggtataggttgggcagcatggaagttgcacaaatcggttgtaaaccataacgacagagcggtgttggaaacgctcaaagagtggttagagagtcctctgatatatgatcttggtcgttattttgacccgtactgtgtgatgatgggtagctcgcccaggttcaacatgtatgggaatgagtttggaatgggaaaggcagttgcacttagaagtgggtatgccaacaaatttgatggaaaagtaacatcatacccaggccatgaaggaggaggaagcgtagatttggaagtgtgtctttcgccagctgtaatgagtgcactggaatcggacgaggagttcatgaatattgctctagtttctgtttacaatcctctctagtcattattcactgttacttccatcgcccccataataatcatttgtcctagaataatccgttatctttaattagtattattttaaaatacatcatgttaatgtgttttatgtattgtgaattcatatatcatataataacaacacgtgatttattttgtc

SEQ ID NO: 7792 - DNA, 1647 bp, Glycine max
agatttatttggttcagagttcccaaagaaaattaataatactacatctctaagcagtctgcaacacaaatctaaattgtctgtgcccctatttgcctcatgactactacccctgtcgttcaacgcatttcagaatgcttcgtcaaaccacatggtttaacccaagtgtcaaaccaaatatgtcatttaacacaatgggatattgttatgttgtctaagcactatatccagaagggtctactcttcaagaaacccacacctcttgttgatcaacatgatttcatagagaatctcttggagaagctcaaacactctctttctctcactctctcccatttttatcctttggctggtcgccttgtcacccaaaaatcccaagaccctccttcttatgctgtttctgttgattccaaaaacagtgatggagccagattcatctatgcaactctggatatgaccatatctgacatcctctctcccgttgacgtcccactcgttgttcagtcattgtttgaccaccacaaagcagtcaaccatgatggtcacaccatgccccttttgtccatccaagtcaccgaaatagttgatggtgttttcttaggttgttccatgaatcacgctgtcggtgatggcacctcttattggaatttcttcaatacatggtctcagatctttcaagctcatgctaaagggcacgacactgatgttcccatttcacaccaacctattctcagccgctggtttccgaatgattgtgctccaccaataaatcttcctttcaaacatcatgacgagtttatcagcagatttgaagcacccttgatgagggagagagtcttccacttctcagcagagtctattgcaaaactgaaagcaaaggccaacatggaatccgataccacaaaaatctcttcattccagtcactatcagcacttgtttggagatccataactcgtgcatgctccctaccatatgagcaaagaacaagttgcaggttaaccgcaaacaatcgaacaagaatggaaccacctctgcctcaggaatactttggaaactcagtgagtagggtgagtgcagaaacaacagtaggggaattacttgagaacaatctaggatgggctgcatggaagttgcacctggctgttacaaaccataacgacagagtagttctgcaatcactcaaagagtggttacagtctcctttaatctatcaacttggtcagcccatggacccgtacgttgtgttgataagtagctcgcccaggttcaacatgtatgggaacgagtttggaatggggaaagctgtagcagttagaagtggttatgccaacaaatttgatgggaaagtgacatcatacccaggtcgtgaaggagggggaagcatcgatttggaagtgggccttttacctcatataatgagcgctctggaatctgatgaggagtttatgaatgttgtctcggtttccaatcccttatgctagtttgctattgttcccactgttagtaaaaaaaaaaaatcgtctattttaatattgtgagtgttagagaatttagaattaatggagttgtatggtacaaatatccaaccatttgattctgtaaaataaagtaatgaaaatgatagaataaggagtttgatgtatggc

SEQ ID NO: 7793 - DNA, 1474 bp, Glycine max
ctaaagtgagacgtgcagtacctgatcatcacttagaaccttcttcatccaatccccgaagatcagatgctaactaccctgtggatgttgatagaccccaatcaagcaatgcaacagctgatgagaagagtttgaaccaagcatccagagaatcttcagcaggtgcattgaaagagcgagagaatatgggatcgttggaaaactgatccttctcagccacccacttccgaggccccccccccaactgataggccaccaaaatctacagaaccatcatcaaatgggttatcagtaacaggaactatgcaccaagagcaagttaggcctcttcttagcttgttggataaagagcccccatctggacgcttttctggacagcttgagtatatgcgtcagttttcaggattagaaagacatgaaagtgtactccctttgttacatgccactgaaaagaaaacaaatggtgaactagactttttaatggcagaatttgcagatgtttctcaacgtggaagggaaaatggaaatcttgactctagtgctagagtttctcataaagtcactcccaagaaattaggaactttgggttccagtgaaggagctgcttccacatctgggattgcatcacagacagcttcaggtgtactctctggttcaggtgttctaaatgctagaccaggtagtgctacttcgtctggactactttcccacatggtttcatcgctgaatgcagaagttgccagagagtatctggagaaagtggcagatcttcttcttgagtttgcacaggcagacaccacagtgaaatcttatatgtgtagccaaagcttgctcagtcgtcttttccagatgtttaatagggtggagcctcctattttgttgaagatactgaggtgtattaatcatctgtcaactgatccaaattgcttagaaaatcttcagcgtgctgaagcaataaaatacttgataccaaatcttgaactgaaagaaggatctcttgtatcagagatacatcacgaggtcttgaacgcactattcaatttatgcaagataaataagaggagacaagaacaagcagctgaaaatggaatcattccccatttgatgctattcatcacatcaaattctcccttgaaacagtatgcattgcctctgctatgtgacatggctcatgcatctcgcaattcaagggagcaattaagggcccatggcggtttggatgtctatttgaaccttcttgaggatgagctttggtctgtgacagcactagactctattgctgtttgtttagcccacgacaatgataataggaaggttgaacaagcactgctgaaaaaggatgcagttcataacctttgtgaagttcttcccaggctgtccacagcaaccttttgtccccttattggagcccttcttttaaatcctcaccaaatctgcccggatcaataccccatttggctgtttttgggttaac

SEQ ID NO: 7794 - DNA, 2066 bp, Glycine max
ggcgggccgggctttttctcttttcctaaattttcagatctacgattctctctctcttcgatggcttccacggttgttgcggccgccgtgaggagtgacgtgccgcctcggcagccggtggatccttcggcgtcgtcctcccccgacgtcgctgatcggagcgattccttcaattcctctcccaaccacttctccgacactgaaattcagttacaaactccagacgtattgaagagtgaagagtatcgccaattgttccgtcttccactggaggaagtcctcattgaagattttaattgtgccctccaggaaaacctacttattcagggtcatatgtacctctttgtcaacttcatttgtttctactcaaacatatttggatatgagacaaagaaaataatcccattccctgaagtcacaagtgtaaggagggcaaagacggctgggctctttcccaatgccattgagattctagccggaaacaagaagtacttctttgcatccttcctatcccgtgatgaagctttcaggattattaatgagggatggtcgcgacatggcaatggagccatagcaattatggaacagaaggaatcaatgtcagagtccagctgccaagagaatggatttgtagctgttgaaaatgtcaaaagttcttatataactaacaacggatcactttctactgatctgagcaaagatacggcgcttccatccattgtagatgatccattattgacggaagattcagcgaagcaatgcagtgtaaaacaggttgctgaacctgaattgaatattgatgccccaaatgctgcaagtgtgagttggaagtggaacgaggaggatattgatgccccatcaatccttgaagcatatacatgtgttgcagattcagtgtttccgatgaaggttgaagacttctttaggtacttattctcagatgatgctctaaattttcttgagtcttttcgccaaaagtgtggtgataaagactttaggtgttctccgtggcatcctcaagagaaatttgggtatgctcgtgaactgtcatttcaacatccaataaaaatttatcttggagcgaaatttggtggctgccatgaggtccagaaatttcgtgtttataggaacagtcatttggttatcgagacgtcgcaagaagtcagtgatgtaccttatgcagattatttccgggttgagggactgtggagtgtagagagagacaaggatgaatcaaaagaatgctgcactttgcgggtatatgtgaatgtggcattttctaaaaaaactatttggaaaggcaaaataatacaatcaacaattgaagaatgtcgagatgcttatgcgacatggataaacatggcacatgaaatgttgaagcagaagaaccttgaaaaacaagctcaaaatggtgaaatcaatttagatagagaagtgaagactggagaatcttcagaagggtcacaggagcaaagtaaccatacaaagatactagctacttccaatgcctttgatgctactacccacaatgtcggctctcatttgccgggaaatttcatcgaaccatcatctgttccactgtttaaagagtttatgacgaagttcagatcatctttgagaagtcatagcaatctttctctgctccttattactgttgtcgctctgattttcttcattcagcagtgtagcatacttgtgctgttggctagacctcaacacatacatatgaacactcctgtagacatcacgaataggatgaacaatgaggtcactagaagtccttcagacatagcgtggttggagaaaagaattcatcacctcaaagatgaaatgtacatggttgagagtaggcttgaaaggatgcggtatgaacatttacttttaaaaaaccaacggccgctcccggtccacacccacccgccagatttcattgttgaatcatatccttcttatagcatttttttgtatattcatgtgatatatagatatgacatttaattttgttgtaaatgagaggactttatgttatacccaaaattaaagaaatgaggaacttgtgtatttaa

SEQ ID NO: 7795 - DNA, 871 bp, Glycine max
  misc_feature (4)..(5): n is a, c, g, or t
  misc_feature (10)..(10): n is a, c, g, or t
  misc_feature (12)..(12): n is a, c, g, or t
  misc_feature (21)..(23): n is a, c, g, or t
  misc_feature (25)..(34): n is a, c, g, or t
  misc_feature (59)..(60): n is a, c, g, or t
  misc_feature (86)..(90): n is a, c, g, or t
  misc_feature (108)..(109): n is a, c, g, or t
  misc_feature (111)..(113): n is a, c, g, or t
tagnntagtnantcccattcnnntnnnnnnnnnngctagcttaatagatttgtatatannagaaatagctcctgatccttgtttannnnnttcaaagttcttggctcnngnnncagcaattcccgattctgcaagagactcttatgatgagctctaccatgcaatggacatgtatcttgaggtgcatactcaattgtcccaggaagaaagattgaagatatgctgtggtttaaattttgagaagctttcacctcaagcttgcctacacctttctcagaacaaaaaatttccttcaaaatcgactgttcaagctcttatctctcaacaatctaagctaaaaaatttactccatgtcattcccagtacatcttcatacaatgattcaccttgcagctccagtggtgctgctgctcaaaagggaaagaaagacaaaaccagtgaacaagttgtgttgtattctggcaattttgatctttctacagacaatgagaaactcgaagcacatttacaaggaatgcagtggagggtcatggagttagagaaattctgtaggaaaatgcaaatccaaatggcaaagatcacaaaatcaaaagcatcaggccatagttatgcaaaatctttgcccaagctatgctcttgacactttattttttggattttgtttattctccatttgtaattttcatatatgtacagcacaggaatgagttgcgtgtctgtagtttttaatcttttccgcgaaaccgagaacagtgatattgattgtacagtcatgaaataatggaagagacttcacagaatttcagattagagtctggacaataacctgtataagaaacaaaaaaaaaaaaaaaaaaccggaaggcctgaa

SEQ ID NO: 7796 - DNA, 1760 bp, Glycine max
ttttttctttatctctttctttcttgtgtgcctttctagcgtcttggacttcctggttttctgcttctttctgggtgatgagatgctttgagatccttcaacagtgttagctgattgacaccattgttctctcttctcgtgcaaaatagtgtcatcaaaggctctcatcattgctaagctactgattcaaaaaagcactccatgaataacaaactacattagactacaaatcagaagccaaggtgagacttttttagccaacaaatccttcacagtatttcttccgctgctcgcgtccggcatatcaaatgccaagatcaagggggtcagagttgcctcaaaggcagtctccacgaggtgcacatcaacatcggacatcaagttctgactctgatccattgcatcatcggccgattgctgaccgaagtccaaagctaggagatcggcgttcccccagaggtactcaatctgagggattaaatcagaagaagctaggaactcgcattgcagatttggaatctcagcttggtcaagcacaagtagagttgaaagttttaaaggaccagctagcttctgctgaagccgcaaagaaagaagctcaagatgagctagtgaagaaagctgtgcaatcagtagtgccagtggtagagaagctccaagagaaatccacttccaagaatgctccagagactaataaaactgaaagcaaatcccaagatattatacctgatgacaaccaacaagagactgatgtgtttgaagttccaattgagaagttgacaattgaattcagcaaacctgctgatcaatcagaaaaggaaactcaaccatctgaagactctaacgcaccagcaatatcaaagccttctgtggatgaacacgaactaacactaaagaatgacgaaattgcattgttgaaaaccggtttggaagagaaaggaaaggagttagagtccatgactaacgaaaaggagaatctgaagaaccaactgaatgaagcagtttcaaaagtgtctgctgctcaaaccaaggaagaagaaatgaccttgcagttgaaccaactgagagaagagttggaagccagtaaagccaatggagacaagttggatgagaagttgaaatctatggaagcaagaaaggaggggttggagtcagagatgaagaagctaagggtgcaaactgagcaatggagaaaagcagcagatgctgcagcagcagtgcttgctgggggtgtggatatgagtgcaaggattcctgaaaggtgtggctccatggataagcactttggtggcacatttgagacacctgctggtagatacaatggctatgtggggtctcccggtatggctgatgtcttggatgatggttttggaggtggtaagaggaagggttctgggattagaatgtttggtgatttatggaaaaagaagagccaaaagtgatttatggcttatatattcagtgagtgaattagtagtactttaactaaggtcatgttttgatggtagcagaaacttccaaagcagttacttactgttttgcatctttctggtatctttagtcttttgtggtattattaaggccattaagcgtgtagtgttactgttgcatcatctgtgcaaggtagtgatgtgaactttttgaaagatggattatatatttcacttctcctaaagctgtgatgagcacttttacttgtttttaggcatattctccggttttgcactacttggagtaaagaagatgcttcattttctgtt

SEQ ID NO: 7797 - DNA, 3113 bp, Glycine max
gaccgtccggattccctttcgatcacgcgcccgcataatcaaacagcaattgattgcttacaattgcgattctatctccactagtctggcattgggcactgaagtgagaatcgtaatcaatgggtgcgagtcgaaaactccagggggagatagatcgcgttctcaagaaggtccaggaaggcgttgaagtcttcgatagcatctggaacaaggtttacgacactgacaatgctaaccagaaggagaaatttgaagcggacctcaagaaggagattaagaagctgcagaggtacagagaccaaattaagacttggattcagtccagtgagatcaaggacaagaaggttagtgcctcatatgagcaggctttggtggatgcacgcaagataattgagcgagaaatggaaagatttaagatatgtgagaaggaaactaagaccaaagcattctccaaagaaggcttgggtcaacagcctaagactgatccaaaagagaaggctaaatcagagacaagggattggttaaacaatgtggttggagagttagaatcccaaattgataactttgaagcggagcttgaagggctttccgttaagaaaggaaagagcaggccacccagattgacacatttagagacatcaattactcggcacaaggctcatataaaaaaatgtgaattcattttgaggctactagataatgatgaattaagtcctgaggaggttaatgatgtcaaagatttcttagatgactatgttgagcgtaatcaggatgattttgatgaatttgatgatgttgacgaactatacagttcattacctttagataaggtggagactctagaagatcttgttacaattccccctggtctttctaaggtggcacctagtcttagcttgaagaatactttgacagtatcagcatcacaatcagcatctgcatcgcaaacatctgatacttctgtccaggagcaagctgatgacacaacgtcccaggatagcaattctgacattgttgccaaaactccaccttgtaaaagtgggggaattagttctgctacctcaactcctgttgaccatgctactcctgtttctgtgaatgtttctggtcataacttgtctagtgcacctgttgcagtcctacctggttcaaattctgtgcggaatgtcttagagaatactaatgttatcaattcatcatctgtaaatcagtctacctctacaaaggaagaagagattaatagcttccctagccggagaccgtctccatcgctttctgatgcaacacttttgaagggacagaagcagcctgtcaaatcaagcaacagccagcgttcctcttggttctggaaacatggtttctagcaatgtggcccttggatcagtctcttcagcctctgaaatagctaaaaggaacataatgggagctgatgataggcttggaagtagtgggatggtgcagcctcttgtatccccgctaagtaatagattgatcttgcctcaggctgcaaaggctaatgatggaactgtttcagttgactctagtactgttaatgaagccgcagccgggagagttttctccccttctggggttcctggcatgcaatggagacctcgaggtccctttcagaatcagaatgatgcaggccagcttcgtggaagaactgaaatagcacctgatcaaagggaaaagtttttgcagaagtatcagcaagtgcaacaagggaatagtaccctccttaatatgaatagtaccctccttaatatgccttctctagttgggggaaaccataagcagttttctgcccagcagcaaaatccccttttgcagcagtctggtattggacttggggtccagtccacaagtctcgttggtatttcttctgcttcactacagcagccacccaatcctgtccattccccctctagtcaacagccattgatgccaggtgtttctatagatgcagatgttggcaattctaagattgaagaacagcagcagcatcagaatttccctgatgattcaacaacagaatctactgctagcactgggattggcaagaatctcataaatgaagatgattcaaaatcagcatttgctttagattctcctgcaggagtgtctgcctctcttccagaatctgctcaaacttccagggatatcgatttgtctcctggccaaccattacaacctaatcaacctactggcaaccttggtgtcattggaagaagaaatggtgctgagcatggagccattggtgataattttagtgggtcgaatgttagttctggtggagtgcgtgatcaattatataatttgcaaatgcttgaggcagcccacttcaaaattccactacccaaagactcggaacgtcccaggacttacactcctaagcacccagcaattacacctcccagctatcctcaagtacaggcacctattgttaataatcctgctttttgggagagggttggtcttgaaccatttggtactgatactctgttctttgcattttattatcaacagaatacttaccaacaatatttggctgcaaaggagttaaagaagcagtcttggagataccaccgaaagtataacacatggtttcagcggcatgaagagcccaaagttgcaaccgatgaatatgagcagggaacttatgtgtactttgatttccatattgcaaatgatgacatgcaacatggatggtgtcaaagaatcaagactgaattcacttttgagtataattatcttgaagatgatcttcttgtatagaagatgccatctggtattgccaattatgtttggaattgttgacagagaagttatttattcaatgcacatcgtgactagcaggttattaggctgcctttctttgtcacagcagtgcctctgtatttagtttttttatgctaattgtccttggttgatactttcttgtaggattttgtttgcaaggattaaaatataacatttttccttttaatcttctctgtatttgagctctgatttctcattcagcttgtttagggacaaattcaaggaaaaaaaatatgattaaagtgttgaagataaaataagggaagattgatgaggtaaaaaaaaaaaaaaaa

SEQ ID NO: 7798 - DNA, 1313 bp, Glycine max
  misc_feature (6)..(6): n is a, c, g, or t
  misc_feature (27)..(27): n is a, c, g, or t
  misc_feature (51)..(51): n is a, c, g, or t
  misc_feature (167)..(167): n is a, c, g, or t
ggattnaaatattactggaatgatggnatcaatatctagttcaatatatgnacacgtttattataagaatataattgtttaagataaaaagaataccaaatatcaatgttgttgttattatgagctcccccccccatactatttgtattatgcagatgttggcaatntctaagattgaagaacagcagcagcatcagaatttccctgatgattcaacaatagaatctattgctagcactgggattggcacgaatgcgctcataaatgaagatgattcaaaatcagcatatactgtagatgctcctgcaccagtgtctggcctctcttccagaatctgctcaaacttccagggatattgatttgtctcctggccaaccattacaatctaatcaaccaactggcaaccttggtgtcattggaagaagaaatggtgctgagcatggagccattggtgataattttagtgggtcgaatgttagttctggtggagtgcgtgatcaattatataatttgcaaatgcttgaggcagcccacttcaaaattccactacccaaagactcggaacgtcccaggacttacactcctaagcacccagcaattacacctcccagctatcctcaagtacaggcacctattgttaataatcctgctttttgggagagggttggtcttgaaccatttggtactgatactctgttctttgcattttattatcaacagaatacttaccaacaatatttggctgcaaaggagttaaagaagcagtcttggagataccaccgaaagtataacacatggtttcagcggcatgaagagcccaaagttgcaaccgatgaatatgagcagggaacttatgtgtactttgatttccatattgcaaatgatgacatgcaacatggatggtgtcaaagaatcaagactgaattcacttttgagtataattatcttgaagatgatcttcttgtatagaagatgccatctgggacactgaaaggaaagaaaatatgattaaagtgaagataaaataagggaagattgatgaggtatgtatgaactttgtttgaatgtgactgtcaaatagagaaaagtttggacatacaatcaaattataattgaagataagatggcacaagccgaattgatgagggttattttttttttaagaatcaattttggtacttggaagtttataacaacttattcattgtttaacgagttaaatatctttgatgggttcatggttttatgcaagtcaaggaatagattcagctaacatttaagtaaatattaaacccgtatttgtaatgaccccc

SEQ ID NO: 7799 - DNA, 694 bp, Glycine max
cgaaaatcgcagcacgctctatcatctctctcagtaatggcaaccacattcacgtttttccgaccaaccatgatccgggcctccgctggttctccgggcaggcccgacccgagcaacaggaagcccgtttcctccaattggtgggctccgctgttcggatggcccgcggatccggactacatcggcccatcgcagaagacgagttatcaatcggatccggagcgggaagtgggcccgggccggcccagatccaaattcgcagcggggtgcttcacggagaagaaggcaaaagagctgcggaagaagaccgtggaaacgtcgacgtttcacgacatcatgtaccactccgctattgcgtccaggctcgcgtccgatgtttctaaagggtacgagaaataaatgtttgttttctaattaatgttttctaccctcagactcactcatcgttgaatttcgttttaatttctttcaactatgaactaatggcctattcatgatttgggacacactgtaattaacctatgtgcgtgatttgtctccttatgttctattagtgtggttccttcttcaaaaaaaaacaaaaaaaaaaaaaaaaaaaaaaaaaaaaaaaaaaaaaaaaaaaaaaaaaaaaaaaaaaaaaaaaaaaaaaaaaaaaaaaaaaaaaaaaaaaaaaaaaaaaaaaaaaagaaggggg

SEQ ID NO: 7800 - DNA, 931 bp, Glycine max
gattgggtaccgggccccccctcgagtcagctacgtaggccccccccccagttcaactagaacaatctcttaaccctctctcaaactccttcagaatccccctttcccagttcccaacttcatttcaaatcaatatgaagaaaattgtgctaaagttggaaatccatgacgacaaaaccaagaaaaaggccatgagggcagtatctggtatttcaggggtggagacagtctcagtggacatgaatgacctgaaaatgactataattgggaatgttgatgctgtaatagtagttggcaagcttagaaaatgttgtgatcatgctgatatactatcagttggaccagccaaagaggagaagaaagaggaaccaaagaaagatgagaagaagccagaagacaagaaagatccaaaggaggaatatgctgaacttctgaacgccttttataatcagaccagacagcagcaataccccccttattatcacagaacagtggaagaggatccaactagctgtgttatttgctaagtattggaatatcatatggagtttgaaatgatggataataaaatgagatcaagaaaagatggtggctgcatggagttgaagaagaattatgtttcttttggagttccctttttccttcttttctttcttatgttttggtctttcaggctttcctcttgttttagttcataaaagaaaagaaaaaaaaaggagtctaaaactgagatatataatatgtaaattattttgtggtgtagtacaatcaatgtattcaaatttctggcagtgagaaattggttttattaaattcaggtgttcaattcttagtctgtggtttgtgttgttccttttgagaattaaacatggcaaaggaggcaccagggggcaaaacataaaagtcaaaagacaaagtaaaagattttttg

SEQ ID NO: 7801 - DNA, 1740 bp, Glycine max
  misc_feature (1737)..(1737): n is a, c, g, or t
gcaatatcagagtattgtggatgagaaattgaaagagattggacctatgcagcacgcactgggcaagctgcggactacaaataatgccggccggggtggtttgtgttcatctgaggatgaacttaacagtgttattcccggtgtccacccccgcgtccggcatgagagcattcctttgactgaggaaaaacaaatcctccgagaaatcaaacagcttgaggggacaagggagaaagttattgctaatgctgcaatgagggccaagttacaggaatctatggggcagaaagaaaccattcaagatcaggttaagcttattggtggggatttggatggagtgaagaaagagagagaagcgattcggtccaaaatcaagcaaattgatgatgcactgaaagccatagacaaggatatccagtctctacaggaggaactgacagctgtttctcagaagagggacaaggcttttgagagcatgcagcagctaagaaaacagcgcgaggaggggaacacctatttctaccaaagtcgtacagttctgaacaaagcacgggagctggctgcaaagaaagatattaatgctcttgatgaagtttcacagacagaggttgagaaatttatggcactctggaacaaggacaaagcatttaggaatgattatgaaaaaagaattttggcctcattggatatgcgacagttgagtcgggacggacggatgaggaacccggatgaaaagccaatcctggaagaaccaaaacctgctgaagctgaagcattaccaaaaactttcacaaaacagccaaaggaggagcctaagccttctccacaagaaactttgcctgctcagaaagaatccaaaaacaaggggagggatttgaaatccaaaccggagagtaaggatgtagcagaaactgatgaatatgaatttaaaaatccccaaaaggaggcccctgccaaagagtgtgaaatcgatccagcaaagctgaaagagatgaaaagagaggaggagattgcgaaggcaaagcaggccttggaaagaaagaagaagttagcagagaaagctgcagccaaagcagccatcagagcacaaaaggaagctgagaagaagcttaaggaccgtgagaagaaagcaaagaagaaatcaggtgctgcagctgtggccaaccctgaggatgaaccaaaagatgaagttgtcgaggctacagagccagaaaaggttaacgatgatgtccaagtcctggctccagtgaaggaaaaggtccaaaaggagagtggcatcaggtccaggggccgagcaagaggcccagactcgattccaaaagctattattaagcggaagaagtctaacaattacctgatatgggctgcagctgcggctttgctagtcctcctgttggcagtgcttggatacatctatcttttctgaaaagcttagatgtagaaggagctgtgaaaccaattttctgagtgggtggctaggtttgtgaggtagcataagttatgttcatgtttctatacatcctcttgggagaatagatgaaacacactttgttgtgcttagctcctgctttggggagaaaactgcatgcatacatttagctttgactatgtactttcaaaattttgttcagatttcatttactgaatttgcttctatagttaatttgtcataggaatggtaccatgatatactgaaaaacttttatgatgatagattttacatgttggttaacaaanatc

SEQ ID NO: 7802 - DNA, 1325 bp, Glycine max
tatctaagcttttgagagtatacagcagctaagaaaacagcgcgaggaggggaacacctatttctaccaaagtcgtacggttctgaacaaagcacgggagctggctgcaaagaaagatattaatgctcttgatgaagtttcacagacagaggttgagaaatttatggcactctggaacaaggacaaagcatttaggaatgattatgaaaaaagaattttggcctcattggatatgcgacagttgagtcgggacggacggatgaggaacccggatgaaaagccaattctggaagaaccaaaacctgctgaagctgaagcattaccaaaaatggctgcaaaacagccaaaggaggaacctaagccttctccacaagaaactttgcctgctcagaaagaatccaaaaccactcagaaagattccaaaaacaaggggagggatttgaaatccaaactggagagtaaggatgtagcagaaactgatgaatatgaatttgaaagtcccgaaaaggaggcccctgccaaagagcctgaaattgatccagcaaagctgaaagagatgaaaagagaggaggaaattgtgaaggcgaagcaggccttggaaagaaagaagaagttagcagagaaagctgcagccaaagcagccatcagagcacaaaaggaagctgagaagaagcttaaggaccgtgagaagaaagcaaagaagaaatcaggcactgcagccgtggccaaccctgaggacgaaccgaaggatgaagttgtcgaggttacagagccagaaaagattaacgatgatgtccaagccccggctccagtgaaggaaaaggtccaaaaggagagtggcatcaggtccaggggccgagcaagaggcccggactcgattccaaaagctattattaagcggaagaagtctaacaattacctgatatgggctgcagctgccaccttgctagtcctcctgttggctgtgcttgggtacatctatcttttttgaaaagtttagatgtggaaggagctgcgaaaccaattttctgagtgggtggctaggtttgtgaggtagcataagttatgttcatgttctatacatcctcttgggagaatagtagatcaaacacactttgttgtgcttagctcctgctttggggagaaactgcatgcatatttagctttgactatttactttcaaaattttgttcagatttcatgagatgttactggaagcttgaatttgtttctgtagttaatttgtcataggaatggtaccatgatatactgaaaactttatgatgatagattttacatgttggttaacaaaaaaaaaaaaaaaa

SEQ ID NO: 7803 - DNA, 2609 bp, Glycine max
ccgactgtcaatttgggggttcttgataccttcctttttcccacccctccataatatatagagcctcgagctcctcagtttccaatccccgtactccctctctctcttccttttcttgaaacttccctctttccttaaaggattccctcctaatttggtgggattatcccaagtttcagctgctaccactcatcagcattgccatttcctgtttcactcaccacatggaaaagcttattcgcatgttccctttgcttcttcttcttcttctgttccccacttttgccttcgctggccatgactatggccaagctctgagcaagagccttctcttctttgaagcccagagatctggctaccttccccacaaccagagagtcacatggagagcacattctggtttgcaagatggcaaagcaagcggggtggatctagttggagggtactatgatgcaggggacaatgtgaagttcgggttacccatggcgtttaccgttacgatgatgtcgtggagcatcattgaatacggcaaacaaatggctgctagtggtgaacttggtcacgccatggaagccgttaagtggggtacggactacttcatcaaagctcaccctcaacccaatgttctctacggagaggtgggagacgggaacactgaccattactgttggcaaaggccagaggacatgacaaccgaccgtcatgcctacaagatcgatccaagcaatcccgggtcggatcttgccggagaaaccgccgccgctatggccgctgcctccattgttttccgacgctctaaccctgcctatgccgccgaactcctccgccatgcctaccagctatttgattttgctgacaaatacagaggcaaatatgacagcagcattacggttgcccagaaatattacagatccatcagtggttacaatgatgaattgctctgggctgctgcttggctctaccaagcatctaacaatcagtattacttggattaccttggaagaaatggtgattccatgggtggaactggttggaagatgactgaatttggttgggatgtcaagtatgctggtgttcagacattagttgccaagttcctgatgcaaggcaaagctgggcatcatgctccagttttcgagagatatcagcagaaggctgaatctttcatgtgttcgtgccttggaaagggtgatcgcaatgttcagaagactccgggtggcctcatcttccgccagagatggaacaacatgcagtttgtcacaagtgcctcatttttagccactgtctactctgactaccttgcttcctctggtagaaacttgaggtgcagttcaggcaatgtgccccctgctgaacttatctcccttgcaaagtctcaggttgactatcttcttggtgacaacccaagagccactagctatatggtgggctatggaagcaacttcccacaaagggttcatcacagaggttcatccattgtttccatcaaggttaacccttcatttgtcagctgccgtggaggttatgctacttggtttagcagcaaaaggagcgacccgaacctgctcactggtgctcttgttggtggacctgatgcatatgatgactttgctgatgaaagagataactatgagcagacagagccagcaacctataacaatgctcctcttatcggtattctggcaagactaggtggaggtcatggtggctataaccagcttcttccagttgttgttccagctcctaagcctgttgttaccaagcctcaaccaacccccagtcccaagacaactccacctccagcttcgtggtcaggcccaatttccattgaacagaaaatgaccacctcgtggattgcccatggaataacttactacagatactcaacagtggtgactaacaaatctaacaagagtctcaattctctcaatctttcaatatccaagctttatggtccaatctggggtgtcacaaaatcaggtgattcatacacattcccatcatggctcagctcattatcagcaggcaaaagccttgaatttgtctacatccattctgcttcagcagcagatgtctccgtgacaaactacgtgttggcctgagagtgacatgggaatggtttactgctttgttgtgtaagattgtgtagccatacaaatgtgcagtgaggagagggtctttacgtttttccttctatattttgatgtcaaatcttcttcttcccttgtgtattttgcatttcagtaggttagatcaaaataggtagattatataagatggaaggaccggagcagaaaggagtgaagagacaaaaggcagagctcatcctctttcttctccgctttacaacttatatacagtgagtgatacaagacagacagtgaaacagtgttgttgagaagtttaaaaaacaaagtgaacttctcaatatttcagagaagagtcatctcttgtatttttcaacagctttggatgtcttttctgtgtttgatgttgtaagctttgcagcattttgtattctctacagagaaacagtttgtgctatatagtattatgtttttgtgctgtgcaaaactaatttggttatttcccgcgtaaaaaaaaaaaaa

SEQ ID NO: 7804 - DNA, 2572 bp, Glycine max
  misc_feature (2504)..(2505): n is a, c, g, or t
  misc_feature (2508)..(2509): n is a, c, g, or t
  misc_feature (2511)..(2512): n is a, c, g, or t
  misc_feature (2514)..(2519): n is a, c, g, or t
  misc_feature (2521)..(2524): n is a, c, g, or t
  misc_feature (2527)..(2527): n is a, c, g, or t
  misc_feature (2534)..(2534): n is a, c, g, or t
  misc_feature (2536)..(2536): n is a, c, g, or t
  misc_feature (2544)..(2544): n is a, c, g, or t
  misc_feature (2561)..(2561): n is a, c, g, or t
  misc_feature (2571)..(2571): n is a, c, g, or t
ccacgcgtccgctctctctctctcccttttcttgaaacttccctctttcctttaaggattccctcctaatttggtgggattatccctcatcagcattgccattccctgtttcactcaccacattgaagacatggaaaagcttattcgcatgttccctttgctccttgttcttcttctgtgccccaattttgcctttgctggccatgactacggccaagctcttagcaagagccttctgttctttgaagctcagagatctggttaccttccccacaaccagagggtcacatggagagcacattctggtttgcaagatggcaaagcaagcggggtggatctagttggagggtactatgatgcaggggacaatgtgaagttcgggttacccatggcgtttaccgttacgatgatgtcgtggagcatcattgaatacggcaaacaaatggctgctagtggtgaacttggtcacgccatggaagccgttaagtggggtacggactacttcatcaaagcgcaccctcaagccaatgttctctatggagaggtgggagatgggaacactgaccattactgttggcaaagaccagaggacatgacaaccgaccgtcatgcctacaaggtcgatccgagcaatcccggttccgatctcgccggagaaaccgccgccgcaatggccgccgcatccatagttttcagacgctctaaccctgcctatgccggcgaacttctccgccatgcctaccagctatttgattttgctgacaaatacagaggcaaatatgacagcagcatcacggttgcccaaaagtattacagatccatcagtggttacaatgatgaattgctctgggctgctgcttggttgtatcaagcatctaacaaccagtattacttggattaccttggaagaaatggtgattccatgggtggaactggttggagcatgactgaatttggttgggatgtcaagtatgctggtgttcagacattagttgccaagttcctgatgcaaggcaaatctgggcatcatgctccagttttcgagagataccagcagaaggctgaaactttcatgtgttcatgccttgggaagagtagtcgcaatgttcagaagactcctggtggcctcatcttccgccagagatggaacaacatgcagtttgtcacaagtgcctcatttttagccactgtctactctgactaccttgcttcatctggtagaaacctgagatgcagttcagggaatgtcccccctgctgagcttctctcccttgcaaagtctcaggtggactaccttcttggggacaacccaagagctactagttacatggtgggctatggaagcaacttcccacaaagggttcatcacagaggttcatccattgtttccatcaaggttaacccttcatttgtcagctgccgtggaggttatgctacatggtttagcagcaaaaggagcgaccccaacctgctcactggtgctcttgttggtggacctgatgcatatgatgactttgctgatgaaagagataactatgagcagacagagccagcaacatataacaatgctcctcttattggtattctggcaagactaggtggaggtcatggtggctataaccagcttcttccagttgttgttccagctcctaagcctgctgttaccaagcctcaaccaacccccagtcccaagacaactccttctccagcttcatggtcaggcccaatttccattgaacagaaaaggaccacctcatgggttgccaatggaaaaacttattacagatactcaacagtcgtgactaacaaatctaacaagagtctcaattctctcaatctttcaatatccaagctttatggtccaatctggggtgtcacaaagtcaggtgattcatacacattcccatcatggctcagctcattatcagctggcaaaagccttgaatttgtctacatccattctgcttctccagcagatgtctccgtggcgaactacgtgttggcctgaaagtggcatgggaatggtttactgctttcttgtgtaagactgtgtagccatacaaatgtgcagcgaggggagtgtctttacgtttttccttctataatttggtgtcaaatcttcttcttcttcttcccttgtgtattttgcatttcagtaggttagatcaaaataggtagattatataagatggaaggaccggagcagaaaggagtgaagagacaaaaggcagagctcatcctctttcttctccgctttacaacttatatacagtgagtgatacaagacaggtagtgaaacagtgttgttgagaagttaaaaaaaaaaaggtgaacttctcaatatttcagagaagagtcatcacttgtatttttcaacagctttggatgtcttttctgtgtttgatgttgtaagctttgcagcattttgtaatctctacagagaaacagtttgtgctatatagtattatgtttttgtgctgtgcaaccctcatttggttatttcnnctnntnncnnnnnngnnnnggnttcctgncncggggacnttattttaaaggccccncgggggggcnc

SEQ ID NO: 7805 - DNA, 1248 bp, Glycine max
caagcctccagatgcttttgtaactcgtgtcctttccgcgcagtgcgccgcgggcgaagactatgctgagggaagtgagacagggttttctgagtcacctgcaaatcctgctaatggtcctgcatccccacctactgccaggcaatcagcacctacatctgcaataggtgcaccagccacacctccacctgttgcacctgtgccagatttacttggagatttgatgggcatggataattctattgttcctattgatcagccagctactcctactgggcctccattacctattttactacctgcttcaactggtctgggtttacaaattagtgcacaactgactagacaagatggtcaaatattttatagtttgttgtttgagaacaactctcaggttccacttgatggcttcatgattcaatttaacaagaacacatttggtcttgcagctgctggaccccttcaggtttcacagttgcaacccagaatgtcagctaggacactcctccctatggttatgttccagaatatgtcgcaaggtcctcctagctcagctttacaggtcgctgtgaaaaacaatcaacaacctgtgtggtatttcagtgataaaatctcattacttgtattcttcaccgaggatggtagaatggaacgttccagttttctagagacatggaggtcccttccagattcaaacgaggtttccaaggacttcccagccattgtgattggcaatgcggacgcaacactggaacgactggctgcgtcaaacatgttctttattgcaaagcgcaagaatgcaaaccaggacgtgttttacttctcagctaaactccctagagggataccattcttaattgaacttaccacgttgactggaaaccctggcgtcaaatgtgcaatcaagactccaagccctgaaatgtctgcacttttcttcgaagccattgagactcttctcatgggttaatgtgttttaaattttgttttttcttttagtttttgtttatatattgtttttgttagaatatttgataaatatcctggacaggtgtgttatatcttatttggaaaaaaaaaatccattgacttttgttgtccctggctgtatttcactactgccatttttgccgttattggcaccatggatgcagttgtgctcttgtagacagattttgttgaggttcgactgcttgtagtattacgttctttgtaaagtgattaaattgtgatgcttttagttaaaaa

SEQ ID NO: 7806 - DNA, 1470 bp, Glycine max
tcagctacgtaggcccccccccccattggttaatttcgtcggtcaactgcatgggtctccgcttctcctctggctcggcacctcactcctcttccctcaacggctctcactgttcaggttcagcaagaactggctgcaagaacgtggggttctccgcaaccgggaagagtcagttttcggagattgcgagtggaagcgacgatcgcgaagagtctcttggtcggattctgaaatggccaaacttgaaggtgtttagttttgaggagctgatttctgcctcaaggcgtttcaggtatgacatacaggggttagtgatcggtaaaggttgttttggcccagtttacaagggatgtttggatgagaatacccttacccctgccaaagtaggctatggaatggccgttgcgatcaaaatgtttaaccaagattacttccgagggtttgaagagtggcagtcagaagtaaactttttaggaaggctttctcaccccaacctggttaatctattgggatactgttgggacgaggataagcttcttctagtgtatgagttcatgccaaagggaagcttagactatcatctattcagaggaaacataacaccactttcttggaacacacggcttaaaatagctattggtgcagcttggggattagctttcttgcacgcctctgaaaataatgtcatattcagtgatttcaaggcctcaaatatacttcttgacgggaattacaatgcaaagatctcagattttggctttgctagatgggggccttttgaaggagaatcacatgtatctaccagggtcattggcacatatgattatgctcctccagaatacatagcaacaggccacttgtatgtgaagagtgatatctatggatttggtgtagtgctgcttgaaatacttacaggcatgcgggcacttgacacaaatcgacctcaaaccatgcagaacctagttgaatggactaagccttgtctttcttccaaaaaaaagttgaaagccataatggatgctaagatagagggtcaatattcacttgaggcagcatggcaagcagcaaaacttactctaaaatgcctaaaatctgtccctgaagaacgtccttctatgaaagatgtagttgaggcattggaagccattgaagctatccaaaacccacaattcgcagcgtacatctcatccaccccctcggcagggtcgtaagagtataaacaaatttataagaaaaaaaaaactagaaattgagattgattatatatagcaatatggtccattgaatgggttgtatcagtcatttaataaatgtgattttctttttcttttgctggttggaggggggaatttcacaagcatgttaacatatatgatttccttttgaattattcacattctttagtgggaaaacattttgtactagaacagaattttgatgctaacatgtcacttttttcaaggctttttt

SEQ ID NO: 7807 - DNA, 1364 bp, Glycine max
aattactaactttatgtttatcttttaattaatttctcgctctccaaagtccatacagaacatagcgtcagatcagaatcagacaagagaagttgataagaacaaacaaaacaacaaccaaaccgtttattttttcttttttcttctctcaacactctcacttcctatctaatttttttcgttccgtcgtttcatcctcgcgagcgtgcatttgcattgcattgctctctctctctcacaaaacgacgacgacgtcgccaccgcgcaccgttttggttttcctttctcttccgtcgtttgcttccgcaaatagcctttcgcatgggaaacgctaacggcagagaagacggatccattccccccgccgccgccgatccctccgccgccgcacgtggaactcacgcgccgccggtctctctccctccggttcgcgccttctcctccgattcaatggccaatagcccgccgcacagccctcgccgctccagatcgccgatcctcttcggtcctcaggttcctctagctccattacaacgaggtaatggccctccttttctcaatcaaatgtggcagaatgagtctcatggtattgttaatcaccctcctgagcaagggatccctgtcatgattacatggaactatggtggtaacaatgtggctgtggagggatcttgggataactggacatctaggaaggcattacagcgagctggcaaggatcactcattccttatagtccttccaccaggtatatatcattacaggttcattgctgatggtgaagagagatttatcccagagctacctaatgtagctgatgagatggggcatgtctgcaatcttcttgatgttaatgattatgtgccagaaaaccccgatggtgtgtctgagtttgaagcaccaccctcccccgaatccagttatggccaagcatttccagctgaagaagactttgcaaaagagccaatggctgttccttcgcaactgcatcttactgtcctaggtatggaaaactctgacataggttcctcttcaaagccccaacatgttgtgctaaatcatgtcttcatagagaaaaatttggcctcaaagtctgttgttgccctgggactcactcacaggttccagtccaaatatgtgacagttgtcctttacaaaccgctcaagaggtgaaatatataacgcttgtcaattatataaacctttttttcttttttttggtagcctcagtctgtaaagatgaaaatttaaataatactcctcaacgggtggtatatgaaggtcttgtgtctatatatgcttgaggcttctgttcgaattggtaaattaaactttttgtttttcaattaaaaaaaaaaaaaaaa

SEQ ID NO: 7808 - DNA, 2063 bp, Glycine max
cacattttcactcctcacgcacaactcaccacgcacaatactccattccttatggtctctattgcgccattctgattttttgtttgttggcactcaaagggccacaccctcatcttgtggttctccttcctccactcccttcagtctctatcactgtgatacatatatgattcaccttcactcactataattcttcgttcctgttccccctttgtctttcttccacaaaattgagatattgcaagtgaaatgaaggccaggcacatctcattcttctcttgatatttctgatggcactcgctgcaaacaaagtttctagcagtcctattgtgactaaaagaacagctctttgcagatcacatgaaaaacactatttttcctcgtcaacaaggatcaatagaatacagttgtcaagacatagactggaacatggacatctgaactatagatgtctccacacacagagatcaaccttattcaatgactggttttggttctttaacggaaaacctgttggtttgatctccaagaaatcttctatctcatgtaaatcaacaggagcaaataatactgaagagaaagaaagtattacaacttatgatgatagggcacataccaaagatgagaaaaatgatcacactcttgttgttcatggcttggctgatgcttgtagattcgtttgtaatgatgcaaagtttctctcacgtggcataatgaggttggatgctcgtgcacgtcaagatgttgcttttcttgggactgaatttctcaaacttgatgctcgggcaagagaggatactgagaaaattgaccgtgatgtcaaggaaaaagctagccgacttagtcatattgctactatattgaaggataaagctcagtccagattaaaaaatgctgctgatgagcattggagtgatggggccttagaggctgatttacgtcttgctgacttacgtgctaagcaacgtgcgatggaagatccccttatggccttggagcttatcaaaaacatccacaacaggatggtgagcaagatgtataactttccacttcgcagagataaaggatccctttcagaaaataatgtaagaggtcgaataatgcttgaaaagaatggaaaaaccacaaattcctttcctggggatgtgaccacagaaaggattgctgctcttcaggaagcatactggagtatggcatcagcactttctgaggcagatggaatcgattacactgatcctgaagagcttgagttgttggtcagaactcttatagatctggatgcaatggatggtaaacaaagtgtttctttgttggcagagtgttctagttcccctgatgtcagcactagacgggctttagcgaatgcattggcagcagcaccatccatgtggactcttggaaatgcagggatgggggcattacagagactggcagaagatagcaacccagccattgctgccgcagcatccaaagctatttatgaactgaaaaaacaatgggaaatagaggaaggcgatagctggaggttcatgatggatgaaaacaccatggaagaaaaaggaagcatagaatctgataatgaagataccaaatgagaaatattttaaacattgcactgtacagcatagttgcctcccaagtatactaactagtataggattaacccacgcaatccctagaaagaaactactgctagtgtaagatgccaatatgctgtttatgtgcatcataaaatgcagttctttgctcatattcatagatcttagatgcacatttgtgattatactcgtttgtacgaaagaactcatattgcttctgctacagcactttgggccgtttattgtcctaatatatatgttggtggcaccgaggcacctaaaatgctgcatagtttggcttgttggtagtactatagtaccaaggttgtttgagcattgcatacgtgcaagcaatagagcaatttcatcccttgatgttagattatttgaatattattagacaaaaggatttcattgttgaaataaacgtctactacaaagaaatgggattatttttttcctttt

SEQ ID NO: 7809 - DNA, 2624 bp, Glycine max
ccttttattttatttaaggtgcaacttctagaagccgaaacaggagaaaaggatcataaatatatgtagaagataatgtcacgaccactttgggttaaaatttataaagctaaataatactaacaaaggaaaaaataaaataaaaaccccctacgagaggaagaggatgataatataaactgagcatgctgattttttttttttttatcagcaaactgagcatgctgatgattatcatttatctccatttagctgtagagatcattctagatattgtgatgaacttgattagagacctcaggttgattatccaaaggcatgtactgagccataattgcacgtatctccgaatccatatatctctgcacataatttatttttatttttttataaaaacagagaattttatgatgagaatgtataaaaatgttggcaacaaatcaagacaaaaaaaaagccagagtcactttattgtgaactttatatcaacaaaacatcaaacttgcaataatcatacctggattctgtactttgtaaaatgcatatcctcccgcaacagcaacaaccaatacgaggataatcacccagatattcagcactgaagcagaatattcaccaaaacacgtgtcattttctcgcgagtagaacaaaccacttttgcatttgcactcgtaacttccccaggtgtttttgcatttgcaacctgggcattgacaggctgttttctctttgcactcatcaatatcttcacatgactgaactccatctcctctgaacccaggtggacatgtacaaccttttctatagtcatcaagacaagccgagtaagccctgccaccttgtactcccttccaacaaccaccattgttgaattgacaactcaaggatcctgaagcttcacagtgggtatatccatctccaacaaatttcacattttgaacaattgggcattcacatactcttcctcggaaagtgtccctgcatgcagtaatgttagaagatttgtcctgccaacaaccaccattgttttccaaacactcatttgtttcgaggtctgaagttaagcaaattgatggttcagtggtctctaggaagcctgaacagattgccttgagaacagcaggtcttgacaacttacctctatactgtctgttgtttataacaagagtaggcagtatagtaacatcaccacgagagcctttaccaatctgtgcatcctgttcagcctttaggacaggattttctatatctgcgtggggatctccaacgcagtctttaatcttcttcaggtcaacaccaagagatttaataacttgctctgaacattcttctgtgtacttattctctttcatggggcaacggattgaaaagtcggtaacatagtcccaccattgccaaggctttccactttcatttgccactttatagaagcaagcttggcgtaagttttgaacaacaacatctttaccatcataccctctactgaaatcttgctcaggatcaggagcacagtaccttccattgtttatgcactgagatttgcactgtctgctcaagagaaatgcttcaggacaaaaccaagttatatagcgaggggtaaattgagtgaaccctctcttctccagctgctgagctacccctttaaagtccttcagaaaattaattagactgtcacactttggcccacactcatcgttgctattggtccatagctcgtactcaactctatcatcaggatgcggaagagactccctccaatccagatttatgttaaccatctccccgtcagagagagcctgcttgatgctatcccccagggatttgctgataagagcagaaggaatactaatcttgtccacataatcatcatttgctttcccttcttcaggagtgtccatagtgatcaacgtttctgccttgtcatcagctacaagaatagctgctgctccaccattctgtgcattccacgccttcaaagtgaagtagcaatctccacgatcaacaagaagaaaagtgggaagccctcctggcttggactgaaaattgacatcactgaagttcgtgcaccctttctgattcaccttcgggtacaaaacggaaccaaccaatgttcctccatacttgggaaccccaaaattcccaattgcacattcatatgtacccttcaacgacttgggcgaagtcaccttcaaactgttcttctccaccacaaatctaccgacacaacaccccaacagcaaaacacaaacacacaacaaaagacccagctttgcacccatcatcttcttcttcttcttcttcttcttcttcctcccaacgcttaatgagaaaaactgaaagggaagaagatcaaaattaacgggaaaaactgaaattcaaagtacaattaatgcaaagtgtgaatgatcgaaaaggttgaagacccagatgaggaaaatgagaagtgaggctaaaaaaagaggctttctgagtttgaagaaggtttatggcgatcagagtgatgggtaaggaaaaaaagcatcgaaatcttaattaaaggtgtcgaaatgaatgagggagacgtgtcagttaagttcaactgtaaattagaatcgtcgccgtcggagatcaaaacggacgcgtgg

SEQ ID NO: 7810 - DNA, 825 bp, Glycine max
ctcaaaaccctaaatctgggttttccttacgaccttcctcttgctaatcaccagcgccaaatcagacttattttcctttaacataccacgttttgagccaggtgctttaaacatactactcgatggtagtgccaagacaacaggtggagtgctacaactcaccaaaaaggacaaaagcggcaacccaacccaacacagcgttggcctctctgcattctatgcagcacttcatctctccgacgcaaaaactgggagagtcgcaaacttcgccaccgagttctccttcgtcgtgaacacaaagggtgcaccactccacggcgacggcttcaccttctaccttgcatcactcgactttgatttcccagacaactcaagtggtggcttcctcggactcttcaacaaaaaaacagcctttaacacttccctaaaccaagttgttgctgttgagtttgacagctttgcaaatgaatgggaccctaatttcccagagtctgattctcctcacattggaattgacatcaattccattaggtctgtggcaactgcgccatggccacttgatattcaaccacaagggtcaataggaaaggcacggataagctaccaatcttcctccaaaatattgagtgtctcagtggcttatccaaatagtcctgtgaaactgaatgccactgttttatcgtatcccgttaacttaggggctgttctgcccgaacgggtcctattcggtttcagtgctgccaccggtgacttggttgaaacacatgatattctttcatgtctttcaattccttcttgtagataaacacaacaggggtatcctct

SEQ ID NO: 7811 - DNA, 956 bp, Glycine max
gagggagcgaaggtatgaagccttcaacaggctgagaatattccaagttgtaagtgtcgcttttcttggtggactattgtggtggcatactccagagtcacacattgatgatcgggttgccttgctctttttcttttctgttttctggggattctaccctctctacaatgcagttttcacattccctcaagagaggagaatgctgatcaaggaacggtcgtcgggaatgtaccgcctttcttcctactttctagctagaacaataggagacttgcctctggagcttgcactaccaactgcatttgtcttcataatctattggatgggagggcttaaacctgatcctatgacttttatcctttcacttcttgtggtgctttacagtgttgttgtctctcaaagccttggtttagcttttggtgctattttgatggaggttaaacaggcaactactctagcttctgtgacaacccttgtgtttctcattgctggagggtactatatacaacagattcctccattcatagtgtggctcaagtacttgagctacagctactactgttacaagctgcttttaggtgtccagtacaatgaaaatgactattatcaatgctcaacgggggagctgtgcaaagttgcagactttcctcctatcaaatcaatgggcttgaatcatttgtgggttgatgtgtgcattatggccatgatgttggtgggttatcgactagttgcttatttagcactgcatagagttaggtagattaaagttatggcggagctcccatacacagcacgagaacttgaagagtttttgcacatgtcaactgaggaataatgctagaatagtagacttttgatggaactcatgtaatgaatctttatcaactctccctgactgagttggatgtacaagacttctttttaatagatttagagaatactaactctaagtttct

SEQ ID NO: 7812 - DNA, 1170 bp, Glycine max
aagataattcatttataaatccactcaactcgtctctacttgtactatcatcgagtccctccactctagcgttgttgcattgcagaagcgtctccattttctttcgcgatggccgcgcgagccctgttgaccagaaaaaccctagccaccgttctccgcaacgacgcgaagcccataatcggagctggcatagctgcagctactcattctcgtgggttgcacgtgtacacgctccccgatctggattacgactatggcgctctggagccagccatcagcggcgaaatcatgcagctgcaccaccagaagcaccaccagacttacatcaccaacttcaacaaggccctcgagcagctccaagacgccgtcgccaagaaagattcctccgccgtcgttaagctccagggcgccatcaagttcaacggcggaggtcacgtcaaccattctattttctggaaaaatctagctcctgttcgtgaaggaggtggtgaaccacccaagggttcactgggatgggccattgacacacattttggctcttttgaagcattagtacaaaaagttaatgcagaaggtgctgcactacaggggtctggatgggtgtggcttggtctggacaaagagttgaagaggcttgtagttgaaaccactgccaaccaggacccactggttactaagggaccaaatttggttccattgcttggtattgatgtttgggagcatgcgtactacttacagtacaagaatgttagaccagactatctgaagaacatttggaaagttattaattggaaatatgccagtgaagtgtatgagaaagagagctcttagtctgaaagtgctacttgatatagctcttgagatgacagatttgcagcacggtaagagatgtggaataaaatgatgtgatgtgatgtaataaataacactaactattttatgtagttgtactgaagaacctcgagcattgtatggctgcatttcttgtactaagttcctcttgtcttatggattttctgatgctctgttaagatactattcgtttccagtgatgtatatcttttgcctccagggtttgatccttttactcgaattagtagaattctgaaattcaagcccaatatactttccttttttgggggaaaaaaacaaaaaaaaaaaaaaaaaaaa

SEQ ID NO: 7813 - DNA, 1151 bp, Glycine max
tcgagcagtacgtaggcccccccccccagtaaaatatttcacttataaatccactcagctccagtcttctatcatcatcgaatccactccagcgttgttgcattgtagaaggcgatggccgcgcgagctctgttgaccagaaaaaccctagccaccgtgctccgcaacgacgcgaagcccataatcggagttggcataacagcagcggctactcattcacgcgggttgcacgtgtacacgctacccgatctggattacgactatggcgcactggagccagccatcagcggcgacatcatgcagctgcaccaccagaagcaccaccagacttacatcaccaactacaacaaggccctcgagcagctccaagacgccatcgccaagaaagattcctccgccgtcgttaagctccagggcgccatcaagttcaacggcggaggtcatgtcaaccattctattttctggaaaaatctagctcctgttcgtgaaggaggtggtgaaccacccaagggttcactgggatgggctattgacacacattttggttcttttgaagcattaatacaaaaagttaacgcagaaggtgctgcactacaggggtctggatgggtgtggcttggtctggacaaagagttgaagaggcttgtagttgaaaccactgccaaccaggacccactggttactaagggaccaaatttggttccattgattggtattgatgtttgggagcatgcgtactacttacagtacaagaatgttagaccagactatcttaagaacatttggaaagttattaattggaaatatgccagtgaagtgtatgagaaagagagctcttagtctgaaggagctacttgatatagcaattgagatgacagatttgcagcacggtaagagatgtggaataaaatgatatgatgtaatagatagcactattttatgtagttgtactgaagaacctcgagcatattatatggctgcatttcttgtaccaagttggtcatgtcttatggattttttgatgccctgttaagatactatacctttccagtgatgtatatcttttgcttctagagtgtgatccttttactcgaataagttgtagaattctgaagttcaagccccaatatagcatcattttggatgaaaaa

SEQ ID NO: 7814 - DNA, 1522 bp, Glycine max
cacgcgtccgccctcctcttctttctctctctttttctgtttttttttttgttcctctctctagattttatttgttgttcttcttctttatgagccctaacttggggacccatcgtcgtcgtcgtctttagccatgtcgctgaggaaggtcttccgctcccgcaagttctccagatcgttcaaggaggtgctgccggcggagggcgccgcaattgtcggcggcgaggacggggtcgccggcgccggtgaggagtcgtcgaatgggaataatggttggtccaacatgcttccagagatcctcggcgagatcgtgcggcgcgtggatgccgccgaggaacagtggccgaaccgccagaacgtcgtcgcatgcgcgtgcgtctgcaagcgttggcgtgacatcacgcgcgaggtcgtgcgcgtgccctcccacaccgggaaaataaccttccctgcgtgccttaagcagccaggaccacgtgacgttccccaccaatgtcttataaagcggaacaagaaaacttcaactttttatttatatcttgcccttacaccatcattcacagataaagggaagtttctgctagcagctaggagatataggtgtggtactcataccgagtatataatttcacttgatgctgatgatttatcccaaggaagcaatgcttatgttggaaagctaagctcggattttcttggcaccaacttcacaatttatgacagccagccaccccatagtggtgcaaaaccatcaagtggcagggccagccgtcggtttgccagcaagcagataagcccacaagttcctgcaggtaactttgaggtggggcaggtctcctacaagttcaaccttttgaaatcaagagggccaaggagaatggtttgctcattgaagtgtcccgtgactcctgtcgtctcaccatcggttgaaagttcagatagcacgccggtcaatggccataagattcccgataaagaacaagttgcatctggctacacaatcttgaagaataaagctccaaggtggcatgagcatttgcaatgttggtgcttgaatttccatggccgtgtgacagtggcctcggtgaagaactttcagctggttgcaacagtggaccaaagccaaccaggagggaaaggagatgaggaaacagttctcctccagtttggtaaagtaggggatgatacttttaccatggattatagacagcccttgtctgctttccaggcttttgccatttgcttaactagctttggcactaaacttgcttgtgagtaatataattttggtgtcactgcttatttattccgtggatgaatgtttaagtgaatagttattttattttttttactcggctttgagtcaacaatttgattgcaggaagcttcttgttgtaaatgtgttatatcatcaaataggacatgacatcttccataaatcaaatatattgccctattcaagcggttaaaaaaaaaactcgaaaaaaaaaaaaaaaaaaaaaaaaaaaaaaaaaaaaaaaaa

SEQ ID NO: 7815 - DNA, 821 bp, Glycine max
cagattggttgttgggctcctcacgacagaggtccacgtgggggtgttctcgctccgtaattctcgttcttgcgctgcttgggcggtacccgtgaatttgccgtctattccaaccaaacccttcagaggaccttgtatgcctgcaaagaggtgtgctgtcacacccccaatgacccagaattgctcatttctccaccattcctcaatgctcactccactccatttcaactcaagaagaccagttgcaatgattgaagagaatagagcaacgaagtacaaaccagcaaaagtgcttatcggcggcatgatgaatttatcagtgagtaaacagacagctggaagaacacagtaggcgactagaggtatggaggtgaaggggtagacagttgtgtttgcgtaggcaaatcgctcaagccacttcagcttcccttccttatagccataccataaagggcaatgacgactgaagaagatctctatggagcctagtgcccaacgaagcacctggttaagcctatctgacaagttgatgggagcagtacccttgaatgctgctctctttggcatgcaataaatggacctccaaccacggcaatgcatcttaaaacctgttagaatatcctctgtaatagacccgtaaatccaacctagctctattccccattcagttttatcttcatatccacagctgattacatgaatggcttctttaagttggcttgctggacttgcggaaggaggcacaccaccctcttccatcaaggttgaagtcacaaaaatagatgactgtccaaatttcttttcaactcgagcggctcgag

SEQ ID NO: 7816 - DNA, 1638 bp, Glycine max
  misc_feature (9)..(9): n is a, c, g, or t
  misc_feature (11)..(11): n is a, c, g, or t
  misc_feature (19)..(19): n is a, c, g, or t
  misc_feature (32)..(32): n is a, c, g, or t
  misc_feature (38)..(39): n is a, c, g, or t
  misc_feature (41)..(41): n is a, c, g, or t
  misc_feature (56)..(56): n is a, c, g, or t
  misc_feature (58)..(58): n is a, c, g, or t
  misc_feature (61)..(61): n is a, c, g, or t
  misc_feature (66)..(66): n is a, c, g, or t
  misc_feature (74)..(74): n is a, c, g, or t
  misc_feature (84)..(84): n is a, c, g, or t
  misc_feature (86)..(86): n is a, c, g, or t
  misc_feature (89)..(89): n is a, c, g, or t
  misc_feature (93)..(93): n is a, c, g, or t
  misc_feature (104)..(104): n is a, c, g, or t
  misc_feature (111)..(111): n is a, c, g, or t
  misc_feature (119)..(119): n is a, c, g, or t
  misc_feature (134)..(134): n is a, c, g, or t
  misc_feature (139)..(139): n is a, c, g, or t
aggggtttngnccccaacntaagaggaaaggntccccnnantaaaaggttcaacangnccnagatntatccatnttaggctttnantcnggcnacccccacatntatgtcnaaaaaggntggagatcaaagagnagccnttaaggaaccaactccaaactcttcatcatctgttgccttggatgtaacagtaaagttaggtcaattccagccagacctttagcagacttgatcacagcaaagaggtgagctgatcaccaccaatgacccaaaactgctcatttctccaccattcctcaatgctcactccactccatttcaactcaagaataccagttgcaatgattgaggagaagagagcaacaaagtacaaaccagcaaaggtgctaatcggtggcatgatgaatttgtcagtaagcaagcaaactgctggaagaatacaataggcaactagaggaatggaggtgaatggataaacagtcgtgtttgcataggcaaatctctcaagccactttagcttcttttccttgaagccataccacagagggcaatggtgactgaagaaaatctcaatggaaccaagtgcccaacgaagaacctggttgagacgatctgacaagttgataggagcagtacccttgaatgcagctctctttggcatacaataaatggacctccacccgcggcaatgcatcttaaaacctgttagaatgtcttctgtgatagatccatagatccaaccaagctcaagtccccattcagttttatcttcatatccacagctaatcacatgaatggcttctttaagcagggcagctggacttgaagaaggaggcacaccaccctcttccatcaaggtagaagtcacaaaaatagaggattgtccaaatttcttctcaaaattcatttgggacatcaacacctctttgtcatcatccatcccttttaggcttgcagcctctccatttgcatcattcttctccttatacttcttgcggcttccaaaacacgggcaacaatcacagcttaccatttttggacgctttggacccttgggaggattatagccatacaaagcttgcctcctgaaaacacatccagtccccacatatacaggaccttgaataccatctagacccttcatgttaatatcaaagaaaactgtgttcctgttggcataacgatcatgtgtatcaataccatcaaatctttgaggaaactggacatagcagaccttcttcccagtttgtgggtccatcaagaagcacatggcctctcgggcagccttgctgttattgacatagtgatcacaatccaagttcaacatgaaaggagcatttgtgagaacggcagatacccgaaccagagcattcatggcaccagctttcttgtggtgttgaaagccaggccttttctctctggaaacataaacaaggcgaggaagttggtttccttcagtatcaagacctccactgctaccaagaaacacttgaatcataccaggatgatccttagtgttattccctggccatggtgtcccatcctgcatgatccatcctccctgaggaactttctgggcctttgcaacaagcgcgtgccgccttaccttaaactcttcgtattccctctgtcatgcacc

SEQ ID NO: 7817 - DNA, 3611 bp, Glycine max
ccggtccggaattcccgggtacgacccacgcgtccgattctaccctagcaagaattcagatctgttttctctcctattcctctaatgcccatttaaaacgaacacttctattaatatttttaacccattatttgttgtacccaaaaactatttccatttttccataattataataatgcattaatggcccctatcccttgacttacaattcaaaaaaacacaaaccagaaaagaaaaaaccccatccatcattttcatttcaaaacttgtcttccaccctttttctttttccatcactactactcacagatccaccattcctttccacctccttcactccccttcaaatcagttcacattttcctttcacagattacttttactccttccacctttctctctccgatttcattcaacaaaaccatttttttttctctcactcacttcacacaatgaagcacccaaaaccccaaacccaatcaaccccaacaccatcaccttcttcaagatcttcttctctctcgtcccacctcgctatggtggagctgaagcagaagatcttaacctctctttcgaagctctccgaccgcgacacgcaccagatcgcggtggaggacttggagaagactatctcggggctctcgccggacgccattccgatgattcttaactgtctttacgacgccgccaccgaccccaagcccgccgtcaagcgggacgcgctccgcctcctcgccgccgtctgcgccgcgcactccgacgccgcggcggcccacctcacaaagatcatcgcccacgtcgtccgccgcctcaaggacgccgactccgccgtccgcgacgcctgccgtgacaccgtgggcgccctcgccgcgcagtatttgaagggagacggcggagggggtggcgggggaggtgtagggacggtggtggggctgttcgtgaagccgctgttcgaggcaatgggggagcagaacaagggggtgcaggcgggggcggcggtgtgcatggccaagatggtggagtgtggcggtggcggcggaggaggggaggcggtgccggtggcggcgtttcagaagctgtgtccgaggatctgcaaactgctcaacagtcccaatttcatggccaaggcggcgattttgccggtggttgccagcttgtcacaggttggagcggttgcaccacaaagcttggaacatttgctgcctagcattcatgaatgcctttctagtactgattgggcaacacgtaaagcagcagctgacgcattaagttctctggcattgcattcaagcaattgggttaccaatagagcggaacccacactggcagttcttgaggcttgccgatttgacaagataaagcctgtaagagatagcatcaatgaagcattgcaattgtggaaaaagattgcagggaaaggagatgggtctcctaatgattcaaagccctcatctgatccggggaatgaatcagctatttcgtcagaagcaagtgacccgaaaaaagtaaatcttgatgagaggaagactgattcaccagtaaagggttcatcaactagttcttcaaatatggattcaaccaaggccaaagcagctggcatctcagagaaggcagttgtgatactgaaaaagaaaccacctgtgttatctgataaagaactaaatccagaatttttccaaaaacttgaaagaaggggttcagatgatttaccagtggaagtagttgttcctcgtagaggcctcaattcttttaactccaacaatgaggaagaatcagaggcaaatgctaaagattcaaaagaaagaataaattctgttggaaacatccctaatgatgatcatggatcctccagtaataaatatcgtatctttgagagaggcaatgatggaaattccaaacaaaggaattatgatgattttggccatgacagattctctgaaaggagagtgaacacaaaagaactgaggacaaaagcttatgatactgatggcaggactgaaaatgatcagagggacggttctgccaatgctgcaggtttttctaaaactgatggtcaatcagaagtacccttctccaataacagaggaaactggttggccatccagaggcagttgctgcaactggaaaggcaacaagttcatctgatgaatatgctgcaggatttcatgggcggatctcatgatagcatggtgactctagagaacagagtgcgaggtcttgagagaattgttgaagacatgtcacgagatttatccatatcatcaggtcgtagaaactttgcagggtttgaaggatcatctaataggccttctagcaagtataatggttttaacgactactccagttccaagtatggtagaggcggtgatggacgcatcccatttggcgaaagatttgcccaatctgatggaaatgctttgggaatgaggggaagagggccatcttggagatctgacatgtctgagggctgggatcatcctgggtatggtgcttctagaaatggtcagatgtcctcaaggagggcttttgggggtagttctgctgatggaagatcgccaaaatctgtgcatgagagtgatcaagcaggcaacagaagagcttgggataaagcagcaatgcccattcggcttggtgaggggccttctgctagaagtgtctggcaagcttctaaggatgaagctaccttggaagcaattcgggttgctggtgaggacaatggaacatctcgagcaacaagggtagcaatccctgaaatgactgctgaagctatggctgatgacaatgttgggcaagagaaggatgccatctggacttcttggaccaatgcaatggatgcccttcaagtaggtgacatagattcagcctttgcagaagtattgtccactggtgatgatattttgcttgtaaagataatggatagaacgggccctgtaattgaccaactttcaagtgaagttgcatgtgaaattgtgaatgccattggacaattcttacttgaccagaacatgtatgacatctgtttgtcttggattcaacagttgctggagatagtattggaaaatggccctgacacctttggtattcccatggaagtgaagaaagagctcttgctgaatttacacgaagcttctacagatccagctgaggcctgggaaggggtacagccggatcagcttttattgcagttggcatcagcctgggaaattgatctacaacagcatgacaaatagcttgtagagaacaaattatgctgctattgaatcttgaattggatggtattgagtgcaatttgaaatataatgctgttcatgtttttggcctccacacaacaactacattgccacaaatttatgctcctttttctcctgtatcttggtgaacttaggctaatcctataccggtcagagcaatgttcgaccgttgatatcattgtttttttttaccaaatgtctacagatattgtcattactaagaggtagtgtctggttgtcactaagtgcctgcttaaagacaatgtgtaaattgagacgaatgaacaaatcttccatgtaattattaatgtatttgttcttgatatgttacttccgtttcatcaaaaaaaaaaaaaaaaa

SEQ ID NO: 7818 - DNA, 2111 bp, Glycine max
ggctcgagccttcactcacttttttccactatgaaactctgaaatgagatcaaaataacataacacaaaacgcaaaaccctaatctctgcaattcctgtgcgtggaaaggttcgagaatggtttcgctggaggaatctcgctcgaattcgagccgtttccccttggcgaggagttaccagtaccactcctcggtttcgtccaaaacgcagcgtcaaattggaaggtccatgcgcactatacgctccaatttcttccaagacgacaacagcagcagctgctccttcaccgagaaatccacgtgtctctcggaaaacctcaccgactccgtcgtcgacctccgtctcggcgagctggcgctgcggaacagcaaatcggtgaaatactcgccgacggaggaggagctcctcgatttgtcgcaggccttcagcgacttctccgcctgcagcagcgacatctccggcgagctgcagcgtctggccacgctgccgtcgccgaagaagagcgacttctccggcgagaacgaggcgccggagccggagattgagccctgcatggggttcctgcagagggagaatttctctacggagatcatcgagagcatttcgccggaggatctccagccgacggtgaagatgtgcatcgacggcctccagtcgcagtcggtggcggtgaagcgctccgccgcggcgaaactccgcctactcgccaaaaaccgcgccgacaaccgcgttctgatcgcggagtccggcgccgtccccgtcctcgctccgcttctccggtgcagcgatccgtggacgcaggaacacgctgtcaccgcgctgttaaacctctctctccacgaggacaacaaatcgctgataaccaatgccggagcagttaagtctctgatttatgttctaaaaaccggaactgaaacttcgaagcagaacgcggcctgtgcgctcttaagccttgcattggtggaagagaacaagggctcgatcggggcttccggtgcgataccgccgctggtttctttgcttctgaacggttcgagcagagggaagaaggacgcgctgacgacgctttataagctgtgttctgttaggcagaacaaggagagagcggtgagtgccggcgcagtgaagccgctggtggagctcgtggcggaacaggggaacggcatggcggagaaggccatggtggtgctgaacagcctggcggggattcaggaagggaaggacgcgattgtggaagaaggcggaattgctgctcttgtggaagctattgaggatgggtctgtgaaagggaaggaattcgcggttttgacccttcttcagctctgtgttgatagtgtcagaaacagagggtttcttgttagggagggtgggattcctcctctcgttgctctttctcaaactgggagtgttcgagctaagcacaaggctgaaacacttcttcgatatttgagggaatcaagacaagaggcagcatctacttcaagttcttagacaagtgattacattgctacttgggaagttggtaattatacaatgtaattggttgttgtatatatagtgtttttgatggtttgtacagtgtggttaagatagttggaattggaaccgtgtttattgaagttagaagaagctagcgatctatagactgaccctttagatgtatgaatatagctaggtttgggagtttgctttcccttgtttcgatttgctggtgtttcctggagttacatggttgtctttttcgggttgattaggttcccttttgtttagatgaccctagttttgtgaaaagggtttctgattgtattattgtatggtaattaatttgcgctcgtaatgaaagtacggagcttgtactgcaaatccaggaatgtttgtggccataatttctcgagtcagcacagcttgagttatcgtttgtttgattagatactgtgtataggacagtctagatcaactggagtgtgggtggttacggctgatgccgatgattaagtaccgcacgcgacgccaagctctaagaaggatgtaaaatttactcggagcgcacgagattattacctatagcgagggtaggttaggcgtggcgcgggcctctgtataccatcgtt

SEQ ID NO: 7819 - DNA, 1481 bp, Glycine max
atagcaatgctttcgttcgagtcagctacgaggccccccccccctctttgcagtttgcacacatggctctgtcgtcgccacttcagaacctctctgcactgatctctgccagcggcaatgccacaacagctacagcacggcctccgagagggcggccctgggcggttcacgcggcgtcgtcggacactaccaccgccgcgcaagcgcagttgggtaggtacgaagaagggaagctggagcgacccaagtgggttggggagacccctctttcacgtctcgttcaagctctcatctccttcaagcccttgttctctgtcctcaagcttggtgctagaagggctttgataagtacagctgagaagaacaatataccttggaggaaaatggcacaagagattttagagtcagaagtgtatagggagctggagagcattcaaaaccagtctttagtgtatcctgattattatttgaatccatttcatgcatatgaagagggaaatcttacatggctggcagcagcagaagcagaggctgctacaatgtcaatggccagacgagcacttcctgatgcttcttcaatacaggaagcaaatcagatactgcgtggcaattggcttcatgcaattgaacaacaccatatgcagtattcagaatcatgtgtgatcgatgacattctagatattggatgctctgtaggtataagcacaagatatcttgcagacaagttccccacagccaaagtcaccggacttgatctgtcaccctattttctagctgtggctcagcataaggaaaagagagcaatgcctagaaaatttcctataaaatggatacatgcaaatggggaagacacaggcttgccttctaaatcgtttgatcttgtctctattgcttttgtgcttcatgaatgtcctacaagagttatagtgaatttggtaagagaggcattccgtctccttcggcccggtggcacactagctttgacagatttttcgctgaagtcaaaggtccttcaggaattgtctccggttctgtttacattggttaagagcacggaaccctttctggatgagtactacttgactgatatggatgaaacacttagggaagctggttttgtgaacataacatcaattcttacggaccccagacacgtgacaattacagcaacagtgcctcaatgaaacatcacatcttcttgagatattttatttgtcaagatgcttaaaaaggattttatttattcataatgcatggttgttcctacaaaaaaaaaaaaaaaaaagtttaatgtggaatctcttctttctgtttttcttaactgtagcaagagcagctcacaaactttgccttcaatttgaggcatgcgtatgctgtggtacttgataaatcagagcaacaggcccattttatttaggataaagttcaactttattaaaagaataaatgtggtaatgattgagctcttaatttaaaaaaaa

SEQ ID NO: 7820 - DNA, 2383 bp, Glycine max
tcagctacgtaggcccccccccgatcgaattcataatatcattttgcgtgttatcaactgaactaatattactgtatacacaatttgcatgcctaacaacaaaaaaagaaaaagagaaacctaatagagcggagagttgaagagcaagagctagggaaagggacaaacagcccttcggagatctcaagggcctttccctcgttctctccgaactctcactttgtcttcttatttgctccttttcttctctcttccctccccaattattcattccctcatggccaccacgctttattcaacgccttgtcgttcactggctacttcatcctcctcttcctcgtcgttgcaaccctgccctctgtcgtctaacctcgcttaccctcaacgcgtcaacttctcacagcgctttctcgcctccaaggtctctctcaaatgtcaaccccaaccgtatcagattcccgttcacacccagcagccggaaggtacagtgacagctgctgtgacccctgttgaaaatggcacttctcacaagcagttgaaggctgacttattgtctcttaagtccccagatgagtctgaagacggttttgaaaaggatgaaaatgagtccagtgttagtattactgttgttggagcctctggagaccttgctaagaagaagatatttccggctctctttgcgctttactatgaggattgtctccctaagcacttcaccatctatggttatgcacgaagtaagatgactgatgcagaactgagaaatatggttagcaagaccctcacttgtagaattgataagagagagaactgcaatgagaagatggaccaatttctaaaaagatgtttctaccattctggtcaatatgattctcaggaaaactttgcagcgctagacaagaagctgaaggaacatgagggtgggagaacttctaatcgcctgttttatctttcaattcctcctaatatattcatagatgctgttaaatgtgcaagcttgtcagcttcttctggtaatggttggaccagggttattgttgaaaagccttttggccgtgattcagaatcttcggctgcattaacaaaatcactcaagcagtatctgacagaggatcaaattttcaggattgaccactatcttgggaaagagcttgtggaaaatctttctgttctccgattctcaaatctcatctttgaaccattatggtcaaggcagtatataagaaatgtacagttgatattctcagaagattttggcactgaaggacgtggcggaatttcaattacctgatggatgtcaggtcaaggttcttcgttcgatgagacccctacgacttgaggatgtggttataggtcagtataagagccacactagaggaggagttacatatccagcatacgttgatgataaaactgtaccaagcggcagcttaactccaacatttgctgcagctgccctcttcatagataatgcaagatgggatggggtaccttttctgatgaaggctgggaaagcattacacaacaaaagagctgagatacgggtacagttcaggcatgtgccaggtaatctgtacaatcggaatttcggtactgatcttgatcgggctacaaatgaacttgttataagagttcagcctgatgaggctatttatctgaagataaacaacaaagttccgggtctgggaatgaagttggatcgcagtaatctcaatcttcactacgctgcaagatattcaaaggagattccagatgcatatgaaaggttacttctggatgccattgaaggagaaagaagactcttcattcgtagtgatgaactggatgctgcttggtcactctttacacctgtactgaaggagcttgaagagaagaagataattccagagtactatccttatggtagtaggggtcctgttggtgctcactatcttgcagccagacacaacgtgcgatggggtgaccttgggacagacgtagaccattaaccctcgcattttgttgcacttctgatcggcctaagatgttagctattatgcatgctattttgtggtttcttcttggcatgcagtttcttttctcatcagcagcatggttacttctctggtggaagacaggtaccaggcacacacgaaaatcatacaaagcaataaaagcatcaaatttcaaagtccagtaataaagctcttagatcattgattttttttttttagtttttgttgctatttgggacagtttggacaagagcaaatatttcatttagttgccaatcgatctagttaggtgatgtattttgattttgcattttgcattttgtgaaacacaattaaagagaaaatgaagaaagttagcaagttggtatgaatctcaacccattcaaaaa

SEQ ID NO: 7821 - DNA, 2056 bp, Glycine max
gtacgctcggtcagctacgtaggccccccccgaatggaagaaagaaaaaacagaaacaaactcccatcatttcttcacttctttctgttgttgttgttgttgttgtccgtgttcttcttctggttggtctcacaactgaaccacccaaaactcactctcggatgcattagacaacaatggaggattccgagaaattgacggcgttgaagaaggcctacgccgatatcatcctgaacacggcgaaggaggcggcggcgcgaatcatggtgtcggagcggaaagtcacgcgctttcagcaggaacttgtttccactaaggaagaggcgcttcggatgcttctcagactcaaacaaatgttcgattctaaggtcagtgaagcggagctgatgtcattgaatcagcagaagaagattgaggagcttgaagctcagctccaggaagctgaggaaatagttagagatctaagggcagagttgagagaaacccaggctgaactggagaatgtgacaaaacaccaaatgcaacccttagttgaacaaaacacagaggctgaagttgcagctcaggaaagttttctgcaaaagaacagacttgatccttatgatggatctatatattctgcacctggtttacagtttgaatctgtctctatttctgaaaataggaatccgattgtaaatggatcaaatgatagcagtaagttctgtgggtcacatgatcatacaaacaactgctacattcataatccagattttgcatccatagtcattaggaggaaagagcccaagctctacagaaatggttgcactcagagaatacatgcatttgaaaggagcctttttgatggaaatatgtctgtttcaggaaacttagataatgtacagaatgaaaatttagtcagtgtacatgaagaaggtaaaacaatgactgtatcaactaatgccaaagctgatattatttctgaaaaggagaaaccagatgaacttaaagtggtgaaagcagttgctgaccttgtcaaagttccagttcaaagaaaaaagagaaaatttgggaaaaggaaggctattattaaatccatattacattctaatcaggttaaggaaacaaataaagaatcacatctgtcttgtgccaaagattctacacttgtattggataacgatgacccctcaagggtgagttcttctatggcatgtgaaaatgaagctcagaaggatctaatgtctccttttgctgatgtaccgacagacacaactgcaacaaatgagcaatcaggacctcatagcaatgctgaaaatggggaagtatttgttaaagctggcagtgcttggaacataactaaagatgacaaggaatcgttggataaatcagatttaacaagacaagagagtttgtctgctgaaagtgtggaggttccggcttgtaaagatgttgaggcatctaatgggtcactggataaaatggattcaaaagtatctgatttagatgagaaggtttctaatcgatctacaggcgataagtttaagttcacattctgtagaaagcgtaagaaggaggccattagctgtgatgatgtagattgctctcaagataataccagttcaaagaaaaagtgtggagagaagcaagatgatcatgtggagcctcagaaatcttgcacaatgactgaatcatctcgggacagccgacgactagcacaagtcgctcgccagctcatatctttgtctgagaagaaatggtggcagtagattcatctatttactgtgatgagttggttggatgggaagagactcaaagcacagtccaatgcgctattgtttccggaggtggcgttttttaaggatgctttacgttgatggagctgtggaatgtgttaatagtaaattattactattattactataactataatgtatatcaacttttctttcatccttagcttagaaatttctagcattatatcatataaaacataaattatatatactattgctacccttttcagggggtcttgtttgcaatacaaattttgctgatgaaaaaaaaaaaaaaaaaa

SEQ ID NO: 7822 - DNA, 2972 bp, Glycine max
  misc_feature (2937)..(2937): n is a, c, g, or t
  misc_feature (2940)..(2940): n is a, c, g, or t
  misc_feature (2967)..(2967): n is a, c, g, or t
  misc_feature (2972)..(2972): n is a, c, g, or t
actggcagtgtggattttcaatccaaatcaactttgtcatggagcacaccagctaaatccccgcgtccgggaagggcgtgggcctatagtggtggtgcatggggtaaggagaaagtacatagcattggaaacttacctcatccttggcgcatgtggaagcttgatagtgttcatgagattttgaagcgtgattatcagcttcgtcctgttgctgttgaaatatttagcatggatggatgcaatgatctcttggttttccacaaaaaagagagagaagaagtttttaaaaatctagttgccataaatcttcctcggaatagcatgctggacacaactatttcaggatcatcaaaacaagaaagcaatgagggtagccgtcttttcaagataatggcaaaatccttttcaaaaagatggcagaatggagaaataagcaatttccagtacctcatgcatctaaacaccttggcaggacgtggatatagtgatctcacccaatatcctgtctttccatgggtccttgcagattatgagagtgaaaatcttgatttgtccaacccaaaaacatttcgtaggcttgataaaccaatgggttgccagactcctgaaggtgaagatgagtttagaaaaagatatgagagctgggatgatccggaggtcccaaagtttcactatggatctcattattctagtgctggaattgtcctattctatcttctccgcctacccccattcagtacagagaatcaaaaacttcagggtggccagtttgaccatgctgatcgccttttcaatagcataaaggatacttggcttagtgctgctgggaagggaaacacatctgatgtgaaggaattgattccagaatttttctacatgcccgagttcttggagaatcaattcaatcttgacttgggagagaaacagtctggcgagaaggttggggatgttgtcctacctctatgggccaaaggtagtgctcgagagttcatcagtaagcatagggaagctcttgaatcagattatgtctcagaaaatttgcatcactggatagacctcatttttggatataagcaaagagggaaggctgctgaggaatcagttaatgtgttctatcattatacatatgaagggagtgtagacatagactcggttacagatccagcaatgaaagcatccattttagcacaaattaatcattttggggcagacacctaaacaactggttcctcaagccccatggtgaaaagacgaactgacaggaaacttcctccccatccccttaaacattccagtcatcttgcagcacatgagattcgcaaaagctcttcacctatcactcaaattgtcactcttaatgataaaattctcatagctggaactaacaatttgctgaaaccaagaacgtataccaaatatgttgcttggggttttcctgatcgtagcttgagatttattagctatgaacaagataaacttctttcaacacatgaaaatttacatggaggtaatcaaattcagtgtgctagtgttagccatgatggtcacattctggttacaggggctgatgatgggctagttaatgtatggagagttagcaagtttgggccccgcgccttacgacgcttgaagttggagaagccactttgtggtcacacagccaaaattacatgccttcaagttagccagccttacatgcttattgtgagtggatcagatgattgcacagttattatatgggatctcagctccatggcatttgtacggcagctcccagaatttccagcaccagtttcagcaatttatgttaatgacttgaccggagagattgttacagcagctggtattcttctggctgtttggagtataaatggggattgcctggcaatgatcaaagcatcacaactgccatcagattccattctctctgtgacaagcagtacgttttccggctgcgtggacacgacggggggggcaacaggtcatcagagtggagctgtcaaggtgtggcagatgattcactgctccaacccagatagctcccttagcaaatcaggttttggtgggtcgggaggtttaaatcttggtggattagaaccagaatacaagttggtcctacgcaaagtgctaaagtttcataagcattcggttactgcccttcacctcacaactgacctgaaacagttattgagtggggattcaggcgggcatttgctttcctggacactgcctgaagagagtctgcgaggttcattaaatcaggggtgagactggtaaaagatggttcgttctgctgacttcagcttttggccagcctttaatttgttgaatcctaacattggcttgagtggatctcaattgttgaaagatggattcatgttcataattcgagagaattgcaaaagaatgctggccagattgaaacagagcaagcaagattgtaaaagaaaagatgatatcacggcgtatagagggctatgaaactatatgcgtgtaagagtacaatatattcactaggtgggtgaagaagcatctgtcaagtaagatggattttaggtggaagaggagaaagcaaatgttgcccgcggtcttgtattttgggtgactggcggagaatattttgattttgccagagaagtctactgtttttctttgatgtaaatatgtgattttagtgtgtaattaatttgtatagtaaaagggtagtcatgaaatggattgtgattgcaatgataggcccaatacgaggcatgatcgtgggatgagtgcaatcctttatcgggaattctttttccatgttgacattggggcatttcttttattgagcccctgaaagaaaacaaggaaattcagaaggtcattgcctgtgatttgtacatttttttctgaaaaatataaaacacaaaaaaaaaaaattaaaaaaaaaaaaaaaaaaanccnaaaaaaaaaaaaaaaaaaaaaaaaaanttttn

SEQ ID NO: 7823 - DNA, 1966 bp, Glycine max
atcaaacctttttctatgagaggaagtaacaacactgaccctcaccgtcacgtatccgtcgcccccccccccaggcccagtacccccggccccccccccttatttatacggtaaacaaaacacaacacaccaaacatcattcgaccatacacattgctgttcaccattttcaattttctaagtggtttggcttggtttgacatacataaacctttcaagatctcagaggggcagaagatcaaagccaagacatcctctcgtatataaagagtgtctctgatttgatctttgtttcttctctttctctcgtttgagatttttcagtactccaccaaggttttgtcagaaaagcttgaatttttcgcctaccctttacaatgatctcttcgttgagacagcctgttgtagggatcagtggttctgatcttcttttgaggcaaagacatgcaactccaattaaggcaaggtcgtttttaccctctttgtcaagagaaaagggtcaaggatctcttgtttcagttcaaaagccactccacattggtgcttctcttggtgttggaaattttgtgtcagtgaagagtgatgctaaaaggggtgatttggtgaagtgtgaggcctatgaggcagacagatcagaggttgagggtgcaagcacaccgtcagaggctgcaaagaaggtaaaaattgggatatattttgcaacctggtgggctctgaatgtggtgttcaatatttataacaagaaggttctgaatgcctacccttacccttggcttacttcaactctctcacttgcatgtgggtctcttatgatgttgatctcttgggccactgggattgcagaagcccccaagactgatcctgagttttggaagtctttgttccctgttgctgttgcacatacaataggacatgtagcggcaacagttagtatgtcaaaagttgcggtatcgtttacacatattatcaagagtggtgaacctgcttttagtgttctggtttcaagatttcttttgggtgagagcttccctgtgcctgtctatctgtctttaattccaatcattggtggatgtgcacttgctgctgtgactgagctcaatttcaatatgatcggttttatgggagctatgatatcgaatttggcatttgtattccgtaatatcttttccaaaaagggcatgaagggaaagtctgtcagtggaatgaattactatgcttgtttatctattttgtcccttgcaattctcacacccttcgcaattgctgtggaaggaccacagatgtgggctgctggatggcaaacagctatgtctcaaattggaccccaattcatatggtgggtagctgctcaaagtgtattctatcatctatacaatcaagtgtcgtacatgtctctggatcagatctctcccttgacgtttagcattggaaacaccatgaaacgtatatctgtcattgtgtcttccattattatcttccacacaccagttcaacccatcaatgctcttggtgctgccattgctatccttggaaccttcttgtattcacaggcgaaacaatagagttggggaactaagattcctctagggacttgtttgttactgttcttcatgctcaaccacggacaaggaagttgattttgtaatgtgtcactgctggaattttgtaatactaggatgatctggctgtcagtccatctgtagatataataataagaataatgctgctgaggaaacgttatcataatacagatgattaggtttttttttttttttttgaatttctgaaatgccaatgatttgaaataaatgccttttgtttatatagtatgagaagaatttctcaagacattgtttactataaggagcttgcaataaagtgatgcctatgatcaatttgatgctcaaaaaaaaaaaaaaaaaaaaaaaaaaaaaaaaaaaaaaaaaagaaaaaaaaaaaaaaaaaa

SEQ ID NO: 7824 - DNA, 1636 bp, Glycine max
tcgagtcagctacgtcgggcagccccccccaagtggtgcaaaggaggaagaggaaaaagaggattggagggtcgccacgtttagcaacaaccaaaccctctctactctttcttcttctcttcgctagggttttagcttcttcctcttcacttcgttcttctggcctctacaatgagcaacgacaaggacaccttcaacgtcgctgatctcacttccgctctcaacgaggacaatagagcagaccttgtcaatgctctcaagagcaagatacagagtttggctggacagcattctgatattctagagtctctgtcgcccaatgtcaggaagcgtgtggaggttcttagagagatccagggtcaacatgatgaattagaggcaaaattttttgaggagagagcagctcttgaggccaaataccaaaaattgtatcaaccactttacacaaagcggtatgaaatagtaaatggtgctacggaagttgaagaaggggcagtgaaagaaacaacaccagatggtgaggaggatcaagagaaaggagtgcctgcattttggcttactgccatgaaaaacaatgaagtgttggctgaggagatttcagagcgtgatgaaggtgctcttaagtatctcaaagatatcaagtggagcaggatagaaaacccgaaaggattcaaacttgagtttttctttgacaccaacccttattttatcaattctgtcttgacaaaaacatatcatatgattgatgaggatgaaccaatattggagaaagcaattgggactgaaattcaatggcacccaggaaaatgcctgacacagaagattcttaagaaaaagcctaagaagggttcaaagaatgctaaaccaattaccaaaactgaaaattgtgaaagcttcttcaatttcttcaacccaccgcaagttcctgaagatgatgaagacattgatgaagatgcggctgaggaacttcagaatcagatggaacaagattatgacatagggtcaacaataagagacaagattattccccatgctgtatcatggtttactggggaggccattcagggggatgagtttggagatctggaggatgacgaggatgatgaagatattgaagaggatgatgatgaagaggaggaggaagatgaagatgacgatgatgacgaagatgatgaggaagaaagcaagactaaaaagaagtcatcagcacctaagaagagtggaagagcacagcttggtgatggccagcagggtgagcgacctccagagtgcaagcagcagtagatgcagaaggtcatttatgtagttgttgagttttgttggtgttcgagaatgtttgatgtgaaagtgggtttcatgttttaatgcttcttaagttgattttcctcactatatcttggtagttcgaatttgttgagagtcccttctcttattttgcgcctggtagagagaatgtggttataggtagagatgctgtgatttgtttatgttggaatttgtactgccgtgtcaggtatacttgaaatatagttcgtgctttcaactagtaatttttgctgttttaaagaactcgatctacattgttttacgtatttgaagggaagcctctgtaaaggtttatatagtttaaataaaa

SEQ ID NO: 7825 - DNA, 1749 bp, Glycine max
  misc_feature (59)..(59): n is a, c, g, or t
gaggattagagggtcgccacgtttagcaataaccaaaccctctctactcttttttcttntccttctcttcgctagggttttagcttcttcctcttcacttcgttctttttcgcctctacaatgagcaacgacaaggacacattcaacgtcgccgatctcacttctgctctcaacgaggacaatagagcagaccttgtcaatgctcttaaggttagtattttctttattctttctctgtgaagttgatattgagatttgaatttctcaatttttacaagttcattttactgtttgcattgtgtgtatttttttttttcaatgtttaattgtgagcagagcaagatacagagtttggctggacaacactcggatattctagagtctctgtcgcccaatgtccgaaagcgtgttgaggttcttagagagatccagggccgccacgttggccccccccccaaattttttgaagagagagcagctctcgaggccaaataccaaaaattgtatcaaccactttacacaaagcggtacgaaatagtaaatggtactacggaagttgaagaaggggcagtgaaagaaacagcacctgataatgaagaggatcaagagaaaggagtgcctgcattttggcttactgctatgaaaaacaatgaagtgttggctgaggagatttcagagcgtgacgaaggtgctcttaagtatctcaaagatatcaagtggagcaggatagaaaaccctaaaggattcaagcttgactttttctttgataccaacccttattttaccaattctgtcttgacaaaaacatatcatatgattgatgaggatgaaccaatattggagaaagcaattgggactgaaattcaatggcacccaggaaaatgtctgacacagaagattcttaagaaaaaacctaagaagggttcgaagaatgctaaaccaattaccaaaactgaaaattgtgaaagcttcttcaatttcttcaaccccccgcaagttcctgaagatgatgaagacatcgatgaagatgtggctgaggaacttcagaatcagatggaacaagactatgacatagggtccacaataagagacaagattattccccatgctgtatcatggtttactggggaggccattcagggggacgagtttggagatctggaggacgatgaggatgatgaagatattgaagaggacgatgatgaagatgaagaggacgatgacgatgatgatgatgacgatgatgatgaggaagagagcaagaccaaaaagaagtcatcagcacctaagaagagtggaagagcacaacttggtgatggccagcagggtgagcgacctccagagtgcaagcagcagtagaagtatttatgcagaatgtcatttatgtagttgagttttgttggtgttcgagaatgtcctaatgtgaaagtgggtttcatgttgttttttaatgtttcttaaattgattttcctccctatatcttggcagtccgaatttgttgcgagtcccttctcttattttgcgcctggtagagagaatgtggttataggtagagatgctgtgatttgtttatgctggaatttgtactgccatcagtatacttgattatagtttgtgcgccaactagtaatttttgctgttataagaacttgattatagctcgatcaacattgttttaagtattggaaggaagtctatgtaaaggttaccgtaaggttcatgttaaaaaaaaaaaaaaaaaacgctac

SEQ ID NO: 7826 - DNA, 3588 bp, Glycine max
ccacgcgtccgcccacgcgtgggattctgtgtactctcccggatcctccgccaggaactcttgttttgctgcgctcctgcttccgcttcggatccatcccgaaaacctcacacagaattattcactttctgtgttcggttcaactcttttggattttgctagatccgaagcgccaaccatttccaagatcgttgaagaatggcatcagcggcgagtggggccaccggatggtacaggggaagagtgaaggcggttccttccggggactgtttggtcattgtggcgatctccagcaccaaacctggtcctttgcctgagaagaccattactctatcttctttaattgcacctagactggcgcgtagaggtggtgtggacgagccgtttgcatgggaaagcagagagtttctgaggaagctctgcatagggaaggaagtgaccttcagagtggactacaacgtgccgtccataagtcgggactttggaaccgtttttctcggggacaagaatgttgccatgctggttgtttctcaaggatgggttaaggtcagggaacaggggcagcagaaaggagaagcgagtccgtacctggcagaattgttacggttggaagaacaggctaaacaagaaggccttggccggtggagcaaggttcccggtgctgctgaggcatcaatcagaaatttaccaccttctgcccttggtgaccctagtaactttgatgctatgacttttttaaatgcaaacaagggattgcccatggaggcagttgttgagcaggttcgtgatggcagtacactccgaatctatttgctcccggagtttcagtttgttcaagtttttgttgctggaattcaggctccacaaatgggaaggagagctgcacctgaaagtgttgttgaaccagagttggcatctgatgacaccaacggagatgttcctggggaacctcgagccccacttacatctgcacaaaggcttgcagtttcaacatctgctgctgaaactgcagccgatccttttgcacatgatgctaaatttttcactgagatgcgtgtattgaatcgagaagttcgacttgtcctggaaggtgtcgataagttcagcaatttaattgggtcggtgtattatcctgatggtgaatcagcaaaggacctagcattggagcttgtagaaaacggttatgcaaaatacgttgaatggagtgcaaatatgatggaagaagaggcaaagcgaaagctgaagactgcggagctgcaggctaagaaagacaggttaaggatgtggacaaactatgtaccaccgccttcaaattcaaaggcaattcataaccagaatttttctggcaaggtggttgaggttgtgagtggagattgtattgttgttgctgatgattccattccatatggtagtcctctagctgagaggcgagttaacctttcaagtattaggtgtccaaaaatgggcaatccccgtcgagacgaaaaaccagctccctatgcccgtgaagcaaaggagttcttgagaacacgcctcattggtcgtcaagttaatgttcaaatggaatattctagaaaggtttctcccacagatggatctgtagttccatcagcagcttctgattcccgagtaatggattttggatcagtcttcctattgtccggtgcaaaggttgacaatgatgatgccccatcatctgctccacctgctggaagtcagcaaaatggggtgaatgttgctgagttaatagttggccgtggctttggaactgtcattagacatcgtgactttgaagagagatctaactattatgatgctcttcttgctgctgaatcacgtgcaatttctggaaggaaaggcacccactctgccaaggatcctccagtgatgcatataactgatttgaccacggcatcggctaagaaagccagagacttcttgcctttcctgcaccgaagtagaagagttcctgctgttgtggaatatgtgctcagtggtcatcgttttaagttgttaattccaaaagaaacttgcagcattgcgttctctttttctggagtcaggtgtcctggtcgtgatgaaccatattctgacgaagcaattgctctgatgaggagaaagataatgcaaagagatgttgagatagaggttgaaaccgttgatcgaactggaacattcttgggatccttatgggagtcgaggaccaacgtggcaattacactgctcgaagctggtctggcaaaactccaaacatcctttggcagtgatagaattcctgattttcatcttctggatcaagctgaacaatctgctaaaaggcaaaagctgaaaatctgggagaattttgttgaaggagaggaagtatctaatggtgcagcagttgagaacaaacagcaagaagtacttaaggtaattgttacggaagtcttgggtggtggtaaattctatgttcagacagttggagatcaaaagattgcatccattcagcaacagcttgcttctttgaacctaaaggatgctcctgtgcttggtgctttcaatcctaagaagggtgatatagtcctttgttattttcatgctgacaaatcttggtaccgggcaatggttgtcaacacaccccgaggaccagttgaatcccccaacgacttgttcgaagtattctacgtcgattatggaaatcaagaagtagtaccctacagtcaactacggcctgttgatccatctgtgtctgcggcacctggtcttgctcaactgtgtagccttgcatacatcaagattccaaacttggaagaggattttggccaagaagcagctgaatatttgagtgaactcactttaaacagtggaaaagagttcagggccaaggttgaggagaaagatacttcgggaggaaaagtgaaagggcagggaactggggcaatccttgctgtaactcttgttgctgtggatgctgaaatcagcgttaatgctgccatgctacaggaagggcttgctaggacagaaaaaagaaacaggtgggacagaaaagacagacagacagctctcgataatttggagaatttccaggatgaagcaaagaccagcaggcgtggaatgtggcagtatggagatattcagtcagacgacgaggacactgctcctcctcctagaaagaccggtggtggccgtaaataagtgtaacaggaggtaaattataaaatagacatcttgagagaacatgactgaagttaataggcttgaacaatttttatttttttttgagctagagagaaaaaagaaaatgccgtgcggattcctttgtaagttttgttttattttttttgtttatattttgtctttaggttggtggaacaattgttttctatagatgtcttaataaggtacatgcggcaaggttctctgttaccatgaggacaacaaagatgttttgttgtcgtttaatatttcttgcttgtcttttggtcttttaagaaattgtcttcctttttttctaggtttagtttcgacttagggggagttttaaccgtaataaagttgagtagaattgattttaatagatttttttttttccaaaaaaaaaaaaaaaaa

SEQ ID NO: 7827 - DNA, 1506 bp, Glycine max
ctcgctatggccactgttttcagaacccccactttccggcctccgcctccgcctccgccgcgcgctgccaagtcgccgaagccctcgcgcttcaccgtcgcgtctttcggacagagcaccacctgcaggagaaaacccccctcgctcctctcctccctgcggttccctactgttccctctccacggttcgtcaggttcgttcccttcgctttcgatggcgacaccgaggccccgcaagttcaggaaccggaggttcaggttctggacccttcagatggtgctgttggtgtaaatgatagtgcaagtgataatgaggttagcgatgctgatgaaacatttgcttcacctttcttagtgatacttcaatcgtacagagaagcattggctaataatgacgaagtcaaaattgctgagttggaatcgtcattaaaatccattgaagatgagaaaatagaacttgaagggaaaatagcttctttatcagaggagttatcaatagaaaaggatcggattctaaggattagtgcagactttgacaattttcggaagaggacagagagagatcgcctttcattggtcacaaatgctcagggtgaagttgtggagagtttgttgcctgtgttggataattttgagagagcaaaaacccagataaaggtggagacagagggagaggagaaaataaacaacagctatcagagcatatataaacaattcaatgaaattctaacttcacttggagttgaaccagtggagacagttggaacaccctttgatccattgctacacgaagcgattatgcgtgaggattctgatgaatttgaagatggcatcataattcaagaattcagaaagggttttaaacttggtgaccgtctcttgcgtccatcaatggtaaaggtatcagctggtcctggacctgcaaagcctgaacaagaagcaccgcaagaagagcaagtcaacactgaaatttctgaggacagtaaagaaaatgagggcagcacagaaacagagtcttcttgagaggtcataactttttgcctgatttcagttttgcaataatatattaattttaatctccaggaacataatgttggctgtaagagtctcccaggagatattcctcccaaatttcccttaaaaataaagttagtattatgtgattttgaattatatttttagatttttatgtccttgcatggctttcatagagatgactgagttttcagaggtaccattttcctgaaaggaagagtaagttgcaatgttcaagtgctcggcacctggaatcagaagtattgtagtgtgagcattttaattatttgattaaaggttttatgatgacaaattatttttcatcttaatgcataatgtatcctttggtcgggcgagatgcaatgctgcgttgatgtactctaaagcgctttttttagaaaagctcatgtacttttctttccttcacattagattattagtgcatgcttgatctagtttatttttgaaaaa

SEQ ID NO: 7828 - DNA, 1407 bp, Glycine max
aattccccgcgcgcgctctctcgcacgctatggccactgttctcagaacccccaccttccggccaccgcctccgccgcgcgccgcaaagtcgccgaaaccatcgcgcttcgccgtcgtgtccttcagacagagcaccacctgcgggagaaaaccctcctcgcttctctcctccctgccgttccctaatgttccctctctacggttcgtcaggttcgttcccttcgctttcgacggcgacaccgaggccccgcaagttcaggagccggaggttcaggttctggacccttcagatggtgctgttggtgtaaacgacagtgcaagtgataatgaggttagtgatgctgatgaaacatttgcttcacctttcttactgttacttcaatcctacaaagaagcattagctaataacgacgaagtcaaaattgctgagttggaatcgtcattaaaatccgttgaagatgagaaaatagaacttgaagtgaaaatagcttctttgtcagaggagttatcagtagaaaaggatcggattctaaggattagtgcagacttcgacaattttcggaagaggaccgagagagatcgcctttcactggtcacaaatgctcagggtgaagttgtggagagtttgttgcctgtattggataatttcgacagagcaaaaacccagattaaggtggagacagagggagaggagaaaataaacaacagctatcagagcatatataaacagttcattgaaattctaaattcacttggagttgaaccagtggagacagttggaacaccctttgatccattgctacatgaagcaattatgcgcgaggattctgatgaatttgaggatggcatcataattcaagaattcagaaagggttttaaacttggtgagcgtctcttgcgtccatcaatggtgaaggtatcagctggtccaggacctgcaaagcctgaacaagaagcaccgcaagaagaacacggcaacactgaaatttctgaggacagtaaacaaaacgagggcagcacagaaacagagtcttgaaaggtcaaaacttttgcctgatttcagttttgcaatagtatatcaattttaatctccctgaacataatgttggctgtaagagtctcccaggagatattcctcccaaatttcccttaaaaagaaagttattattctgagattttgaattatatttttagattttatgtccttgcatggctttcatagagatgactgaattttcaaaggtaccattttcctggaaggaagagttagttgcaatgttcaagtgcttgatacctggaatcagaatcgttgtagtgtgagagcattttaattaatttgattaaaggttttatgatgacataatttttttcatcttattgcataataatgtattctttggtcgggc

SEQ ID NO: 7829 - DNA, 3685 bp, Glycine max
gcttgtcgcattttgagtctctgtgggtcttttggggctctctctctcgccgagctccgcactcttcagggaatttcctcactcagattccagctgaaaattgcgcagtgagttcacttcaaattcagagatgattaattgaagttttttgcaataatagttcaataactgattcctgtctctaattctgaagttattacttttaaaggtttaatggctgtgtcatgacttttgtaactttgcctactgaagtgaaatgatagattttttgaactcttactgggatccttctaagaaacttgcgtgccacatctcaatttataaaatacaaatatgcttacatggtggggaaaatcatcatcaaaagaaaccaagaagaaagcaaataaggaaagtttctttgacacactgcaccgaaaacttagaatttcatccaaaggtaaagtaagcattagatctggaggatcacgtagacattgcaatgacacaatttcagagaagggagatcattctccatgtggatcaagatcgccttcaccttccaaagtggcaaggtgtcaaagttttattgataggcctcatgctcagccacttccacttcctggtctgcatccttcaagtgtaggccgagtagattctgaaattagcatatcatcaaaatcaagattggaaaaagtctccaagccattatcgtttcttacgcttccaacacctggatgcatacgttgtaggccaaaccctgcagatttggatggagatatggtcactgcttcagtctttagtgattgctctgctgacagtgatgagccggcagactcacacaatcgtagtcctctagcaattgactgtgagactgggactagaactgctgctggcagtccttccagcttaatgctcaaggatcaaccacctgctgtttcccaactgaattcaacgggagtaaagaaaccaggaaatattctaagtaatcatatgtcttctacttcaccaaaacgtaggcctttacgcaaccatgttccaaatcttcaggttcctcctcatggtgccttctatagtgctcctgatagttccttgtcaagtccatcaagaagtccattgagggcatttggcacagatcaggtgttgaattctgcttttttggctggaaagccatatccagagatcaattttgttgggtctgggcattgctctagtccaggttcaggtcacaattctgggcacaattcaatgggaggggacatgtcaggaccgttactttggcaaccaagcaggggtagccctgagtattctccagtacctagtcccagaatgactagccctggtccaagctctagaattcagagtggagcagtcacacctattcatcccaaagccgggggaacacccacagaatcacagactcatcgattgcctcttcctcctttgtcagtttctaattcctcactgttctctcattcaaattctgcagcaacatctccgtctatgccaagaagtccagctagagcagataatccaaactctggctcacgttggaagaaagggaagctgcttggcagcggctcatttggacatgtctatcttggcttcaatagtgaaagaggcgaaatgtgtgcagtgaaggaggttaccctgttttcagatgatcccaagtctatggaaagtgcgaagcaatttatgcaggaaattcatttattaagccgcttacagcatccaaatattgtccagtattatggttctgaaacagtcgataacaagctttacatataccttgagtatgtatctggaggctccatacataaacttcttcgagaatatgggcaatttggtgaactagttattcgtagttatactcaacaaattttgtcagggcttgcttatttgcatgctaaaaatactctccatagggatatcaaaggagcaaatatactggtagatccaactggtcgggtcaagttggcagactttggcatggcaaaacatataacagggcaatcgtgcccattgtcattcaagggaacaccttactggatggctcctgaggttataaaaaattctaatggatgcaaccttgcggtggatatatggagtcttggatgcacagttttggaaatggctacaaccaaacctccttggtttcagtatgaaggggttgctgccatgttcaagattggtaatagcaaggaactcccaaccatccctgatcatctctcaaatgaaggaaaagattttgttaggaaatgtcttcagcgtaacccacatgatcgtccttcagccagtgaattgttggaccacccctttgtaaaaaatgctgcacctttggaaagacctattccggctcctgaagctttggaccctgtttctgggattacacagggagcaaaagctctggctattggacaaggaaggaatctttctagcttggattcagatagactttctgttcattcttctagatttttgaaaactaatcctcatgaaagtgaaatccatattccaaggaatatatcttgccctgtttctcccattggaagcccacttttgaggtcaagatcaccacagcacaggaatgggaaaatgtctccttctcctatatctagccctcggactgcttctggggcatctacacctcttgctggtggcagtggtgccattccatttggtaatcactctaaacagtccatttactttcaagagggttttggaagcattcccaagtcctcaaatggtgtctacatgaatggccattctcatcacgactcgaatgttgacatttttcgaggaatgcaaatggggtctcacatttcaccagaactggtttccagtgaaaatgatgttttggttaagcagtttgcaaggcatcctcatgcagagccatatgattttcagtcggtcttggcagatcgtgttggccggcagctgctgggggaacatgttaagattaacccatccattgatctcagtcccaactcgtctttgcttagccggccaaacggtttatgacatcaagatttttcctaaagtttctcataatacctttggttagcagatctgttcattgttctatttgcaagaatataactatacaataaggagccaaagcacaagagaatcaatgtaaataaatttgtatccaagaataggctacatggggcacaaaagtgcattttgcatggcttcggctcgggctgatggagttcattcgtgccacagcattaaacattctgacaatttgtccatatcaagcaatcaactcatacaaatgctcacttgttcgaagaggaacttcttgttgtatgtaacatatttaaagcatcaacgcatgagaggtttctctcctgcacttaagatactagaaatgacagtttatgcaatgacaaatgcatcttctagaattggaacaccatatagatgccagagaaagggttaaattgatacaaaacttaacttgcagacttttttttgggaggttagacattgctgtacggtagatgggaaactgtattgtgatcatgcatttatggatggggaagtcaaggtttgtagagagtccatgcatgatgcatgttatgtttaattgtgggagatgaagtattattgtcattgtatagtctactactggatttgttctgtacattattattccccagtaaaatggaagaaatctaaaaatcttatgatcctcatc

SEQ ID NO: 7830 - DNA, 916 bp, Glycine max
ttttgtgactaggtgcattgccatagcacctagtcttattgtttccatcattggtggttctcaaggggctggtcggcttatcatcatcgcatcgatgatactttcattcgagctcccattcgcattaattccactccttaagttcagcagcagcagtaccaagatgggacctcacaagaattctataattatcattgtcatctcttggatcctaggcttggggatcattggtatcaacgtgtactacctctccaccgccttcgtgggttggctaattcatagcagtctaccaaaggtggcaaatgtgttcatagggatcatagtgtttcctctaatggcactatatgttgctgcagtaatctacctaaccttcagaaaagacactgttaagacatatattgagacaaagaatgaaccagcaatgcaaacccacatggaaaaggggtttatggctaatggtcaattagagttgagtcaagttccctacagagaagatttggctgatatcccactaccacaatagggtaccagctggtctataaattaaatgcatcaccaaaaggggtttttctttcaagtcattctaaaagtgaatgtaatattaggaccttgagaattctcctctcgagttgtcacccatgtgtttgttgtgcgtactacatacataactactatataagttttatggttattatgttatagcaaaatttataagaaccatttcagtgtaaaccccatagtttactggtcttgaaaaattttgaataataaaaccccaatagtaagtagttttgtcattttctacgttgtaaatgaaggcatgactgaagataagatcttacagtctgtacttgttgtattacatccattttgtctgagtaaatgaattgtgttcctctcttctgtttttcaaaaa

SEQ ID NO: 7831 - DNA, 1169 bp, Glycine max
cggccgctcgagccggctggcgggagatgctaagtaaaatatcggctacgtagctctgctttctgtgttattgtctggcttttggagccgatccaaccaatcatcgctggcgccaaatacaaaatctcatcccttcccctttctcttactgactctctttgtcaccgggtttgtgagatgtcggatgcaccggcgagtccgagtcacgagagtggtggcgagcagagccctcgcggctcgttgtccggcgcggctagagagcaggaccggtaccttcccattgccaacatcagccgcatcatgaagaaggctctgcctcccaatggcaagattgcgaaggatgcaaaagacacaatgcaagaatgcgtttctgaattcatcagcttcattaccagcgaggcgagtgagaaatgccagaaggagaagagaaagacaatcaatggagacgatttactatgggccatggcaactttagggtttgaagactacattgagccgcttaaggtgtacctggctaggtacagagaggcggagggtgacactaaaggatctgctagaagtggtgatggatctgctagaccagatcaagttggccttgcaggtcaaaatgctcagcttgttcatcagggttcgctgaactatattggtttgcaggtgcaaccacaacatctggttatgccttcaatgcaaggccatgaatagtttagatgcttctacgcatcttatttatttcccttgaatgcttgtacgcatggaatgggtggaaacaatggtttggtgatttaatatttaggttctcgtttagaaggcatcagtgtcagaattttgttacggtactaaggtagatttttattaatacattatacatgtcatatttagctgcctgaccaactcaagggagagatgtgtttggggttattgcatgtgattcgccatgtagcttgtcatggtgagaagcacttgctttgagtgttttctttagattattatataatatataatatttgcagacactgcatttgttagtttatttagtttaggccatacagtttgcttctctcttaatgatgtaaaaaatattcacttgtcattcatctagaaaattcgtaatagtgtaatagaatctttaaagacttgctacacagtaatccaaaaaaaaaaaaaaaaaa

SEQ ID NO: 7832 - DNA, 1860 bp, Glycine max
ccacacgtgaggaaaaatattaagagagaaaataatcaatactacaactttgcaattttcgtggtagctagaccaaggtagttcaattgccatggatattggtggtggagtggaagagccagtgagagagttgaggcaatacttcaaaactggaaaaaccaagagtgtaacatggaggaaaaaccagctcacatctctcatagaccttgttcatgagaatgaagatgctatatttaaggccctccataaagatcttgggaagcaccctgttgaggcttaccgtgatgaggttggaggggtagaaaaatcagccagcaaagctttgagctgcgttgagaaatggatggcccctaaaaagagtgatatcccttttcttttcttcccagctaaaggagaagtgttgtcagaaccacttggtgtggttctcatattttcttcttggaacttcccaatcatactgacattggatccaataattggggcaatatctgctggaaatgttgtagtcattaaaccttcagagcaatctccagcaagctcttcttttcttgccactaccattcctcgctacttggactctaatgccatcaaggtgattgagggtcgacctcagctacgtaggcccccccccccacaaaaatgggacaaaatattcttcactggaagtccacgtgtggcaagcgtagtcatgtctgctgctgcaaagaatttaactcccgttactctagagttgggtggaaaatgccctgccattcttgattcccttccaaatcctttagagagtaagttggcagtaaaaagaattgtaggaggaaagtggggaccttgcagtggtcaagcttgcatagcaatagactatttgcttgttgagaagaagttcccatatgctctgatagaattactaaagaagatcattagaagattttatggtgaaaatccagtggagtcaaaggtaatttcaagaatattaaacaagcagcactttgaaagattatgcaatcttctcaaagaccctcttgttgcggcttccatcgttcatggtggttcagttgacgaagaaaacttgttcattgagccaacaattttgttagatcctccgttagattctcagataatgtcagaagagatatttggcccactgcttcctataatcactatggataaaattcaggaaagtattgaatttatcaatgcaaagccaaaacctcttgccatctatgccttcaccaaagatgaaactttcaagagaaatattctatcagaaacatcctcaggaagtgtcgtatttaacgacacaatggttcaatttttatgtgatacactaccatttggaggtgttggccagagtggttttggaaggtaccatgggaagtactcttttgacactttcagccatgaaaaagctgtaatgcatagaaagctgttccttgaaattgagccaaggtaccctccttggagtaagttcaagctcgagtttatcagattggcatacaggctgaactactttggactattactgcacatgctgggcttgaaaagatacaagtagataaatacctcagcacagtgttcatctattcctcaaatacacgttgattaaaaaagaattaagctttattgtgactgaatatgagttgtaggaaaataggagaaagggtccttatttgcagaagttgcacatgtggtgaactttaacttggcgttgtaataaacgaacctttgtatctcttatttttcttgctagtaataggatgtttttacttctaatgtccaacagaccagacaatgtcaaacatttttaacttcgctttcacctgcatttgtccacccgtgtggcccccccatgaataaagtgcctac

SEQ ID NO: 7833 - DNA, 2615 bp, Glycine max
ctcgagccgattcggctcgagcggctctttggcaacactcctatttttccattgggggtcccacttctgagttggcaccctcgagccctaattcccaattcctttctccaatcgctcctccctccgcgccacgtcgctaggctctgtagggttctgagttccgattcgcgagggaaaatgagcacgcagaagaagcgaccgtaccacatagaagcgttcaagcaccgcgccgtgggggatcccaagtacgccgagaagacatggaaggttctggaacacgctattcatgagatatacaatcacaacgctagtggccttagctttgaagagctttacaggaatgctgataacatggtgttacaaacatttgggtcagctacgtaggccccccccccccccacaaatttggggagaaactttacacaggacttgtgacgaccatgacttctcatctaaaagaaatttctcaatcaattgaatctgctcaaggagaaattttcttggaagagctcaacaggaagtgggtagatcataacaaggcattacaaatgatccgagatatactgatgtacatggatcgaacgtttataccaagcaaccataaaactcctgttcacgagcttggattgaatctttggagagatgttgtgatccattccagcaaaactaaggctaggcttctagatactcttcttgaacttgtgcttagagaaaggaatggtgaagtaataaacagaggattgatgagaaatataataaagatgcttatggatttgggtttgcctgtttaccaacaggactttgagaagcattttcttgatgtttcagcaaatttttactgtcgtgagtcccagaaattcattgaatcatgtgattgtggtgattatttgaagaaagctgagagacggttaaatgaagaaatggagagagtatctcactacttggatcctagaagcgagtcaaagataactaatgtggtggagaaggaaatgattgagagtcatatgcacactctagttcacatggagaactcaggcctggttagtatgcttgtggatgacaaatatgaagacttgcaaagaatgtataacttatttcgccgggtgtctgatgggctcacaattgttaaagatgtcatgacctcttttgtacgggatacaggcaagcagctaattatggatcctgaaaggttgagagatcctgtggattttgttcaacgtctcttggatttgaaggataaatatgacagggttattactatgtcatttaacaacgacaagacatttcagaatgccttgaattcctcttttgaatatttcatcaatttgaatgcccggtctccagagttcatttctttgtttgtggatgacaaacttcgcagagggttgaaaggggttggtgaggaggatgtggagattgtactagacaaagtcatgatgcttttcagatacctacaagagaaggatgtgtttgagaagtattacaagcaacacttggcaaaaaggcttctttcagggaagactatatccgatgatgcagaaaggagtttgattgttaagctcaaaacagaatgtggatatcaattcacttctaagttagagggtatgtttactgacatgaaaacttctcatgatacgatgcagggcttctatgcaaaccttggcactgagttgggggatggccctatgctatctgtccaggtgcttacgacaggatcatggcctactcaacctagcccgccgtgtaatcttcctgtagaaatactgggtgtatgtgataagtttcggacatattatcttggcacccataatggtaggagattgtcctggcaaactaatatggggactgctgatttgaaagcaacatttggtaagggccaaaagcatgagttgaatgtttccacatatcaaatgtgtgtactcatgcttttcaacagcgctgagcggttgacttgtaaggagatagagcaggctacagcaatacccatgtcagatttgaggaggtgccttcagtctctggcctgtgtcaaaggaaaaaatgttcttcgaaaagagccgatgagcaaggacatagctgaggatgatgcattcttctttaatgacaaattcaccagcaagttctttaaggtaaagatagggactgttgttgcacagagggagtctgaaccagaaaacctagaaactcggcaaagagtggaagaagacagaaagccacagatcgaagcagccattgtgaggataatgaagtctaggcggactctagatcataataatattgttgctgaggtcacaaagcagctgcagtcacggtttttgcctaatcctgttgttattaagaagaggattgaatcccttattgagcgtgagtttttggagagggataaagtggacagaaaactgtaccgctatcttgcttgaactgtatgtgcttttgatttggcatggcacttgtgtgattctgtctgtcataagtttgattgcacatcacaaattgccgcaagtagtgtaactctcctttgcatactcaacaaaacctagatttgttagggttacttctttcaggctgcaaaacttaatatatcttctttgcatacttaaatataccttttagctctt

SEQ ID NO: 7834 - DNA, 1111 bp, Glycine max
gtccatatatgactccaatgagagatcctggagccgcgcctgctccggaggctccccgaacacctatgcatagccgagcatggaatccttatactccaatgagtcctccaagggataactgggaagatggaaatccaggctcttggggagccagtccacagtatcagcctggaagccctccttcacggccatatgaagccccaactcctggtgctggttgggctagcactcctggtggaaattatagtgaagctggaacaccgcgggacagttctgcctatgccaatgctccaagcccatatttaccatcaacacctggtggacagcctatgacaccaagttcagcatcttatcttcctggcacccctggaggacagcctatgactccaggcacaggtggtatggacatgatgtctccagttttaggtggggaaaacgaagggccttggtttatcccagatatattggtcaacgtacacagggctggagaggaatctgttggagttataagagaggctctcccggatggctcttacagggtagctcttggatctagtggcaatggtgaagcgattacagcccttcctaatgaaatggaggctgtggtaccaagaaaatcagacaaaataaagattatgggtggggcattgcgtggtgccaccggcaaattgattggtgtagatggtactgatggaattgtaaaggtagatgacacattggatgtgaagattttagacttagttattttggcaaaattagctcaaccatgatataagctttatgtagagaaattactttaatgccatatcttttcttgtgtcgaaaaaaaaaaaaaaaaacaactgttgctaggggttttgtctgtctataattcgctccctgcacctttgtccgcccaagtgacaagttccaactgcagataaacatttgcttctaacaaataccactataaattatcgttttccttacattagggtaaccggtaagaatagggatggaatcttgagaattgttgttatcttcacaaatatggaactgagcatgggtactttttcaaatgtggatatgaagatgagcaaaaaaaaaaaaaaaaaaaaaaaaaaaaaaaaaa

SEQ ID NO: 7835 - DNA, 2527 bp, Glycine max
cggacgcgtgggcggacgcgtggggaggcttgcaaaggtctacgcaatatatttggccaaaaaataacacttgttccaatcagagaaatgactgatgttttgtcagttgaaagcaaagctattgatcttgctagagatacttgggtcagaatgaaaattgggacttataaaggggaccttgccaaagtagtggatgttgataatgtgcggcagagggttactgtcaaattaattccaaggatagacttacaggctcttgcaaacaaattggaaggtagagaagttgtgaatcagctgccttggccccccccccctcgttttatgaatgttgatgaagcaagggaactgcatatccgtgtggagcatagacgcgatgcctatggggaacgatttgatgcaattggaggcatgatgttcaaagatggattcttatacaaaactgtatcgataaaatccattagtgctcagaacatcaaacctacttttgatgagcttgaaaaatttcgtaaaccaggcgaaagtggagatggtgacgtagctagtctgtcaactttgtttgcaaacaggaagaaaggccattttatgaacggcgcggctgttattgttgttaagggtgatttaaagaacttgaaggggaaggtggagaaagttgatgaagataatgttcatataagaccagaaatggaggatcttccaaaaactattgctgtaaatgaaaaggaactttgtaaatattttgaacctggaaaccacgttaaggtagtttctggtgctcaagagggggctacaggcatggttgtgaaggtcgagcagcatgtgttgatcttaatatctgatacaacaaaagagcatatccgtgtctttgcagatgatgttgtagaaagttcagaagtaaccactggagttacaagaattggggactatgaacttcgtgatcttgtattgctagataataatagctttggtgtgataatacgtgttgaaagtgaggcatttcaggttcttaaggggattcctgacagacctgacgttgtgcttgctaaattacagagagatcaaatgtgagatagataaagaaaataatacgtgcaggataggtttaagaatacggctttgccaaaggatgctgtgcggatcattgttttttttttgcaaaggaaagcatggtcctgtggagcacatatatagaggaactcttgtctcatctttgatcgtcattatcttgaacatgcaggctttatatgtgctaaagcccaatcatgtgtagctgtgggaggttcacgctctacaggcgacataaatggggatgcctactcaagatttgccagtcttagaagtccaagtctgtttccaccggctgcgagaagacgacagaaggggttttctcgaggagggccaatggattctggagggagacataggggtggaaggggccatgatagtttggctgggacaaccgttaaagtacgccaaggtccctataaaggttaccgtgggcgtgttatagatgttaaaggcacaacagttcgtgttgagttggaatcccaaatgaaggttgtgacagttgaccggaaccatatatctgacaatgtggctgtaaccccatatcgtgatacatctcgctatggaatgggaagtgaaacaccaatgcatccttctcgaactcccttacatccatatatgactccaatgagagatcctggagcaacacctattcatgatggaatgagaacacctatgcatagccgagcatggaatccttatactccaatgagtcctccaagggataactgggaagatggaaatccaggctcttggggagccagtccacagtatcagcctggaagccctccttcacggccatatgaagccccaactcctggtgctggttgggctagcactcccggtggaaattatagtgaagctggaacaccgcgggacagttctgcctatgccaatgctccaagcccatatttaccatcaacacctggtggacagcctatgacaccaagttcagcatcttatcttcctggcacccctggaggccagcctatgcctccaggcccaggtggtatggccatgatgtctccagttttaggtggggaaaacgaagggccatggtttatcccagatatattggtcaacgtacacagggctggagaggaatcttttggagttataagagaggctctcccggatggctcttacagggtaggtcttggatcaagtggtaatggtgaaacgattacagcccttcctaatgaaatgggggctggggttccaagaaaatcaggcaaaataaagtttatggggggggcattgcgtggtgcaaccggcaagttgattggtgtagatggtacggatggaattgtaaaggtagatgcccccttggatgggaagattttagacttagttattttggcaaaattggctcaaccatgatataaaaagcttatgtagagaaatttctttaatccccacaaaaaaaaaaaacaaacaaaataaaaagaaaaaagaattcctagaa

SEQ ID NO: 7836 - DNA, 1325 bp, Glycine max
  misc_feature (170)..(170): n is a, c, g, or t
  misc_feature (232)..(232): n is a, c, g, or t
ttctttcgttgtttctcaggctgatgggaatttgtacgtatatgaaaagaacaaagatggcgcctggtgattctctcttctcccaagttggtaaatggatccaaacctcaagttttttcggtttgccccattgcacgtttacaagtaagagtaattccctatatgcgaanattgggcatatattgccccagggtgtcatattaaataagtaatttctcttctcctcgaatgnggattggggcatttctttagcaacctggttgggcgaagaattggttattttaccgaagtgggtttgatctaccttcaaaagatacaactttattattgtggcgggaaaaagttattagggtgcggcgcgagtgttgtgcatggagcatggatggaaaatatattttgacgggaggggaagatgatttagttcaagtttggagcatggaagatcgcaaggttgtggcatggggcgagggacataactcatgggtcagtggagttgctttcgattcatattggacatcaccaaattcaaatgacaatggagagactgttacgtatcgttttggttctgttggtcaggatacacaattgcttctatgggacctggaaatggacgagattgtagtgcccttgagacggccacctggtggatccccaacttacagtactggaagtcagtcatcgcactgggacaatgttgtaccattaggtaccttgcaacctgctccgagtatgctggatgttccaaaaatctcaccgttggttgctcaccgtgtgcatactgaaccactctctggcttgatatttacccaggaatctgtgcttactgcctgccgggaggggcatattaaaatctggatgaggccaggggttgctgagagccaatctagcacctctgaaaacttgttagctaccaatctcaaggagaagccttcactttcaagcaagatcagcagcaattctagctacaagcaatgattaaatcttaatctaaagggaattttaagcaattttttttatatggtttgtttatcttttatccagttggtttcctagttttaacatagtgattcaagtaaagatgaaccaactggtctattgtatattcagttattcacggatgagcatgccattgatggcactgagaggatgggagagagagttctctccagctgcctgctgtaattataaaacggctgttattaggataatctgattagtgattacaggaataatgtgaaaattggtccttggagatcggtacttttgaagtccatacatacaagccattatttattgtgttggcattcaaaaaaaaaaagagaaaa

SEQ ID NO: 7837 - DNA, 1623 bp, Glycine max
ggctcgacctcgcgcccgcgccgccccagatatcaaatcgaacagccgcaaacccttcctctgaactctgatccgcactggcactgaagccattgctgtaccttccaaaccctagcgtagccacgcgctgaattgcgatacgatgatcgtgcgcacatgaggcggcacggcacggcacgatgatgaacacagccaacggcacgatgatctcaccgtcgtcttcgtcgggaacggcggcgcagtcgccgggactgaagacctatttcaaaacccccgagggaagatataagcttcaatacgagaagactcacccttccggtcttcttcattacgcccatggcaaaaccgttactcaggtaaccctggcacatctcaaggacaagcctgcgccttctaccccaaccgcttcgtcatcgtcaagtttcagtgccagcagtggggtacggtcggcggcagctcgattgctgggaggaagcaacggtagccgggcacttagttttgttggaggcaatggtggcagcaagagtaatggaggaaatactaggattggttccattggtgcttcgagtacaagtagtgcaatggcgaatccgaattttgacgggaaaggaacttacttgatcttcaatgtcggagatgcaattttcattagtgatttgaattcacaagacaaggaccccataaagtctattcacttcagtaactcgaatcctgtgtgccacgcatttgatcaggatgctaaggatgggcatgatttgctcattggtttgaactctggtgatgtctactcagtgtcattgagacagcaattacaggatgttggtaaaaagcctgtcggggccctgcattacaacagagatggttctgtcaataacagtcgttgtacttgtattgcttgggtgcctgcgccccatggtcctttcgttgtttctcatgctgatgggaatttgtacgtatatgaaaagaacaaagatggcgctggtgattcttctttcccagttgtaaaggatcaaactcagttttcggttgcccatgcacgttacagtaagagtaatcctatagcgagatggcatatatgccagggttcaattaatagtatttctttctcgatggatggggcattcttagcaactgttgggcgagatggttatttacgagtgtttgattactcaaaagaacaacttatatgtggcgggaaaagttattatggtgctttgttatgttgtgcttggagcatggatggaaaatatattttgacgggaggggaagatgatttagttcaagtttggagcatggaagatcgcaaggttgtggcatggggtgagggacataactcatgggtcagtggagttgctttcgattcatattggtcatctccaaattcaaatgacaatggagagactattatgtatcgttttggttctgttggtcaggatacacaattgcttctatgggacctggaaatggacgagattgtagtgcccttgaggcggccacctggtggatccccgacttacagtactggaagccagtcatcgcactgggacaatgttgtaccattaggtaccttgcaacctgctccgagtatgctggatgttccaaaaatctcaccgttggttgctc

SEQ ID NO: 7838 - DNA, 1675 bp, Glycine max
cggacgaaaaatggagggcaaaaatgtctgcaatcagaatcaacaaagagccgagaccatcaaccacacccatcaattccttccacacccttgagaaagaaaaaggaaatgggttctctggaagcaatcaagaagccccatgccgtgtgcgttccattccctgcacaaggccatataaacccaatgctgaaactagcaaaactccttcacttcaaaggctttcacataacctttgtcaacactgagtacaaccacaaacgccttctcaaagcgagaggccctgattcccttaatggtctctcttcatttcgttttgagaccctcgccgacgggcttccccagcctgacattgaaggcacacagcacgtgccttcgctctgtgactacaccaaaagaacttgcttgccgcacttcaggaacctcctttccaagctcaatgattccccggatgtcccttctgtgagttgtgttgtttctgatggcatcatgagcttcactttggatgctgcccaagaacttggcgtaccaaacgtcttgttttggaccaccagtgcttgtggattcatgtgctacgtacaataccagcaacttgttgaaagggaccttacaccgctcaaagatgctagttatctcacaaatgggtatttggagactagcattgattggatacccggcatcaaggaaattcgactgaaggatatccctaccttcattagaaccacagatccagatgatatcatgcttaatttcgcacgtggcgagtgcataagagctcagaaagcttctgcaataattttgaacacatttgatgccttagagcacgatatcttggaagctttctcaaccattttgccacctgtgtattccatcggccctttaaattttctcttgaatgaggtcaaggataaggacttgaatgcaatcgggtccaacttatggaaggaggagccagggtgtttggaatggctcgacacaaaagaagtcaacacagtggtttatgtgaactttggaagcgtcacggttatgacaaatgaccaattgattgagtttgcatggggacttgccgccagcaacaaaaccttcgtgtgggttataagaccagatcttgtgattggtgaaaacgctattttacctaaagagtttgtggcacaaacgaaaaatagaggcctattgtctagttggtgtccccaagagcaagtgttggctcatccagcaattggggggtttttgacacacaacggctggaattcaacgttggaaagtgtgtgtggaggtgttccaatgatatgttggcctttttttgcagagcaacataccaattgtcggttctgttgcaaggagtgggggattgggttggagattgaggatattgagaggggcaaaatagagagccttgtgagggagttgatggatggtgaaaagggtaaagagatgaaaaagaaagctttggagtggaaaagattggcaaaagtggcagcttctagtccaagtgggtactcgttggttcaatttgagaaaatgattcgtgaagttcttatagcattttgaacgggtttttccaaggatttcttaagaaaaaaaatgtttctttttaggttttttttcccattgaaacatatctatgtgataaagaaaaatttcttaaaaataaaatttatatctttggtaagaaaaa

SEQ ID NO: 7839 - DNA, 967 bp, Glycine max
cgtaagataaagtcataaatgtgaaaatgaaaagaaaaatgtgaattgagtggagtaccctagtgtccccgattatattctacttccagacaccccctgtgccgccttcccacctctcacgccgaacctctaccgttcttcaatctcgtcttactcaccttcaacgagcttcaagcattagctctgctttaccaatggctgatgactctgctaaaggaattgaaaatgcttctttgaactcaacacgactagagaaccctcagattgagcccataagactgccctcggtagaggaaatccgtggtcaagacatttggaacaattgtgcagtgcgcagtgttgtcagtggagtcatgggtggcgggcttggcatcttcatgggtttatttcttggagcactggacaacccattgatgcaggaggaaatgactggcagacaacagcttatatatcaagcaaaacagatggggcgaaggagttggagttcagccaaagcatttgctgttatgggtttcatattctcagctgccgagtgtgttgttgagaaggctcgagcaaaacatgacataacaaataccgttgttgctggatgtgcaactggaggtgcaatatcagcaaaaggtggcccaaaagcagcgtgtgctggttgtgctggctttgcggcattctcagtcgtaatagagaagtttttggagagacatcaataagggaattgacgttagcctaacacattttttgagttcttggttaagtcttttgcccatttgatgcgggacgtgattgggggagcacacatattgcagtatttattttacatcaatacgatgtcatttgcaaatgcatttctaatctggagaaaggtgatgtaatgatttgatttagtattaaataattaaaatggttgttttctttgtgcattcgtatgtctgaataattctatggtatattcataaaaaaaaaaaaaaaa

SEQ ID NO: 7840 - DNA, 1117 bp, Glycine max
gaagaaggatggttccaaatgatttggtatttcccccaatcgaccacgaaaacctcaaaattttgtcatcagaataccacgcccctctctcacctcctccacctcaaccctcacccttcgcctggattagtatccccctccacattttgcattccaagctttcatcttttcgcctgagaggcccaatttggtcatttggtcttcccgctgcggcgctcctcatgtcctgctggatcctcatcgccatcaggaagaacaagagaaccctcactcccaatgaagctcgtctcatcaacatcatcaacaacaaagatcggaaaattgccaaactcttgcaccagattgcacaaatgaatgaaatacttattgatcggcacaaagctttggctgcaaaagtgatgaaatgattgcctaaaggttgtgaatatggttggtagctggcattcacatggaacagtgatcaggagcttcactctacactgatgctgctattttattctttctattttgaaatatcactgcttacgtgtgaattttgcaatttgcttggattctgcatgtgagagttaggttgtaaactgacaaagcaactaattgtcattcttcgcacatgttcctgctacagacgagtgattgaacatgtaactcagaattggcatctcaaacctaatcaaagcaaatggctgactgatgaagcaacttttgggttatatcattaatctgcaagacaactttgacgaatgaagtcctccctccactcctcatgattcatcattcatgaatgactagttcagctggtaaccacagaatttacgcagggaagctggcagaacactctaactgtactaactgttagttaactaggttcttcgtgctcagatgtttagcacatgttgcatttgatcaagtccttatgttaacttaattacttccacccaaaaaaaaaaaaaaaaggatttacggcacatcctcttcaaaagcttagtcaacaatgacaagtctggactcaaaaaacaaatgatgacgaaattatacaatgtaacgaggaaaagtgtcatggccacttaagttttaaccaagccataataactatgcaataatgtaattatttgtttgt

SEQ ID NO: 7841 - DNA, 2030 bp, Glycine max
ccacgattgacacaacacgaaacacacacatgacacagcaacaacagcatagccacaacacaaccaaatgacacccacaaaggaggagagaaagagagacgctactactactactactactactacttccccctctctcgcacagccctgaagctccagaaccccgttttggaattaattcgcttctctttaatctaaattcgttgattctttccgttgacatgttggagggtccaacctttcttgtttcgagggacttaccgagctcatgtgagcaagagaccaggtggatttacaattccttctgtgtgatggagctcgcgagcaataagcgtcaactggaactagaggaagaagctgtgctgacaaagtcatgcaagctttcagatgctccagaggaaggagaaacgaagatgaacttccaaaatctttccctatcagtcaaccaagcaaatgatcaaaaccattcaagtgatcagtctgactcaagttcacttatcttccaacttggtcgggacatctcaattaattgtctcctacgatgctcaaggtctgactatggttcgattgcctcattgaaccaaagttttcgatctcttgtccgaactggagagctttataggctgaggcgacagatgggtatcatagagcattgggtttacttctcttgtaatctccctgaatgggaggcattcgatccaaacacccgtcgatggatgcgcttgcctagaatgccctctaatgaatgctttatctgttcagataaggagtccttggctgttggtacggagcttcttgtctttggaaaggaaataatgtctcctgtcatatacagatatagcattttaatgaatgcatggtcatctggtatggaaatgaacattcctagatgcttgttcggttctgccagccttggagaaattgccatattagctggtggttgtgatcctcgtggaaacatcttgagctcagctgagctttataactcagaaactggaacgtgggagcttctcccaaacatgaataaagcaaggaaaatgtgttctggtgtatttatagatgggaaattttatgtcattggcgggattggagtaggtaattcaaagcagctaacatgtggtgaggagtttgatctgcagacaagaaaatggcaaaaaatacctaacatgttccctgggcgaaatggaggaactgaggcgactgaggtatcatctgctgctgaggcacctcctttggttgcagttgtaaataatgtattgtattctgcagattatgcccaacaagaggtaaggagatatgataaagacaataatttgtggttcactattggaagattacctgaccgaatagtttcaatgaatggctggggattagcttttcgcgcatgtggaaatcgcctaattgttattggtgggccaagagctttagatggaagggtaattgaaatcaatgcttgtgtcccaggtgaaggtgtgccagagtggaacctgcttgctagcaggcaatcggggagctttgtgtataactgtgcagtgatgggatgctgaggcatttgcttttggtgaatagtgctatatggatttattctgaatggaaattaacattcttcaatttcaaggagagatgattctggctcttgggtaatcagcccaccttttggggtaaatgtttagtcctatttagagtaacagatacagttttagaaggttcacaaaactgagtcttttcattttaagttatcatgatggtttttcaaatgttgacaccatgactggtgaataattagctcttggtacatgttggggttgcaatcacctttttcataagttcaattgaagtgttgcagaattgtaactggtctcagtttttgtctttttttttttttttgctttctgttacccctttttaaatatgtattctaattgtcttcagatcttcccaaaccctgtttgtgttgcctgttattccccttttcctccctaagttgcagaaaaaaatgagacataaggaataaccttttcttttttcat

SEQ ID NO: 7842 - DNA, 1198 bp, Glycine max
tcagctacgtaggcccccccccccccgaaaggaaataatgtctcctgtcatatacagatatagcattttgatgaatgcgtggtcatctggtatgataatgaatgttcctagatgcttgtttggttctgccagccttggagaagttgccatattagccggaggttgtgacccacgtggcaacatcttgagctcagctgagctttataactcagaaactggaacgtgggagcttctcccaaacatgaataaagcaaggaaaatgtgttctggtgtatttatagatgggaaattttatgtcattggtgggattggagtaggtaactcaaagcagctaacatgtggtgaggagtttgatctgcagacaagaaaatggcgagaaatacccaacatgttccccaggcgacatggaggaactgaggcgactgaggtatcggctgctgccgaggcacctcctttggttgcagttgtaaataatgtattgtattctgcagattatgcccaacaagaggtaaggagatatgataaagacaataatttgtgggtcactattggaagattacctgaccgaatagtctcaatgaatggctgggggttagcctttcgtgcatgtggaaatcgcctaattgttattggtgggccaagagctttagatggaagggtaattgagatcaatgcttgtgtcccaggtgaaggtgtgccagagtggaacctgcttgctagcaggcaatcagggagctttgtgtataactgtgcagtgatgggatgctgaggcatttgcttttggtgaatagtgctatatggatttattctgaatggaattaacattcttcactttcaaggagagatgattctggctcttgggtaatcagcccacctttgggggtaaatatttactcctatttagagtaacagatacagttttagaaggttcacaaaactgagtcttttcattttaagttatcatgatggtttttcaaatgttggcacagtgacaggtgaataattagctcatgttgggttgcaatcacctttttcataagttcaattgaagtgttgcagaattgtaactggtctcaatttttgtcttctttgctttctgttgcgcccccttttttaaatatgtattctaatcgtcttcagatcttcccaaaccctgttggtgttgccttgccttttctttttcctgtcttttatggca

SEQ ID NO: 7843 - DNA, 1304 bp, Glycine max
tcagctacgtaggccccccccccatacattaccgtttttttccccttcttattcgtcgttcagttcaatttctcgcgagtttttcttccatatgctaccaatcgttgccgttgatccacgcgccggcgaatttcagttttgattctccgccaccgttttggctgttgttactttggttcttccgagagaagggagccatatatagaaagtattttatggtgcgccgatgagcagaactgatgttattggcagtagaaggaggaggattcttctctgcttcggcttcagggtatactaagggcctgagccttctcctcttgggtcagaggaatgaggataaacccatgagagtagcgccgtggaaccagtatcagttggtagaccaagaatctgaccctgagctccagctggcttccacaaagaatcgcctctcccgcggctgtgcctcctttgtttgctttggtcgcacttccgcaggacttgatactccgtctcctcttaaagtgggccctgctcaacaacatgatgtctcaccagggccactggtttccaacaagggaaaggatccttctgcacatgtagatgatgaaagtgataacagaaaggctacactaaaaagtagcataaagaagccacaaaatagaaaatccgttcctgttgaggttgctaatgaacatgaagcatcaagtggacaggggatttgtactcctggaggtcaacccgaaagaaggaaagtgcagtggacagataattgtggtagtgagcttgtggaaattcgagaatttgagcccagtgaagtggatggatcagatgatgaatttgatagtggaaatgacagaacttgttcctgtgcgattatgtaaattggagtttcattaagttgataggttcatcgggtcattcactgctaacatccatcactcgatttgagacaaaagaggcaaaggtttcagttctgtggagatatatacacaaacatcttgcctgagtgatgtgtctgttattgcttgctgcggctttaaattttgctcctctgcccctcatcaatttgtataattcttgtcatgtgtgaattctttgcctttgattcatcatttttatgctactttatgttcttatttttataaggattaacaaagttttctttctatgatctggcattatcttgaaaaaaggtaatacaagtgtaagattttgtaaaaaaatcagtgtgccaacctggtaacaaacttgtgatgagactaggatttgttaaggcttatctgttgaaagtataaaaaaaaaagaaaaaaaaaaaaaaaaaa

SEQ ID NO: 7844 - DNA, 2007 bp, Glycine max
ccctcttgtccgcccacgcgtccgccctcccgggcacgaacacgttccagaaacagtaagagccaaggagaaaagaaaaaaaaaaagaactggactccttcaattagtgcattgtttcttttcttcaaatggtagcaagaagacattgttaatttgagagatggcgagttacgaggctattaagaactttgatgatgatgatgatgatgatgatgatgtggagatggcactcccccatagccagatctctgaatcaagatctgccactgtttcttcccccattggccaaactaccccgcttcacattcacaacattattgaggaacaacgcattatctccaggcaccaacctcaacccaaatctccgcgtctggtttctcttgatgtttttcgtggtctcaccgtcgcgctgatgatacttgttgatgatgctggcggactcattcctgcgctcaaccattccccatggaatggtttaacactagctgattatgtcatgccatttttcctatttattgttggtgtttcgcttgcactctcatacaagaaactgtcttgtggagttgatgcatctagaaaagcaagtttacgggctctaaaacttcttgcgttaggccttttccttcaaggaggttatttccatcgcgtgaatgatctgacatttggagtggatataaaacagataagatggatgggaatactacagagaattgcagtagcatatttggttgtcgcactgtgtgaaatttggctcaagagtgatgatactgttaattcaggaccatccctattaaggaagtatcgataccagtgggctgtggctttgattctttctttcctttatctttgcttgctatatggattgtacgttccagattgggtgtatcaaattcaaacagaaccttctgcagagccaaagacattttcagttaaatgtggagtaaggggtaacactggtccagcctgcaatgtggttggaatgattgatcgaatgatattgggtatacaacacctgtacaagagaccaatatatgcgcggatgcctgaatgcagtattaattctcccaactatggaccattacctcctgatgctcctgcttggtgtcaggccccttttgatcctgaaggactcctaagttcagtgatggctattgtcacctgcttgattgggttgcactatggacatattattgtccattttaaggaccacagagtgagaatcatatactggatgatcccaacctcttgtcttttagtttttggccttgcgttggacttatttggaatgcatataaataaggttctctactcgctcagttacacatgtgtcactgctggtgctgcaggcgtcctctttgtcggaatatacttgatggttgatgtctgtggatgtcgtcgcatgactttggttatggaatggatgggcatgcatgcattaatgatttatatccttgctgcttgcaatgttttcccaattttccttcaaggattttattggggaagtcctcacaataacattctcaagttaattggagttggcacttgaagaaaggcacataaacatgctattggataaaagattatatgcagtaagactgtgaacatgttttactgtaaaagaaatggctacccgagtttttggagctaatcttttgatcaagaacaagaacgggtgtagcatattcttctaatctcttgatgacgtcacctgcatggatgatggatatagtttagagttcactacatctcttgatggcattaccttttctatatatggagcagcgtttgtttataatagcaccactgcgatataatttgtacttttactttatatccttgaaatgatagatttcaagagagtaagcatcattggacacgatacgatattaatgtaaaatttagttttatattttatttattgttactattagcctagaaatgtcaatttcttctgcatgagctggttctctattattggatctagtaaaactttgtttaatcatgcca

SEQ ID NO: 7845 - DNA, 1466 bp, Glycine max
ttttttttttttttttttttttttttttacaccattaaagacatacattgtccccaagattatggtggatgcataacacgagaaactaaaggataagtattaaaaatgaaggaaataactcaaatcagaaattattaactattgtggttttttttcaaccagatttaggtaaacaaccaaaactgaaaataagaacatgggatacagacttaaagagactatctagagcatctctcttctgttattacaatccataaaatcaagacaagcaaagtaatcttgacaaacctaacataaagtgcaaagccaggcagatgtcacgattcagaaatcaccttttgtgcgccttaacgaatttggaattcttagcatcttcctcggtaaggccaagggaaagtttggtgattagagctccggtgactgcgaatccaacgaggaagggccagttgcgtttccactcgcgcttgaagaaaacgggccatggatcgaactttcgcatttttcttctctcttctttaacgctgctaatgaaatgccttcgttctgcagctgccaaagccctttgtgtctctacctctgcatcgtcccacgtggcagctgagttgagatatcaagcagaagaagcactctggttctgaggcgcaacctcgtcccaacaaccatggcggtccctgctacatcctcagcccctgtccttcgacccatccgcaccaatcactccttctcttcccctttccgctctctcccctctcccgccgccagaaaacccctaaccgtcttcgccatggcccccaaaaagaaggtgaacaagtacaatgataagtggaagaaggagtggtttggagcggggatattctacgagggaagcgaggaggtggaggtggacgtgttcaagaagatagagaagaggaaggttttgagcaacgtggagaaagctggcttgctctccaaggcagaggacttgggattcacgctctcttccatagagaagctcggcgtcttctccaaagccgaggagctcggcttgctcagcttgctcgaccgagccgccagcttctccccctccctcctcgcctccgccgccctccccgccttcgtcgctgccattgccgccattgtgctcattcccgacgactctgccaccctcgtcgccgtccaggctgttgttgctgccgcgctcggcgtcggagccgtcgggcttttcgttggctccgtcgtgctcggcggcttgcaagaggctgattgattgaatggtgtgggaatggtatgtggatgaattcatcttagattttttttttttgtctttgtagttgtagaattgaggaggagagattatggcagtttcttttggtgtaaaaaaattgtaataaaaaaaatgaaatgacaataattgactggaaatggttgcatacaacagcagaatgtagtagtgtctctgtctcttgtgaatgaattgctgttttctg

SEQ ID NO: 7846 - DNA, 2519 bp, Glycine max
gcaagcccgcgtacgtaaacttggatcctttaaaacggcccccattatttttttttttttattttcttttctcccctttttattttctcttttttttttcctctttctttttcttttttttttttttttttttttttaactcaaatcagaaattattaactattgtggttttttttcaaccagatttaggtaaacaaccaaaactgaaaataagaacatgggatacagacttaaagagactatctagagcatctctcttctgttattacaatccataaaatcaagacaagcaaagtaatcttgacaaacctaacataaagtgcaaagccaggcagatgtcacgattcagaaatcaccttttgtgcgccttaacgaatttggaattcttagcatcttcctcggtaaggccaagggaaagtttggtgattagagctccggtgactgcgaatccaacgaggaagggccagttgcgtttccactcgcgcttgaagaaaacgggccatggatcgaactttcgcatttttcttctctcttctttaacgctgctaatgaaatgccttcgccctccggcgtcttcgtccccccgccccgtgtttttttttttttttttttttttttgggaaagaacaaataaattacactaattgaacgtgcaattcacaaaatggtacgacaaccttgacataaatccttaatccatcacgaatggaatatctattacaagatttgctgcgtggattttaatttttagattgcctcttgttcttgcagtctcaagctacagtctgcccacacaaaatgaaaccttgaattaggcattgagcagcgtgagtttgatctggtgctccagacacaatcaccagaccctcagtggctccaggttttgaatcatgaacagccacgtttgcaccagacgtctgtcgaatctgagttaggttgctattgttctccccatacacgtgagttaaatacatatatgggatggtgatctcaatagttaagctatttggattctgcaatggatttccgttctttacaggggtctcatttctagaggtcaaactagaagtatcagctgttcctcctggatttcctctgtcaacagccagaggattccacgatcttggagaatttggtccttcataaccacgaggatagggaactcgatccatgtttggtggaccacgtcccataccatgtacaaatgcatgctgctgatggtcaacaggcatggggggaacagttgaatggtcatgagggtgcccaacttgaggaggaggagggtggccagaggacatcaagtgatttcttggcctaaataaaggaggtggcatttctggaaatggtggaaaatgtggtggtgcactaaaatttggaggagtccttattgggaaaatggtttcccgaattctgttggttatgtgaaacaaagcatcttgtacagattgcaagctcccaataacctgtacaacttcttcattttgggaaatgtatttaatctgttcctttgaaaaaatgcgaatactagcacctgtggcccttcgcatttcagatataacaagacctcccttgcccaagaggcagcccacctgtggtgaacgcacaagaagcttagcaacaactgcagcacttggttcaaatccaatctctgtgagtcgacaatgaacacggatgacagcttcttgtgcaggagaatgtttttgcgctcgcgggcgcgggcgcgggggtgacaacaacacgctcatccgaatcaggtccggcctccacaatttggatacatgcaccagtttcgttctggagagcccgcactacagaaccacctttgccaataaggctaccaactttatcatggcgacacaagagcttgaagacaacctcctcttccacaaacatcctatgagaagaatgtccagcactttcagaataagcccctctggaatgatgatcaggaggagcatatgaacctcctccagaaggcttaaaggcaccataattgttctcatgaagacaagctgaaacagatagaaccgctttctttactgcgccaaagtttccagttatctggatgaattcgtctccgggaggaggaggaggttgatctttgggcaaaaccctaatgtgggccccagagtcttgccggatcttttcgacgatcttgcctccacggccgagaacacatccaacctgatagctgggggccaccaatttacacgacactgtcgaattcttagtttcttcatccatcgttctctccaaaaccctaatcaacgcaacctgcgcagcagactcgtcgcccacgataacaaccacgcgctcctccgcgccgaccaagtcctccaccagaatcttagctccgtcgccgccgatagccgctacgtccgccgtctttgcagccggacacactattcggaaaacggcgtcgggtgccgcgggcggagcatggcggcgcttcttgctattgttgttggacatgatgacatcacatcaaacaacttcacttcctcatcttttgttctgtt

SEQ ID NO: 7847 - DNA, 567 bp, Glycine max
tttttttttttttttacaccattaaagacatcgattttcctcaagattatgctggatgcataacacgagaaactcaaggataagtattaacaatgaaggaaataactttttaaatcagaaattactaacttattgtggattctctcaaccagatttaggtaaacaacctccaaaactgaaaataagaacatgggatacagacttggagagactatctagagcatctctcttctgttattacaatccataaaatcaagtcaagcaaagtaatcttgacaaacctaacataaaatgcaaagccaggcagatgtcacgattcagaagtcaccttttgtgcgccttaacgaatttggaattcttagcctcttcctcggtaaggccaagggaaagtttggtgattagagctccggtgactgcgaatccaacgaggaagggccagttgcgtttccactcgcgcttgaagaaaacgggccatggatcgaactttcgcatttttcttctctctttttttaacgctgctaatgtctcgtcttcgttctttgtagttgctggcacgaggcctcgtgc

SEQ ID NO: 7848 - DNA, 999 bp, Glycine max
aaaaacccaccacgattattattattctcacagaaaatgtccttcgagtctctctcttgatcgtcccacgtggcagttgagttgagatatcaagcagaagcagaagaagaagaagaagcactctggttcttctgaggcacaacctcgttccaacagccatggcggttcctgcaacatcctcagcccctgtccttcgacccatccccaccaaccgttccttctcttccccattccgttcactccccactcccaccacccgaaaacccctaaccgtcttcgccatggcccctaagaagaaggtgaacaagtacaacgaaaactggaaaaaggagtggtttggcgcggggatattctacgaggggagcgaggaagtggaggtggacgtgttcaagaagctggagaagaggaaggttttgagcaacgtggagaaagcaggcttgctctccaaggcagaacaattaggattctcgctctcttccatagagaagctcggcgtcttctccaaagccgaagagctcggcttgctcagcttgctcgaccgagccgccagcttctccccctccgtcctcgcctccgccgccatccccgccttcgtcgccgcaatcgccgccgttgtcatcattcccgatgactccgccgcgctcgtcgccgtccaggctgttgttgccgccgcactcggcgtcggcgccgtcggtctgttcgttggctccgtcgtgctcggcggattgcaggaggcggattgattgattgattgattgattgaatgatgtgggaatggtatgtggatgaattaattttagaattttttttttttttttgtctttgtagttgtagaattgaggagagattatggctgtttcttttggtgtaaaaaattgtaataaaaaaatgaaaatgacaataattgactggaaatgggtgcatacaacaaaatgtagtgtctctgtctcttctgaatgaatgaattgctgttttctgcctaaaaaaaaaaaaaaaaaa

SEQ ID NO: 7849 - DNA, 1294 bp, Glycine max
aagattatatataatacacaatggccctgcctgcaaatccctgctttcctttttttttaatttgaatacttcttatgcaactatagtgaggctaagagattggtccataattaatcaaaatgttggctatattccacaaagcttttgctcatccacctgaagagctcaacagccctgcatcttacaaaggttccaagaagcctaaggttcccgaggaaactctcaaagatttcctttcccaccatcctcacaacacttgctctatgagctttggtgatgctgctgttctagcttatgtccgtcctgatcaatctttctctcgtcatcaaaggctgttttgtgggatcgatgacatatattgtctcttcttggggagcttgaacaacttgtccctactcaacaagcaatatggattgtcaaagagtactgatgaggccatgtttgttattgaagcttacaagacactccgtgaccggggtccataccctgcagatcaagttgtcaaggagcttgatggcagttttgcctttgttgtctatgacagcaaggttggcagtgtctttgcagcactgggttctgatggaggagtgaagctgtattggggtattgcagctgatggatctgtggtgatctctgatgatctagaagtcataaaagagggttgtgccaaatcctttgctccctttccaacagggtgtatgtttcacagtgaaggaggtctgatgagctttgagcatccaatgaacaagttgaaggcaatgccaagagtggacagtgaaggggccatgtgtggggccaacttcaaagttgataagttcgccagagtcaacagcattcctcgagtgggaagtcaatccaattggatggaatgggaccaacattagcttaaaaataaagccttaggataatgtaaaataaaaaaaaaaatgtcatctatgtatgctcctttcctaacttacccttctgaatttgttttgttttctgcttgcttgtgttgttttcctgtttccctttccggcatagtacattgaagtgctttttcagacatgttaatccgttgatcatggtgcttgtgagtgagagagattagcacggttcaagtcaagaactcgtgtgttgcagtgttttatacctgaagaaggggtcctacgttatacatgaattaagatgcactaagtaggtcatcggaattgtaatgtaaaatggatgacataatgtacaaaatggaaataaaagggatgaacaagaacaaattgcatgtttggatttactttggtgatccatgttttcatac

SEQ ID NO: 7850 - DNA, 953 bp, Glycine max
aagacgacagaaggggataacaatccctattaaaatcttctaaaattaaattaccatatatagtcacattttctttacactttgtgaggtctaaaatgttgtccatttttcacaaggggtttgctcacccacctgaagagcttaaaagccctgcatctaacagtggctccaacaagcctaagattcctgaggaaactctaagagaatttctttctcatcatccccataacactttttctctgagttttggtcactctgctgttctagcttatactcgtcctgatccaccttcctttgttcatcaaaggttgttttgtgggattgatgacatatactgtatctttttggggagcttgaacaatttgtgctcactcaacaagcagtatggtttggcaaagggcaccaacgaagccatgtttgtgattgaagcttacaagacactccgtgaccgtggtccataccctgcagatcaagttgtgaaggatcttgatggcagctttggctttgttgtctatgacagcaaggttggcagtgtctttgcagcactgggttctgatggtggaattaagctgtattggggtattgcagctgatgaatctgtggtaatctcggatgatctagatgtcatgaaagaggggtgcgccaaatcctttgctccctttccaccagggtgtatgtttcacagtgaaggaggattgatgagctttgagcatccaatgaacaagttgaaagcaatgcctagaatagacagtgaaggggccatatgtggagccaacttcaaggttgacaagtacgcaagggtcaacagcatacctcgagtaggaagccaggctaattggatggaatggacccagcattagcccaaaaaataaaatagtttaaatgtggatttagtttttataaatataataaatttttgttttactttctaaaaaaaaaaaaaaaatttataa

SEQ ID NO: 7851 - DNA, 513 bp, Glycine max
cccacgcgtccgacggctgcgagaagacgacagaagttcgctcgcgttcacaacacaaaccctagaagccaacatttttcaggagcgagtgcgagcagaggtagtggagtgcggatgtgtaattgaattgccagaattaaaagtgttcattcagttatttctttgattcttgctttcattttggaccgtgctgctcatcatcacaggatctttcaggaataatttggagacgtattttaatgaagttagatcattggaagcagttagattcaaggcgctttgcatccagtgggcacagtattatctaaaatttagaaatcaaacataggatgttagacaactatgtaactttaggttacttaattagtttacatactttgcattacattttttacaattgttgtttcattttaacattgaataacctttgttgatagctagttttttgctaaaacttatttgaaagcataatgcaaatgatatatgttgtgtgccaaaaaaaaaaaaaaaaac

SEQ ID NO: 7852 - DNA, 1482 bp, Glycine max
  misc_feature (71)..(71): n is a, c, g, or t
tcagctacgtaggccccccccccccggaatagagccacacatagggcgaagaggtgtcagcgggaagaggngccacgtgtaggattttgccctcgctcattgcacttcccagtgagtgacttgcctctctgtctcacacctccttttttccccgatgctaactctacaagcttcgtctcgtaaagaaaattcgaaagctcaatagagagaactcaattgaatcatcaaatgaggacagtgatttcgcgcttgatccattccacgccttccatttccaggctcaatgccacggtagtgtcaatcagcgggagaaatctctgcacagattctaacaaagttgatgggccattcaaagttgaagaagcagagactgtaaatgtgcctccactcccaacagaaaagttgcttgtgttgggagggaatgggtttgttggatcacacatttgtagagaagccttagaccgtgatttgtctgttgcgagtcttagcaggtctggtaggtcatccctgcatgattcctgggctaccaatgttgcttggtataaagggaatctcctttcaactgattcattgaaagaagctctgaatggggtcactgctgttatctcatgtgttggtggttttggctccaactcttacatgtacaaaattaatgggactgctaacatcaatgcaattagagcagcttcagatcaaggtgttaaaagatttgtctatatctctgcagctgactttggtgtagtaaattacttactgcgggggtattatgaaggaaagagagcttctgaaacagagctcctgaccagattcccatatggaggagtaattctgaggccaggatttatttatggtactcgaagtgttgggagtatgaagataccccttggtgtaattggatctccattggaaatggttctccaagttgctaaaccattgaaccagatcccacttgttgggcctctattgacacctcctgtcaatgttactgcggtggcaaaagttgctgttagagctgctactgatcctgtttttcccccggggatcattgatgcttatggaatacaacgttacagtcagcataaatcaaactagaaaattatctatattttgttttctgggtaaatctaatatggggcgatttgcctctgaatatctgtgttttagtattgttaaactgagaatatttcttcattccatatccttgagagaataaaatctgaaagtgcgagcatgtagccatagatctacctttccaattttttaacttcaatacatcagaatctttttggctgatttctttcgccttatgtaattaaccacttaggtgggttccaatgctcgttgtgtaattgatttcttttgaaagatggagagagattgtgaacaatggtttcgtgaaaaaacgtgcttttcaaagcaaataatataattccattcgagttaaaaaaaaaaaaaaaaaaaaaaaaaaaaaaaaaaaaaaaa

SEQ ID NO: 7853 - DNA, 1475 bp, Glycine max
  misc_feature (263)..(263): n is a, c, g, or t
agagtttgtgtcttatttttatcaatttcatccgaattactagaattgcacccccattcttttgagtccaaattccatcaacttttgctggctaggttcgctcgaaattcttgaggccttcttaaacacgggattagttttatatatagcaatactatttatttataacgtctatttactcattgttttgaaagagatttttattcttccactatgtttttgggtgccccagaaaaaaattctgggtgctcctagtaacaccnggaactagaatgtttgaacagaattggttgcgcctggtgcccattccaagtttgttcctgtattctgggcgaatgcgaaggctcatgtcacgcggctattagaataaagtcacttcccagttacttgactctctctctattcttttccgccgttcctaaccctacaagcttcgtctcgtaaagaaaatgaggacagtgctttcgcgcttgatccattccacgccttccatttccaggatcaatgccacggtagtgtcaatcagcgggagaaatctctgcacagattctaacaaagttcatgaaccctttaaagttgaagaagcagagactgtaaatgtgccgccacccccaacggaaaagttggttgtgcttggaggcaatccgtttgttggacttggatcacttggatcacacattttgttagaagccctacatcgtggcaagtgtgctgggagtcctaccaggtctggtaggccatccctgcatgattcctgggctatggaatttgcttggcatttggggaatctcttttcaactgcttcattgagaaaacatctgaatggggccactgctgttatctcatttatgggtggttttggctccaacatcaaagctattagagcagcttcagatcaaggtgttaaaagatttgtctatatctctactgctgactttggtgtagtaaattacttactgcagggctgtaatataggaaagagagctgctgaaacagagcttctgaccagatttccatttggaggagtaattctgaggccaggattaatttatgggactccaattgctgcagttccattgcaaatggttctccgagttgctaaacaatcgaaccatatcccacttgttgggcctccgttgacacctcctgatgcggtggcaaaagttgctgttacagctgctactgctactgatcctgtatttcccccggggatcattgacgccaatggaatacaacgtttactgtcagaataaatcaaaactagaattatctttcttttgttttctgggtaaatctaatttggggctatttgcttctgaatatctttgttttactattattgttaaactgagaatatttctccataccaaatccttgaaagaataaaatctgaaagtgcgtgcgtgcatgtagccataaaaaaaaaaaaaaaaacctctctctctatctctctctcactctaatgaaatccccgc

SEQ ID NO: 7854 - DNA, 1094 bp, Glycine max
gcaattttggagtgagagcaggagaggacttcaaaccttggagcatgaagggggaggaggacgacaaaaaggatgtgtttgatttcaaagaggatgtggggcatgaagggaacttcactgctttggatattaatcctaaagtcgatgttgaacagcttgagaaggaagaacaagctctcactgctgttgtcaaaggcccaaaacgtgcatttggtgatttgattgctgcttctggaatcacggatgagatgcttgacagtttgattgcgttgaaagactttgatggggttcatgggttgccccctcttagtgtaattgaagacatgaggtatgagaagaatactagaaaatccactagaggtgaaatggagcgtctgaagcaagaggaagctgctaaagctagagtgaagcaggttgatgataaaggacgtgcttatggaacaggaagaagaaaatgcagtgttgcccgtgtctgggttcagcctggtaatggtcaatttactgttaatgataaagagtttgatgtctattttccaatgcttgagcatcgtgctactctccttcgacctttctccgagacaaagactttggggctctgggatgtcgattgtactgtgaaaggaggtggtgtgtcagggcaagttggagctatacgattggggatcagcaaggctttgcaaaactgggaaccagatttgcggcctgcacttagaaatgctggtttcctgacaagggactcacgagtggtagaaaggaaaaagccaggaaaggccaaagcaagaaaaagtttccaatgggtcaagcgttgatactacgagcatcctttttctggacagccatttttgtatggaatattaggatttctcaataacatcttgaaatttgtctgtcttgtactgcatcacctgtgatgtaatcaacatttgaatttcaatgactcaactgtagaattttttgttcacggatgttaggaatcattcactctttggagagagctcccgattgctattttccccttatccttcccattgcataatgaatgttgtattaaaactttagttggttattgtagggagatctgtgtggaatgttat

SEQ ID NO: 7855 - DNA, 2045 bp, Glycine max
  misc_feature (1752)..(1752): n is a, c, g, or t
tccactttcccacctaacgttggattcatctaaaggttgatgaagaagtgggtggatgaggccgagtaactcttgatgatgcgcaaggcaagctgtagtgtggaccaagtcattcaagtttgggagtgattgcggaaatatcggtgtacctgtgtctgacccatacattgcaattattgtactcgtcatgataaaacaccaccaccagagtacttagtcgagtcagctacgtacgccccccccccacttttggaagcaaagacagacactagctattcgaatttgagttctcccaaataactaggatgatttggatagcactttttttagtttcactggcttttctgcggttatggagaagcaataagaatgcaaagaaattaccacctggtccaaaagggttgccaattttgggaagccttcacaagttgggaccaaatcctcatcgtgacctgcacaaactagcccaaaaatatggacctgtcatgcacttacgtttaggttttgtgccgaccatagttgtttcttcacccaaatctgctgaattgttcctcaagacccatgaccttgtctttgctagtagaccacgtttcgtggcggatcaatacatctcttgggggcagaggaacttaggctttgctgaatatggttcttattggcgcaacatgcgcaagatgtgcacattggaattgctaagccaatccaaaattaactccttcagacgcatgagggaagaggagcttgaccttttgatcaagcttgtaagagaggcagccaatgatggagctgctgttgatctcagtgtcaaggttgcaacactcattgcagacatgtcttgtagaatgattttaggaaagaagtacatggaccaggacatgtgtgggagagggttcaaggctgtgattcaagaagcaatgcgtttattagcaactcctaacgtaggagattacattccttacattggtgcaattgaccttcaaggcctaacgaagcgcttcaaggtactttacgaaatcttcgatgacttcttcgagaaagttattgatgagcacatggaatcagagaagggagaagacaagaccaaggattttgtggatgtcatgttgggctttttaggtactgaagaatctgaataccgcattgaacggtccaatatcaaagctatattgctggataggttggctggttcaatggatacttcagctacagcaattgagtggacactttcagagctactaaaaaatccaagggtgatgaagaaactccaaatggaattggaaactgtggtgggtatgaagaggaaggtgggggaatcggacctggacaagttgaagtatttggagatggttgtaaaggaaagcatgaggctccatccagtggtaccattgctaataccacaccaatccacggaagattgcatagtcggagattttttcatacccaaaaaatcaagggtcataataaatgcatgggcaattatgagagacccaagtgcatgggttgaggcagagaagttctggccagagagatttgaaggaagcaacatagatgtgagagggcgtgacttcgagctgataccatttgggtctggcagaagggcctgtccaggattgcaattgggcctaataacggttcgtcaaacagtggcccaacttgtgcattgctttgattggaagctgcccaataacatgtttccagatgatttggacatgacagaggcgttcggcctcacaatgcccagggccaatcatnctgcatgccattcctacgtatcggctttccaattaaagggattattagggaaaggaaaattatgcatgtacaacatgtagacattcagataacgagttttaatggagtatttgtgtactttaagtgttgtccaaatataatttggtgaaacagtttcatggtatgtgtttaggttgatttcagtaagatttattagaaaataaattacctttttccttcctcaaaattaatgttgtgtttggttgaaatgatggggaaaaatggaaataaaagaaaaatattagaattagagt

SEQ ID NO: 7856 - DNA, 1936 bp, Glycine max
tgtcgtccggtttctggctcctgtggaaacttataaggaccgtattgcatctgcacttgaaacacttagaccaacaacttcatgggagagaaccacgacagcaggtcaagggctggatggtgttctgataggtgggcgtggttttgggatggcaatggaagctctctgcaattaccttggttctgaatatgggaacacttttgctttagctagagtctttgccttcttgtctggtccccctgattatggagctggacaattggacacgagacgatatggtgaacaatatgcaagcaaaggagaggatgcagatcgtgctttactcccggagcagacacccttttataaagatctggctgctgttgctgttcaagcaggtgtatgtgttgacatattcgccgtaacaaatgagtacactgatttggcatccctaaaatttctgagtattgaaaggtgggggttccttatttttatacacaagtactgaggattcaacattgcctcaggacatgtatcggatgctgagtcgaccgtatgcttttggttgtgtcctgcggttaagaacctcgactgaatttaaacctggcaattcttatggtcacttctttccagatccacagtatgaaaatgttcaacacatcatatgttgtgattcttatgctacatatgcttacgactttgtgtttgagaacaacgttggattttcaagaactaaatcagatgttcctacaattcagattgcatttcagtactcagttgtagttcctcctcaggaactttctgattctaattcaggaggggtttctacaaatagaaccaagcactcccttcagcgtcggctaaggatccgaacattgcaatttggtgttgctcagaacattcatgaactttatgatagctgtgatcccgaagttgttctatctttgcttgttcacaaggttatattagcctctttggaggaaggagttagggagggtagaattttgcttcaagaatggctagtgatcctgacagctcagtacaatgatgcatataagcttattcagtatgataatggaagttccataagatctcagattgatgttgcattctctcaatgtcctcaattgcagcccctaccacgcctaatttttgctctccttcgaaatcctcttctccgctttcatgaagagggtgttcatcctgaccatcgcatctatcttcaatgccttttcagcatgttggaacccagttcccttcatcgtgctgtgtatcccgtgttgacatcatatgctactccagataaacaagcatatcctcgccattctttgagccgtgcagcactgattaccagtggcagtccgatatttttccttgatgcattcacaattctgatagtgttttattcttcgacagcagacccgacgcttccttttcctccaccccatgattgtttgttaaggactacaatcaacaaattgaagcaggagagatgcatcactcccaagctgatttttattcgaggagggcatgatgatgcctcaatttttgagaactttctgatcgaagagcaggatgttgatggaagtggtcttaccagtgttatgggttttgtttccttccttgaagatactacacagaaagttttagaattcatgaaatagggatcccttttgggtactatgtctacttacagatacaggagttatatacattataggtacttccattttgtaaggatgagttctagttcgtttagaaccaaccatggagtcaagctggtggttggttgcctttgttgtacctgttttatatcatttataccctttttttgaagtgctagttaatgtacgttataacactctatttattgacactggctgatcttctagatttacgttaatggagaaatggattatattaatgaccaataaaaaaaaaagaaatggattatatt

SEQ ID NO: 7857 - DNA, 1001 bp, Glycine max
cgattgcattctctgcgaaggcaaattcaacgccgcgaagcctcttaacatcgcgcgctcccaccgcgatacactctccatgtctcagctttttcttaagaacttcaccttcggctgcgcccacactgcgctcgccgaacccaccggcgtcgcaggtttcggtcggggattactgtccctccctgcgcaacttgcgaccttatctccgaacctcggtaaccgtttctcttattgcttggtctctcactctttcgacaaagaacgagttcgcaaaccgagtccactcattctcggccactacgatgattattccagcgagcgtgttgagtttgtttacacctccatgcttcggaatccgaagcattcttatttctactgcgtcggactcatactcggacacgtgttatgatctcagcggctacgaggtcttttctattcccaagatagatttttccttcgccggcggcgtcacggtgcagcttccgccgcaagggatactctacgtggccagtgccaagcaagtttgcttggcttttgctgcaaatggtgacgatagtgatgttactatatatgggaacgtgcagcagaaaacaatagaggttgtgtatgatgttggtggtggaagaattgggtttggtgctggtggctgcaagtgattaagattaaacatatgctttgggctagttagagaaaaatcaatcttaattggctctaggctttcataattattgttgttccttttattgcaaagtgtacgtaacagtggcaatagaaaaaaaaggaaaacaaaaatgtgggaattaaatataatataatttgtagcatgaagaagaatggaggggtgaatatatgactctcaagccgtgcgattgcttgcaattgtacatatgtaaggtggaaaaaaaaatgtaaacttgtccttgttattaattaaatgtttgttgaataaagcgaaattaaaggtcttgctttgggttaaaaaaactcgagactagttctct

SEQ ID NO: 7858 - DNA, 1856 bp, Glycine max
ggctcgagagcatcccgacagagtgagttgtatagctaggcttagctatttcttacctcttggcatggccattcaaatgtcttcttttgtctttgtttctcttacaattttattttgcttctcttccttggagaagagttttgcctttcaaacaacaaaggaggacacagaaagcaacaatcttcatcaatatactcatcttgttcacctcagctcactccttccttcatcttcctgcagctcttctgccaaaggtcccaaaagaaaagcatcattagaagtggtacacaaacatgggccatgctcccaactgaataatcatgatggcaaagcaaagtctacaacaccacacagtgagattctgaaccaagacaaagaaagggttaagtacattaactcaaggatctcaaagaacttgggccaagatagtagtgtgagtgaattggactcagttacactaccagccaagtctggtagccttattgggtctgggaattactttgtggttgttggtcttggaacacccaagagggacttgtcactcatctttgacactggcagtgatctcacttggactcagtgtgaaccatgtgctcgttcttgctacaagcaacaagatgctatctttgatccatcaaagtctacatcatattccaatattacatgcacatctacgctttgcacccagctctctactgctacagggaatgagccgggatgttcagcctccacaaaagcatgcatatacggcatccagtacggtgacagttcgttctccgttggctacttcagccgcgagcggctctccgtgaccgccaccgacatcgtcgacaacttcctcttcggttgcggccaaaacaaccagggcctctttggtggctccgccggcctcatcggcctcggccgccaccccatctccttcgtccaacaaaccgccgccgtatatcgtaaaatcttctcctactgcctccccgccacctccagctccaccggccgcctctccttcggcaccaccaccacttcctacgtcaagtacacccccttctccaccatctcccgcggctcctccttctacggcctcgacatcaccggcatctccgtgggcggcgccaaactcccagtctcctcctccaccttctccaccggcggtgcaatcatcgactccggcaccgtgatcacccgcctcccccccaccgcctacaccgccctccgctccgccttcaggcaaggcatgtccaaatacccctccgccggggaactctccatactcgacacgtgttatgatctcagcggctacgaggtcttttctattcccaagatagatttttccttcgccggcggcgtcacggtgcagcttccgccgcaagggatactctacgtggccagtgccaagcaagtttgcttggcttttgctgcaaatggtgacgatagtgatgttactatatatgggaacgtgcagcagaaaacaatagaggttgtgtatgatgttggtggtggaagaattgggtttggtgctggtggctgcaagtgattaagattaaacatatgctttgggctagttagagaaaaatcaatcttaattggctctaggctttcataattattgttgttccttttattgcaaagtgtacgtaacagtggcaatagaaaaaaaaggaaaacaaaaatgtgggaattaaatataatatagtttgtagcatgaagaagaatggaggggtgaatatatgactctcaagccgtgcgattgcttgcaattgtacatatgtaaggtggaaaaaaaaatgtaaacttgtccttgttattaattaaatgtttgttgaataaagcgaaattaaaggtcttgctttgggttattt

SEQ ID NO: 7859 - DNA, 1853 bp, Glycine max
tcggaattcggctcgaggctagacttagctattcttacctcttggcatgaccattcaaatgtcttcttttctcttagcttctcttgctgttttctttttcttctcctccttggagaagagttttgcctttcaagcagcaagaaaggaggacacagaaagcaacaatcttcatcaatatactcatcttgttcacctcagctcactccttccttcatcttcttgcagctcttctaccaaaggtcccaaaacaaaagcatcattagaagtggtacacaaacatgggccatgctcccaactaaatgatcatgatggcaaagctaagtctacaacaccacacagtgacattctgaaccaagacaaagaaagggtgaagtacattaactcaaggctctctaagaacttgggccaagatagtagtgttgaggaattggactcagctaccctaccagccaaatctggtagccttattgggtctggaaattactttgtggttgtgggtcttgggacacccaagagggacttgtcactcatttttgacactggcagtgatctcacttggactcagtgtgaaccttgtgctcgttcttgctacaagcagcaagatgtaatatttgatccatccaagtctacatcatattccaatattacatgtacatctgccctctgcactcagctctctactgctacaggaaacgatccaggatgttccgcatccaccaaggcatgcatatacggcatccagtacggcgacagttccttctcagttggctacttcagccgcgagcgcctcaccgtgaccgccaccgacgtcgtcgacaacttcctcttcggctgcggccagaacaaccagggcctcttcggcggctccgccggcctcattggcctcggccgccaccccatctccttcgtccaacaaactgccgccaaataccgtaaaatcttctcctactgcctcccctccacctccagctccaccggccacctctccttcggccccgccgccacaggccgctacctcaagtacacccccttctccaccatctcccgcggctcctccttctacggtctcgatattactgccatcgccgtaggcggtgtcaaactcccagtctcctcctccaccttctccaccggcggtgcaatcatcgactctggcaccgtgatcacccgcctccccccaaccgcctacggcgccctccgatccgccttccgtcaaggcatgtcaaaatacccctccgccggggaactctccatcctcgacacgtgttatgatctcagcggttacaaggtgttttccattcccacgatagaattttcgttcgccggcggcgtcacggtgaagctgcctccacagggtatactcttcgtggcgagtaccaagcaggtttgtttggcttttgccgcaaatggtgacgatagtgatgttactatatatgggaacgtacaacagagaacaatagaggttgtgtatgatgttggaggtgggagaattgggtttggtgctggtgggtgcaagtgattaatgattaaacatgctttgggctagttagggacaaaggaatcttaattggttctaggctttcattattactattgttgttgtcatgacataatgtaacagtggaaatagaaaagggaaaacaataatgtgggggaaattaaatagtgattaattgttggaaaacatataatataatgttgtaaaagaatggaggaggtgaaatatgtatgactctcaagctgtgcgattgcttgcaattgtacatatgtaagatgaaaaaaaataatgtaaacttgttcttgttattaattaaaggtttgttgaataaagcagaaacgtcttgttttggatt

SEQ ID NO: 7860 - DNA, 1449 bp, Glycine max
tagaacatcctaatcgaaaaattttttttcccttatttttcttaaatatttttatggctccggagtcaaaagttcctggagcaagtagaaagaagaaagcgagtgacgagggaaacgtttaaaccatatatgttttgttgtttctagctccattctatagcaatggccacgtctgttcttagtcctcctttctttcatcctctgcatcaacttcaattctcgaaatgcccccgcctttcttctaaatcccactttcgccctcgcctcctccgctccatatcccaaagaaccattcgcgctatctccgcagttgccgcagaatcagagttaggtacacagcaggatcatgcaattgaagcagacatctttgcttgccctgtatgttatgaaccattgataagaaaaggtccttctggccttaacttgtctggtttcatgtgtaagagatgtaagaagacatattctagcaaagataggtatctggatctgactgtaactgctggattgagagactacactgaaattcaacctgctcggactgagcttttcaggagtcccctggtttcattcttgtatgaaagaggttggcgtcagaatttcaggcaaagtggctttcctggtcctgatgaagagttcaaaatggctcaagagtactttgaatctgctgaaggtggacttcttgttgatgttagctgtggtagtggtttattttcccgaaaattcgccaaatctggaacatattcgggagtcatagcactagatttttctgagaatatgcttcgtcaatgttatgatttcattgagaaagataacacactttcaacaaataatattgctcttgtaagggcagatgtttctagacttcccttctcatcaggttcggttgatgctgttcatgctggtgcagctttgcattgctggccatctccctccaatgctgttgctgaaatcacccggacactaaaaaatggtggagtatttgttgggagcacttttctgcgttatagttcaaaaactccctggtttttacgccctttcagggagaggactccacaaggctatggctatctaacagaggaagagatcaaagacctttgcacctcatgtggtcttaccaattactcaagcaaaattcagcaggcttttattatgttcacagctcagaagccataaaactgggtctgatctatttataacattgattctccactgcattttatcaattccttctgtatgtatgtattgtatcacttgtttcatctgtaaagaagaaattgtaaataaatgagaaatgaaaaggtcaaaacctgagtccggtgtgttcgcaggttgtaaaatgcatcgtgtatcagtgcctaataatatatccaaattctgacaatttttgtaaagaatatatattttgttggcttaaatatatttttggttctagtaaaaaaaaaaaaaaaa

SEQ ID NO: 7861 - DNA, 2444 bp, Glycine max
ggtcaatatgaggtgcaattgataagcaataagcaacaaccactctctcgtatctcaccttcttcttcttcttcaaaaccaagttacatattatagaatccttaattttcctaaagttagaattcaatcaatcaggtggagatggtttgggtgaatgagaaactgaaggggttcgtggggcacagatgggtggtgtttgtgtgcgcgatgtgggacatgtcgtttgcggggacatcttacatgttcgggagcatatcgccggtgataaagagcagcatgggtttcaaccagaagcaggtggcgttcttgagcgtggctaaggatctgggtgacaacgttggtcttcttgcaggcaaaatctgccagtcttcccctatttgggctcttatacttgtcggagttgtccagaatgttgtcggctatggccttgtttggctcatcgtcactcaccagttccccgctttgcctttgtggctgctatgcattctaatctttgtgggacaaaacggttcaacatattacaacacagcagcactagtttcttgcgtgcaaagtttccccgagagcagaggccccgtggtggggatattgaagggcttcgttggcctaagtggcgcaatttggacgcaactaatagccatggcccaactccctgaccaggcctctctcattttcatcatagcagttggacctgcaatggtttcattagccttcatgttcatcataagaccggtcgagaagttatcgacaatctagagcctccgatgggactggcttcacatttatctacagcatttgccttctcttggctgcttacttgatgggagttttgttgctggaaaacatgtttgatttggaccaaagcaccatcacattgtttgcagttattttgatcattctcatattgcttcctatcatagttcccattctattggttttcttctctggaccccaaaaaagtgctgaccaagaatccctcttggagccaccaatgcttgaagcaactaagcctaataagcactttgttggggagagtagttctagcactaccaaagtaatcaaacacgtcgaaaacgagaagagtccttcgaagctagaggtgcttcctctgtcgtcagaagggccaagggatgtttttcagtgtcaagctagactgtggcaagctgttaccaaagctgtgaagaaaatcaagcgaagaaatgggccacatagaggagaggatttcaccttgtcacaagcaatggccaaggccgatttttgggtcatgttcttctctcttgtcatgggctgtggatcgggcttgacaatcataaataacatgggtcagatttgtcaatcattgggagacaacaatgtcaatgtttatgtgtcggttatcagcatatccaacttccttggtcgtgttggtggcggctacttctcagaggttatagtaaggagttttgggtacccaagacttgctgcattggcagtgattcaagcagggatgtctttgggactttgctactatgtatttggtttggctggtcaagtttatgcggtggccatatccaatggttttgggtatggtgcccactggtcaattgctttagcagcagcttcagagctatttggcctaaaaaactttggaactctctacaattttctcaccatggctagcccagcaggctctctctttctatctggatttgtagcaagcacaatatacgactattacgcggagcagcaagtgaaacaccgaatgctcactggaaattacaatgacttgcttctttgtgagggaaacatttgcttctccatcacatttggaattttagctgtagtttgcttatgtgcagcatctttgagcttgatcgttgctcacagaacaaggaaattctatgcacagctttatgaagagtctcaaacttaaaaagtgggagcaagcataggaaaacttatatcagttacatcttccagttatcaagggaatcaatggagactggagagtatcactacggtttgaatattgtgttgaattgttgtgtgcatatactctgcctctcttatctctcttttgggctcttaagtttaatatttgttagagaaatgctagtagtacaattttttattactttttttgttaggttaaattcatgtgtatcctattagatatatgagtttcatttttatttgataggtcctatttataaatgagtaagaatcacatgaattttaacggataaaagagggcatgagaaagacagtgctagaaaatttgttactagcacttctctgtttgtaatcttttttcatactccgctcccttgttgattttatacatgcttgggaaggaagacttgttatgaaatatgttatgtgtgttcccgtgtatgtaagggcatttgtttattggatcagctagatattcagctgcagataagtaagcatcatcatattagtgt

SEQ ID NO: 7862 - DNA, 1735 bp, Glycine max
tgtgagttcatcaactggtggtcgccttcagttccccatctatgacaagtacctcactggcctggaaagggctgtaagaaaaatgaagagcaattcagagtcgtctctcctggtggctgtaagatcctctaaaggtgagaagattctcgaggttgatggaacagtgacaacacagccagtccttgagcatgtaggaatatccacatggcctgataggctaatcttgacagatcatgcacttcattttgaagcacttcgcgttgtatcatatgacaaaccaaaaagatatgagttatcagaagatcttaaacaagttgttaaacctgagttgactggaccatggggtactcgactttttgacaaggcagtcttctatagctcatcatccttatcagaaccagttgtactagagtttccagaactgaaaggtcatgctcgtcgtgattattggctagctatcatccaagagattctatatgttcacaaattcataagcaagtataaacttaaaggggttgcacgggatgaagcgctttggaaggctgttttaggaattttgcgtttacaagccattcaagatattagttccacgattcctatacagaatgatgctcttctcatgtttaatttatgtgatcagcttccaggcggagacttgatattagaaacccttgcaaatatgcctaacttaagagagtcagatcatgagaatgatttcaagggtggaagtggaatgtattctatctcagctttggacatggtttctaacttgggatttgtatttggagcaagttcaaacaactcaaatgagagtaggattgctgtgggctgaaatatctgttggagaaatgacctgaattggaaagagcagttaaggattcgaacatcattcataaaaaggtcatatctgcacaagccacagttgatggtgttaaagttgatggtattgacactaatttggctgtcatgaaggagttactttttcctctaaatgaacttgcgaagtctcttcagtccttggcatattgggatgatccacggaagtctttagtgttttgtttgtttttcagttacatcatctacaggggttggcttggctatgcagcagcgctggtgcttgtgttacttgcagttttcatgataattactcgatgttttagccaaggtaggtcagttcctgaagttaaagtacttgcccctccaccaatgaatacaatggaacaacttttggctgttcagaatgctgtcactcaagctgaacagctcatccaagatggtaacgtaattctgctcaagttccgtggcttgttgctgtccattttccctcaggccacggagaagttagcctttggtcttctatcaacagccttgattttggctttcttgcctactaaatgcatagttctgctactcttcttggagatatttacaagatattcacctccaagaaaagctagcactgagagattgacgaggagattaaaggaatggtggttcagcataccagcagctcctgttacacttgaaagagataaagaggaaaagaagagaaaatagatattgatgcacggtgtaatctgttttgtatatgtttttgtttaatgctgctttttgtcttgtacatagagatgttaaaggtgtaaaactcattaggggaagcaaaataaataattagaaaatgaaattacactctcgaaaatctcaaaaaagggcggccgctcgcgatctagaacta

SEQ ID NO: 7863 - DNA, 1838 bp, Glycine max
  misc_feature (1838)..(1838): n is a, c, g, or t
cacgcgtccgcaaaaatgaaagagaagagggtgagttatctcctaatggagactttgaagaagataactttgcattttatggaggtaatggtttggatgcagtgcataaaggaaaagatggtggtgtgagtcggcaataccaaaataggcacggggaagaagtttgtggtgaaactagaggagaaaacgatgctgatgctgatgatgaaggtgaagaaagccatcacaggtcatcagaggacagtgaaaatgcatctgaaaatgttgatgtttctggaagcgagtctgctgatggtgaggagtgttctcgagaagagcacgaggatggggaacatgataacaaggctgagagtgaaggtgaagctgaaggaatagctgatgcccatgatgttgaaggagatggaatgtcattgccatattctgaacgctttctactaactgtgaagcctctagcaaagcatgttcctccaatgttacatgagaaggacatgaattcacgagttttctatggaaacgattccttttatgtgctgcttagacttcatcagacattgtatgagaggatacaatcagcaaagataaactcatcatctgctgataggaaatggaaggcttcaagtgatacaagctccactgatcaatatgacaggttcatgaatgccctttacagtttgctggatggttcttctgataatacaaaatttgaggatgattgtcgagctataattggaattcaatcatatgtcttattcacattagacaagctgatatataaacttgttaaacagcttcaagctgttgccgctgatgagatggataataagcttttacaactatatgcatatgagaaatcgagaaaacccggaaaatttgttgacatcgtttatcatgaaaatgcccgtgttcttctccatgacgagaacatatatcgtattgaatattcacctggaccaatgaaactgtctattcaactgatggactctggacatgataaacctgaggtgactgctgtgtcaatggaccctaatttttcaacctatctacactatgacttcctgtctgtcgtctctgacaaaaaacagaagtcaggaattttcttgaagaggaataaacgtagatatgccagtaatgatgaattttcaagccaggctatggaaggactacaaattattaatggtctggagtgtaagatagcttgcagttcatctaaggtctcatatgttttagataccgaagactttttgtttcggataagaaggaaaagaagagccttgcgtctgaagagttcaggtgctcacgaacaggcacagtcttcaaacatttgttcaagcagagtacaacgattccgcaatttgttttccattacatgaaagtgtccattttgagctgggcatgtaacatttgtcaaatgtaaacattggcagaggcgcctgacgaaaacgccatcctatccaagaagttgttgatcaagggatgtttttctgaaattatttttgcacattttctttgagcaacctaataaatcttacagaatgggtagctggtgcggcatggagaggaggagattgttgtatactgtaatttgatggctaacgatggctcacaataatgtaaataaatagaggtaatttgtgatttaactagaggactctttatttcattcatccatatttttgttatttagtttttcttttcctcttttaactttagctgctacaaatattgaggtttattgatcatgggacattcggtggctgcaattggccctgccgtttccaatacaaagtgtgtagactgagagtctgcccccatccttcgttcttcaaaaaaaaaaaaan

SEQ ID NO: 7864 - DNA, 3888 bp, Glycine max
tgaagactctggtgctgaaccattgcatgatactgatgaaatttttggcaggcaccccaccgcatatgcttgtgaggataaaagttctttgaaaagtatgtatagtccagtgcttggttaccttgacaaagtgaaggagaaattaagaaatcctgaggattaccaggaatttttgaagtgcctaaatatctacagcaaggaaataattgcccgacatgagttgcaatcattggtgggcaatttactgggaaaacatgcagatcttatggagggatttgatgaatttttggttcaatgtgagaagaacgaaggattccttgctggtctcctgaaaaaaagacacggaccaaaaccagtgaaggtagaggacagggatcgagatcgtgatagggatgatgggatgaaagaaagggaccgcgaatgccgagaaagggacaaatccaatgcaattgctaacaaggatgttttggttcctaagacatctctgtacgccggcaaggataagtatgcagcgaaacctataagtgagcttgatctttcgaactgtgaacaatgcactcccagttactgtcttctaccgaaaaattacccaataccaccagctagccagagaacagaacttggtgcagaggtgttgaatgatcattgggtttctgttacttctggcagtgaggactattcctttaaacacatgcgcaaaaatcagtatgaggagagcttatttagatgtgaagatgacaggtttgaacttgatatgttgttagagtctgtaaatgtggcaactaagcgtgttgaagagctcttagaaaaggttaatgctaatataattaaaggagatagtccaattcgtattgaggagcacttaacagctctaaatcttaggtgcattgaacgattatatggtgatcatgggcttgatgtaatggatgtgctaaagaagaatgcatctttagctttgccagtcatattaacccgcttgaagcagaaacaggatgagtgggcaaggtgtcgttctgattttaataaagtttgggctgaaatatatgcaaagaactatcacaaatcacttgatcaccgtagtttctactttaagcagcaggatacaaaaagcttgagcactaaagtcttacttgcagaaataaaagaaattagtgagaagaaaagaaaagaagatgatgttcttcttgcaattgctgctggaaacagacagcctattattcctcacttggaatttgtgtatcctgattctcagctacgtgggcccccccccccccccataaaatattcttgtggagaaatgtgtacaactgaacagttggataaagcaatgaagatttggacaacatttttagaacctatgcttggtgttccttctcgaccccaaggtccagtagatacagaagatgttgtcaaggctaataagaataattctgccaaaactggcactggaattgatgatggggatagtagtcctgcaacaaatcctaagaatttaaacactaatagaaatggggatgagaactttccatcagaacaatcaaattcctgcaaacaatggcaaacaagtggggataataaggttaaagaagataatcatcttgatttggaacgctcggcacataagaatgaaaccttgggaagtagtacacagcatggtaaagtgcatataaatgcatccacgactgatgaagtatcaagagccaataagcaagatcattccattgaacggttggtgaatgctaatgtctcattgaccttgggtatggagctaattagtagaagaacaaatgtggataatgcatcaggacttactgctactccatcaagacctggtaatatttctggtgagggaggacttggtttaccttcattagagggtgctgattctacaagaccagttacatccacaaatggggccatcaatgaggacactaaagttcacagatatcatgaagaagttggacacttcaaaagtgaaagagaagagggtgagttatcacctaatggtggagactttgaagaggataactgtgaagtttatggacatgctggtttggaggcagttcataaaggaaaagatggtaccatttgtcgacaataccaaaatagacatggggaagaagttcgtggtgaagctggaggagaaaatgatgctgatgacgaaggcgaagaaagtccccatagatcaatggaggacagtgaaaatgcttctgaaaatggtgatgtttctggtactgagtctgccgatggtgaggagtgttctcgagaacatgaggagaatggagatcatgaacatgataacaaggctgagagtgaaggtgaagcagaaggaatgactgatgccaatgatgttgaaggagatggtgcctcattgccatattcagagcgctttcttgtcactgtaaagcctctggcaaaacatgttcctccagtgttgcatgacaaacaaaggactgttcgagtcttttatggaaatgattccttttatgtgctgtttagacttcatcagacattgtatgagaggatccaatctgcaaaggttaactcatcatctgctgaaaagaagtggagggcttctaatgatacaggctctagtgatcaatatggcaggtttatggatgccctttacaatttactggatggttcttctgatagtacaaaatttgaggatgagtgtcgagctattattggaactcagtcatatgtcttattcacattagacaagctgatatataaacttgttaaacagcttcaggttgttgccaccgaagagatggataacaagctgcttcaactatatacatatgaaaattcaagaaaacctggaagattcgttgatttagtttatcacgaaaatgcccgtgttcttctccatgatgagaacatatatcgtattgaatgttctcctgcacctacccaattgtcgtctattcaactgatggactatggatatgataagcctgaaatgactgcagtgtcaatggaccctaatttttcagcctatctgcacaatgacttcctatctgttgtccctgacaaaaaggagaagtcgggaatttacctgaagaggaataagcgcaagtatgccattagtgatgaatattcaagccagaccttggatggactacaaattatcaatggtctagagtgtaagatagcttgcagttcatctaaggtttcatacgttttagatactgaagattttttacatcaaacaagaagaaaaaggagaaccttgtatcagagcagttcatgccatggacaggaaaagtccccaatcatttgttcaagcagagcacaacggtcctgcaaattattttcaatttgaagatggtattcattttgagcccgagatgtgtttttggtcatgcatcaatggcaggcaaaggtgccagatggaaatggcatcccgtccaagaagttgagcaaaggatgttttaatgaaattcatttttcttgcattcctcgcatcttctataccaacaaccaaataaggcaacacagaagggagatggggcacagagattgtagtataatactttgacatggtgactgatgagtttcaatcatgtaaatagaggtaatttgtgacaaaaccaaaggacattttctttccattcatcaatagttgttatcgtaataagttttattatttttctcttaattttgctggctacttttacgaggttattgattttatgaaaaattaggtggctgtaattggcccccatattctaattcgtagtgcatggaccagtttccctttaaaccgatatttacccccttgcccccgttttccttatctcgtgtaacaacttagcttggaatggaatgttgggggaatgatgttggggcatgtataatctatatgatgactcttttcatttg

SEQ ID NO: 7865 - DNA, 1720 bp, Glycine max
tcagctacgtaggccccccccgtatgttgcaatgtggttggatttggtggtggcaatgggtagcgaagaagagagggttcttgagaaccaactggaacttcaattgcaagaacaaagggattctctctctgctatcgatcaagctctcctctctgatccaaccgaccctgaacttctcgcggttcatgaggagcttgttcaggcaattaaggatgcagaagaaggacttcttcacctaaaacgtgcacgattgttacaggaagcagattcagtgctgcataacactaatatttttactgaagagaaagtggatccccttgatcccacttatgttgaaccagagccattggaggacaagtgttattctgttggatctaaatgtagattccgtcacaaagatgggcgttggtacaatggtcaagtggtgcagttggataattcagtggcaaaagtttcatttcttactcctacttctgagaatatgttggacttgatgttcaattgtctgctcttaagaaatatgtgcctacaatctggaagcagtctcttgtggggtcaagtatatgggcagtctcaactgcaaatgcaggcacttggagagaagccgagctcaagtcctgggacgaaaaggctggagttggacaagttgttttccgagacgacggaagttctgtgaaacttggggcagaagaaatggcactgtctgagcatgcagaaatgagtgacatagagagtgattccagcttagatcaatccgattccagtgactatgaggaggaggaggaatcgcaaggcataggatttctggagagtaccaatctacagagaggggtgccaacgggtaccgcggcattggccgcgcgggagaaccacactagaggcatagcttccaaaatgatggctaatatggggtacagagaaggaatgggtttaggtgtaaccggtcagggaatgctggaccctatagcagtgaaggtgctaccaccaaagcagtccttagatcatgcactcgagtctcataaaagggaagagaacaaagagaagcaaggcaagaagaaacagagccgaggtggcaagagaaaacgcgagaagaaatttgcagaagcaaaccgtgcagcaaaagaggaagaagaatcggcatcagatgtctttgcattaataaacaatcacctggcaatgcacaatgaggcttttggcggtggattgatgaagaagcagcaaagtaaaggttctgaggaaggtaagaaggtggatagacgagcattggttgcttatgaggaagaggtgaaggatttgaagattagggttgaaaagctcgagcacattgtcaatgccaatagaaaagagaaggctgtgtatgagggtgctatgagaaaattaaatgaaacccgcaaggctttggcagatgctgaagcagttcatgcctctgcctcaaattcagtaacaagcaaagaaaaagagaagagatggctcaagttttagttaggagtcaagactcagttgtttttagttgcatgatataatgtctttattttatgttgatgaccttaaaatgaagagtaaagggaaaggagatttcaaaatgtgctgctcaacaaagatattagtacattacacttttgtatgcaaccttgtacatgttatgcaattattcaattgcatgatgtgtgcacgtatgtttgtatcgagtccttgtgttttgaaaaaaaaaaaaaaaaaa

SEQ ID NO: 7866 - DNA, 2220 bp, Glycine max
  misc_feature (55)..(55): n is a, c, g, or t
  misc_feature (59)..(62): n is a, c, g, or t
  misc_feature (64)..(65): n is a, c, g, or t
  misc_feature (91)..(91): n is a, c, g, or t
  misc_feature (152)..(152): n is a, c, g, or t
  misc_feature (174)..(182): n is a, c, g, or t
  misc_feature (184)..(187): n is a, c, g, or t
  misc_feature (189)..(190): n is a, c, g, or t
  misc_feature (195)..(225): n is a, c, g, or t
  misc_feature (234)..(256): n is a, c, g, or t
cccccccccccccccaccccccccccccccccccaccccccccaccccccccccncccnnnncnncccccccccccccccccccccccccncccccccccccccccccccccccacccccccccccccccccccccccaccccccccccccncccccccccccccccccccccnnnnnnnnnannnnannaaaannnnnnnnnnnnnnnnnnnnnnnnnnnnnnnaaaaaaaannnnnnnnnnnnnnnnnnnnnnnatttaattcggctccctatagggcgaattgggttcctccgggcccccccccggcgccagcgtcggggccccccccccccccccaaggtttaattattagagtgttcacataacttcagcaatcagcatgttaagggatttttttaataaattgtgacatttttgttatgatgcttttccattatgagatatcaattttgtataacattttaaagtacgtaggtggctagtgtactttcacctacatgaggctggtgtaatcattgcaaccttcatctaaagttcatttagatttatcatgtgctttgtgtttggtattttttctttttttactttggatgaaaaaatagtaatccttttcttctttaatgtttatggcatcttgggtgaaattattcagaggtttactcattgaatcatttccagatattttactaaatttcttaaaacatacattaagacacaataacattgggggatcaggcaaaaaaaaaatgacaaacttagtactgttaatccaattgattcatgttttaacatttgaagaattagaagccctgtaatttacgtttggatccagaacaccctttaaaacctgatttttaatggtagtttgtatgctttcagcctttgtatacccataagcttattttccaatatatgtgattgctgctttacacaatctgcttctttgttttgtttttctttctgttagtatattatgttttgtatatcatgacttatatttgcatctacaggacttgatgttcaattgtctgctcttaagaaatatgtgcctacaatctggaagcagtctcttgtggggtcaagtatatgggcagtctcaactgcaaatgcaggcacttggagagaagccgagctcgagtccttggacgaaaaagctggagttggacaagttgttttccgagacaacggaagttctgtgaaagttggtgctgaagaaatggcgctgtctgagcatgcagaaatgagtgacttggagagcgattccagcttagtacaatctgattccagtgactacgaggaagaggaaccacaaggtttaggatttctggagagtaccaacctacggagaggtattcagaccgaaactgcaacatttgccacgtgggagaaccacactagaggcatagcttccaagatgatggctaatatggggtacagagaaggaatgggtttaggtgtaaccggtcagggaatgctggaccctataccagtgaaggtgctaccaccaaagcagtccttagatcacgcactggagtctcataaaagggaagggaaggaaggcaagaagaaaaggagccgaggtggcaaaagaaaacgtgagaagaaatttgcagaagtgaatcgtgcagcaaaagaggaagaagaatcggcatcagatgtctttgcattaataaacaatcacctggcaatgcacagtgaggcttttggcagtggatcaatgaagaagcagcaaagtaaaggttctgaggaaggtaaaaaggtggatagacgggcattggttgcttatgaggaagaggtgaaggatttgaagatgagggttgaaaagcttgagcacattgtgaatgccaatagaaaagagaaggctgtgtatgagggtgctatgagaaaattaaatgaaacccgcaaggctttggcagatgctgaagcagttcatgcctctgcctcaaattcagtaacaaaaaaaaaaaaaaaaaagagatggctcaagttttagttaggagtcaagactcagttatgtttttagttgcatgatataatatgtctttattttatgctgatgaccttaaaataaaaaaaaaaaaaaaaaaagatttcaaaatgtgctgctcaacaaagatattagtacattacacttttgtatgcaaccttgtacatgttatgcaattattcaattgcatgatgtgtgcacgtatgtttgtatcgagtccttgtgttttg

SEQ ID NO: 7867 - DNA, 595 bp, Glycine max
gcacgaggcctcgtgccgaattcggcacgaggcacaacacaacttcaattcaaagcttcaagcttaagcccaacaaagcttaaaaaaagaagataagaaaacccaataattactaactcttgaaaaatgaagatgggtagtcctagcatgggaggctcaaagagaaggctttcaagcagagggcttggaggagcccttagggagcaaagggcaaggctttacataataagaaggtgtgtggtcatgctcctctgctggcatgactagctagtagtactagttgaggccttcaaagttgaaatccaaagcttgcttccatcactatggaacaagatttggttatcttctcttcctttgttttattcttttcttcttccttcctttgattcatatggtggagtgtatatagctgacggctggtttattgtgggagagatgcaacaattttttgtatggattgctggccttataaatacatatatggcttggctttatgtacatcagaaataacagtgaattatttataacaattcaaatttaaatcaaaaaaaaaaaaattctctcctcgcccacgctcaaacgtccctcaaagacg

SEQ ID NO: 7868 - DNA, 1064 bp, Glycine max
gcggggaatccaacttgaaaactcttcttcaacaacccttcttttgatctgtgcaagtgatcttgaaaggagggaacaacaatggtgaagtctataaactttctcctattttggctctagctgctagagattccactgttcttaccggtggaccaagctggggagtacccttgggcagaagggactctcttggtgcgagtattagtggctccaataacaacattcctgctcccaacaacacatttcagaccatcttaactaagttcaagcttaaggggcttgacattgttgatctagttgctctatctgggagccacactataggaaattcccgatgcaccagcttcaggcaaagactatacaaccaaacaggaaatggaaaagcagacttcactcttgatcaagtgtatgctgctgaattgcgcactaggtgtccaagatctggtggggaccagaatctctttgtcctagactttgttaccccaattaaatttgacaacttctattacaagaacttgttggccaacaagggtctcttaagttctgacgaaattctcttgacaaagaatcaagtatcagcggatttagtgaagcagtatgcagaaaacaacgatcttttctttgaacaatttgccaagtccatggttaagatgggaaacattactcctttaacagggtcaaggggagagatcagaaagaactgcagaggaattaacaagtgatgaagtgatatcattgtcatgttgcacgtgtgatagttgcacctacagtttacttttctttactttgtttaccgcattaaaaaaaggagtgtccattgatctattctgtggtgagttgagcaagtcattagcagtgtcgtgatgtgccttgaatatccttttgatagcgttgttgtgtgtttaattaaatttatgtaattggatgtttcaaggtcaggcttgaaattagaattgattgttcaagtagttcgaatttatgtaggtattcaagtttaaataaaatttgtatcacctttcatgttgaataaaatagaattccaataaatttttattggcctcccc

SEQ ID NO: 7869 - DNA, 1631 bp, Glycine max
ggaagcaaagcttattgagtcttccctcctttgcataacaattattcctctctcttctcttctcttctcttctcccatggcttattccattcctctcatcatcaccttcttcttcttcctcttcggcactctctcccacgctcaagcccctgcatctttcctaatcccagtcaccaaagacgcttcaactctccaatacataacaacactttcatatggcacccctttggttcccaccccactggtgcttgatttaggaggtccttttctctggcttcactgtgcatcacgcaacacaccttcatcttcttccctcaccacccctcaccgttcccttcaatgcttcactgccaaaacccacaaatccaccaactcctttctctccagccccgtcgacgaagtcgaccagtaccaaccatgccaagtgttccccgaaaacagcatcaccggaaccatcgccgccgaaggagaactcgtggaagacctcatggcccttcaatcagccaaagaaaaaggacaacttgtggaacaccagagccgtttcacgtgttccccgaccaccctcttacacggcctcgccaagggtgccagaggcatggttggtctcggtaggtcccgcagctcgcttccttctcaggttttcgacaacttcagcacgcaccgaaaactcactctctgcctttcctcctccaaaggcgttgtcctcttgggcaacgtggcaacctacgagtccgaggttcttaaatctctcaccttcacaccccttgtcaccagcttccccacgcaggaatacttcatcaacgttaactccgtcaaaatcaacggtaagaggctgtccaacgagcatgagggtggtggaggggttttaactcttttgagcacaattgtgccctacaccaccatgcagagttccatctataactctttcaagacatcttttgaagatgctgctgtggctatgaacatcaccagagtggcctcggtggcaccctttgagctttgtttcagttccaggggctcgcaagtggggcccagtatgccggttattgagttggtgctgcagagtgagatggtgaagtggaccatacatggaagaaactccatggtgagagtgagcgatgaagtactgtgcttggggttcttggatggaggtgtgaaccccagaaactccattgtgattggagggtatcaattggaggatgtcatagtgcagtttgatttagccacttccatggtgggatttagttcctcccttgtcgccaaaaataccaagtgttccgattttaaatatgccagttccataactgcagactcgatttgaatattttaacccaccgctttgaggatgggctttctagtactaagtactaagttttcttgcttgattttatgtttttgaagcttctcagatctcaattactaagttttcttgtttaattatgtttctgaagcttctcaattttgtaacaacttgattttgggtagtttttttttttctttttcctgcactattggttgtatatttaaaatatcgtgatgagatattatgatcttatgatttgatggcacttttgcgccactgtatttttgacattggaatgaaatacttatccctatattttattttggct

SEQ ID NO: 7870 - DNA, 1563 bp, Glycine max
ttccacgcgtccgcccacgcgtccgcccacgcgtccgtccacgcgtccgcccacgcgtccgcacagttggttctttcatattcttcctcttggtcctttcctgggcttatttatacgcatttcccagttctcaatcactgattcagagtcatgagattcccatcaacagttctgactcacttgttcagagtcatgagattcccagcaacagttctgactcacttgttcagagttatggtgtgattctaaaacccaatgtttcaatggacacatgcaatgtgtttgaaggaagttgggtgagggatgatagctaccctttgtatgatgcttctcactgcccttttgctgaaaggggtttcaattgccttgctaatgggagaaaagatagagattacacaaaatggaggtggaaacctaagaactgtgagattccaaggtttgatgcccgtggaatacttgaacatcttcgtgggaaaagggtggtattcgttggcgatctcgctgagtaggacacattgggagcccacgatatgcttgctgatgacaggagttgaggataagaagagtatctatgaaatcaagggcaacaaaatcacaaaacagataaggtttttaggtgtgaggtttagtacttttgatgttagaatcgatttttatcgatcggtgttcctggtgaggcctggttctgtgcctagacatgcaccccaaagagtgaagacaacattgagattggacaagattgatgatattagccatgagtggattgggcccgaggttcttatattcaattcaggtcactggtggacacggactaagctttttgacgtgggctggtattttcaggttgataactcactgaagcttggaatgacaattaactctggtttcaacacagctttactcacctgcgcatcttgggtagagagtacaattaacacaaacaggacaagagtatttttccgcaccttcgaatcatctcattggagtggacagaatcacaattcttgcaaagtgactaaaaggccttggaagagaactaatcgcaaagagagaaacccaatttcaaatatgatcaataaagttgtcaaaagcatgagtgctccagtaacagttatgcatgttacaccaatgactgcatatagaagtgatggacacgtgggcacttggagtgaccagccatctgttcctgattgtagccattggtgcttacccggtgttcctgatatgtggaacgaaattctcctctcgtatttgctaccaaaataaggagcaaattagcatgagaggtaccaacatgttagaccttatatcatttaagccatatatagcttggtactcaattgtactcagcaatcaggattaacctgttagcctttaacgtcaccggggggtaccaaatgtacattggaaatgaataatgtttgtatagtgatttcaaataattggcattcacaaaaaaaaaaaaaaatgataccaggactaaagtgtttatgtgcaaattcttggaggactaaatgtatattttatattgaagttctgaaatgatttttactttactaaaaa

SEQ ID NO: 7871 - DNA, 1062 bp, Glycine max
tcagctacgtaggccccccccccctgctgtgttgggtaggagagtcggcaacaccggtgggatggccgcgattccgcgggccacgcggcgccccacgcgtccggaggctatcaggcaggagcttaaggaattgcacccgaatgacccccagattgttgtcctcaaacatggagtgtggagagtaaagggaattattcaggtttctagatctataggtgacgtatatatgaaacatgcgcagtttaaccgcgaacccattaatgcaaaattcagactccccgaaccaatggacatgcctttcttgtctgctaatccaactattctttctcatactctccaaccaaatgattccttccttatatttgcatcagatggtttatgggagcacctgagtaatgatcaagcagtggatattgttcacagcagtccatgcgcgggtagtgcgaagaaacttgtcaaggctgccctacaagaagcagcaagaaaacgtgaaatgcgatattcagacctttacaagattgacaagaaggttcgtcgccattttcacgacgatataactgttattgttttattcttaaaccacaaccttatatccaggggtgcagttctaaatacaccacttacaattcgtagtgctctcgatcactgacgcttcatgatttgtaaacatgcttctcttatacgggtgttctggcaactgtgccaataccagaaaatacaccattggtacgttgctagaatataccattcatagtgctgccacgtatggttactgataccgagacaacttattgatgacgcacgaacttgtaacacttgttagaagtttatccatgaaaatgaaaaagagaaaaagaaaaaaaaaatatcagaaaagtaacttttgattagcaatttgtcaaatcccttgcccatatttacataatgctgtgattagaaggaagtgcttgatctaatttccgtgtaaatttcgtgcacgagcaaggttgtatcatgtatgtacgatttcctggataatcctcaatcagcttgttgattgaatgaattcaattatttaatcag

SEQ ID NO: 7872 - DNA, 983 bp, Glycine max
agatagcgggctaattcgtgggctggcctagtccaccccgcgtaacttgttttgggtctaaatactgggccaccttacaacatggctgaatgctaagcgtgctagggttcatcaggtgttgtagagagacacatctattgacactgtaatggtgccaaattaagtgcccatttcttcttgtagtggttattagaggatttgctcgctatcatatcacagtatatatcttcttatttgtttaatttttatgtttcttaggtgaattactcaagagggctcgacaatcccacaaagtagaaaaagaggttatgttatggcgggcaaaggtgttagttcggtggctaaggcggtagcagaatatcagtatccttggcgtgagaagttggggaaatataaggatgagcttgccaagggtgtgtggggatactgggagctgggggcatggaagccgctgagtatcagtgctcggcatcgtgctagaattcgcaaggaagtcctccttgctggggaagattggccctacgatcctgaaaggaaggagatgaagaccaggaggaaaggacacaaatgtgataggatttctgccgaaaagcgcgcaaacacagcgaagttgatggagaagatgccccagatgttgctggattacaagaagagaaggtggcagaagaagatgaaggaggaagacaagggaaaactttgattttgctcctcctctaatttttgcaaggttcagcataaactgtgcctttgagaaatggagtatttaattatgccatgttacacctgtttgtgggcctaatggattattaactttggttatgcttttcaatccttaataacccctttcgagagtatggccttgtgagtatcaggggggaaagggctttactacaatggaaattactgttatgtggttttgtttttatgtatatgcttggatgagtgcttgtcggtactgacaattgcttatttgtgccaagggc

SEQ ID NO: 7873 - DNA, 2014 bp, Glycine max
aataagcattgcacttgttgaagttggaccatcaataacattggccagtgtatcagaggttttagcatttgcagttgggagttttatttccatgcctgcaatccgtgtgttctccatgtttgctgcattggctgttcttttggacttcctcctgcaagttaccgcttttgtagctctgatagttcttgactccttacgggcagaggataagagagttgattgttttccatgcataaaagtgcatgcggaccctgatacaggaactggacgaagaaaacctggtttgttggctcgatacatgaaggaggttcatgctcccattctgagtatttgggggggaaaaatagttgtcgtagccggctcggggggatttgcattggctagcattgcattgagcactagaattgaacctggtttagagcaagaaattgttcttccccgagattcatatcttcagggttatttcaataatgtttcagaatatcttagaattggacctcctgtgtattttgttgtgaaaaactataactacagctcagaatcaacgcatacaaatcagctttgctccattagccattgcaattcagactctcttttaaatgagattgcgagagcggcccttgtaccagacacaagttatattgccaagccagctgcctcatggcttgatgattttcttgtgtgggtgtctccagaagcatttgggtgctgcaggaaggttacaaatgggagttattgccctcctgatgatcagcctccttgctgtgctcctggggaaagctcttgtgtttcagtaggaacatgtaaagattgcacaacgtgtttccgtcactcagatctccataatgatcgtccatctacaacacaatttagggagaaactgccatggtttcttagttctctgccatctgctgattgtgcaaaaggtggtcatggagcttacaccagcagtgttgaactgaaaggctacgacaacggcattattcaagcatcgtcattccgtacttatcataccccactcaacaagcaggttgactacgttaattctatgagggctgctcgagagttcagttcaagagtttctgattctttgaagattgagatttttccatattcagtgttttatatgttttttgagcaataccttcatatatggaagactgcactggtcaaccttgctatagctattggtgcagtatttattgtgtgcttggttttcacaagcagtttatggagctcatcaataattttgttggtgttggcaatgattgttgttgatcttatgggtttgatggccattctgaatatccagttgaatgcgctctcggtggtcaaccttgttatgtcagtgggcattgctgttgagttttgtgtgcatatgactcattctttcactgtagcaagtggagacagagatcaacgtgctaaggaagctttgggtacaatgggtgcttcggtgttcagtggtatcacactaacaaagctggttggagttattgttctttgcttctcaaaaacagaagtgtttgtgatttattactttcggatgtacttgtcattggtacttcttggtttcttgcatggacttgttttcttgccggtgctattaagcgtctttggtccaccttcaagatgttcaatcattgagcaaggggaagatcgttcatcaacctcgtcatagctgtaaacttacactcattggacgatgggtttcagaagcatctgtaaagtacagaaatttaaaggcgaaacagaagataggaaatacagcaattttgacatatccgccccctaagttgtgtatcatgacccttgtacctatttaataatcaatctcttgtaaggttagggtggaagtttgtgaaaaacaaattaaaaggttaattgaatctataggcctaatgctattaactttttgatttagtatctatattttttttaattaacattctttaaaaaaaaaaaagaaaaaaaaaaaaaaaaaagaattcctcagccgggaaaaaaaaaaaaa

SEQ ID NO: 7874 - DNA, 1880 bp, Glycine max
tcgagtcagctacgtaggcccccccccgttcccctcacatttcgctaaatctgcatcaactcaatcaatctttgtcttcctcacaaccaccaccattctccgccggtcaaaccaccgtttcagtggcgggaaccgagcttgaccgttattaggtgcatccctgtttcgtttagacatggaggtttccgtttcgtcgccgccgagaaagtccatagcggagaaggtattcggaggttactataacgggaacaatagccacaaaaaacgtggcagtgaggctcacgatgatgacagcgatggaggcatggaactcatggagattggcgcccaaaggaccaagaacgtcttgattctcatgagtgatactggtggcggtcacagagcttccgctgaagccatccgtgacgcctttcaaattcaattcggtgacgaatacaggatttttgttaaagatgtttggaaggaatacactgggtggccgttgaatgatatggaggggcaatataagttcatggttaagcatgtgcagttatggaatgttgcgtttcacagtacttctcctagatggattcactctgtgtatttggctgccattgctgcttactatgccagggaggtggaggcggggctgatggagtacaagccagatatcatcatcagtgtccatcccttgatgcagcatattccattgtgggttttaaagtggcaaggtttgcagaagaaagtgatttttgtcacagtgatcacggaccttagcacatgccatcctacttggtttcatccttgggtgaatagatgttactgcccatcacaagaggtggccacgaaagcctcacaagatggccttgaggaatctcaaattcgagttttcggcttgcccattaggccttcttttgccagggcagttcttgtgaaggatcaattgagagaagaactcgggttggatcacaacttgcaagcagttttgctgatggggggtggtgaaggaatgggccctgtcaagaaaactgcaaaagctctcggagaagcacttttcgataaggaagctgagaaaccaattgggcagttagtcatcatatgtggccgtaacaagagcttagtatctacccttgaatctcttgaatggaagattccagtaaaggttagaggatttgagacccagatggccaaatggatgggagcttgtgactgcatcataacaaaagctggaccaggtacaattgcagaagcattgatcagagggcttcccataatcctcaatgactacatccccggacaagagaagggtaatgtgccttatgtggtaaacaatggagctggcgtcttcactcgtagtcctaaggaaacagcaagaattgtggccgaatggttcaccacaaaatcagatgagaggaaaacaatgtcagagaatgcacttaaactggcacagccagaggccgtgtttgacatcgtgagggacattcatgagcttgctgagcaacgagagccagcaaactttccatacttgttgacctcatcatttactagcctaatctgattgattatttgtgcttctttcacgttagctttcttccattaaaattgacatgtagagttagctttattgattatatcattctttatcctagtgatttggtttaactgtgagctacaaaattgtggtaaaaccaagctcaggttttataataattaaagatgcttgccaggtgatgggttgtctgtaattgcaagaagggttaacattctactaaaaactgtctaatgatttttttttcctaaaaaaaaaactggaattgtatttagcactaaaaactggctttgtaattggcttctttatcaggcaatgtaaattgtcaatggtcatcctttggaagaacgcc

SEQ ID NO: 7875 - DNA, 2061 bp, Glycine max
ggctcgacccccgcccccttaggcgcaacactttctatatttatcgtccattctctctcactccataattgcttcttgctttggtcgatccattcggtgatcactgatcagtggtttggtgttgttgatagagaaaatgcattccagccctttgcttcttgaggaacccattaggatggcatccatccttgagccatccaagcctactttttttccggctatgacgaaaattgttggcacacttggtccaaagtcacgatcagttgatataatttcccattgccttgatgcaggaatgtctgtggcaaggtttgacttttcatggggtgatccagaataccatcaagagacattggaaaatttgagagttgctatcaaaagtaccaagaaactctgtgcggttatgctagatactgtgggtccagaattacagattgagaataagactgatcacccaatcacccttgaagcagacacattagttgtcttaactccagatcaaaataaagaagctagttcaaatctcttaccattaaattttaccgggctatcaaaggctgtgaagaagggtgatactatttttattggaaaatacttgtttactggaagtgaaacagcttctgtatggctggaggtcagtgaggtggaaggtgaggatgtcacctgtctggtaaaaaacactgccacactctctggatcattgtttactgtacatgtctctcagattcacatcgatcttcctactcttgctgataaagataaggaggtaataagcacatggggtgttcaaaacaatattgacttcctttcattatatacccggcacgttgaagatattcgtcatgcacgtgaatttctctctaaattgggtgacctgaagcagacacatatttatgcaaagattgaaaatatagagggaatgaaacattttgatgaaatattgagagaagcagatggtatcatcctcgctcgtggaaatttagggatagaactcccacctgagaaggttttcttattccaaaaggctgctatttacaagtgtaacatggttggaaagccagttgttgttacacgtgttgtggactctatgactgataatctaagacctactcgtgctgaagcaacagatgttgccaatgcagtgttggatggaagtgacgcaattctccttggagcagagaccctgcggggacaataccctgtagagaccatttctatagttggaaaaatatgtgctgaggcagagaaagttcataatcaagatttgtattttaagaaggctgtaaaatatgtgggagagccaatgagccatttggaatcaattgcttcctctgcggttcgggcagctatcaaggttaaggcctctgttattatttgcttcacttcatctggaagagctgcaagattgattgctaagtacagaccaaccatgcctgtgatatctgttgtcattcctcaattgaagacaaatcaactccgatggacgttcaccggtgcttttgaggctaggcaatctcttattgtgagaggtctttttcctatgctggcagatccacgacacccagctgagtccagaagtggaacaaatgaatcaattttgaaggttgctttagaccatggcaaggcttttggcatcataaagccacatgaccgagttgttgtctgccagaaagtagctgactcgtcagttgtgaagattcttgagctcgaagattgaatgattacaacttatgcgttatttgatgcataataataaagattcttgggcttgtgtttgataatcggagcgatatccagttttgaaatcaagcatggtgtgctgatctttcggctacttatgttgtttaatagtaaaccatccgaattcgaaaacgaaattgattatcttctaatgaattttatgctgaaaagaaaagtatgaattataagacactttgtaaacactgagtgtgccagataaacttgtgagattattttagcttaatcatgagttcaaagtatacaattgtgttgaatactttgataaagttttatttgcctgcaataattctaattcgttct

SEQ ID NO: 7876 - DNA, 1573 bp, Glycine max
  misc_feature (997)..(997): n is a, c, g, or t
gaaagcttagctaagtggccatcatgttctcttcctaacccacgccttccaatccccatagctgcctgctccacaccacaatacatcatttagcaccagaaaaaaaaaacacaaaaatactttattccgataaataatagaaattaaaaagaaaaatgtcctggctcttcaagtccaaccaccccgacccagaatcttctaatctccacgaccgcaccgttatccactcgtcttcgccgccgcatcccgccgccgatcgccacggcgtcaaggacgacatatcgcatattttccgcggcgtcgccaacttcctcgctccgccgccgccgtcttcttcttcttcttcttcttcttcttcttcctccgcctccgccggcgattcctcctccttgcaagctctgaccggaatccggaacgatctcgtggagatcggcggaagcttcaagaactctctctcgcgcatttcctcgaacaaagccgtcaccggaatctccaagctcgcttcgcagttgttgcagttggagcctgatcaacaacggagcaacgatgacgacgcggtgcctggaacgacggaagatgttgttcgtttcgtgaaggagatttctgcgcggcctcagtgttggactgaattccccttgccactccataacgattttagcatgtccaattctcagagagaacatgcattggctatagagcaactggtacccgaattcatcgcactaaggctgaatctttgcagttacatgaatgtggaaaagttttggatgatctattttttgttaatacttccaagactaaatcagcatgattttgagcgcctatcaactcccaagattgttgaagcaagagatgtgcttcttcagaaactaggagagaggaaaaatttgcaagccggagaacctgaaaacccaaggactgtggatacatatcaagagggtagggaggaccgtggaacagaaagtatctcatttgagcaaaatcagatattgactgnggttacaaacgcagtagagggttagaagttgatgacacggttagcactgaaaaatggttggaagatacagacattgaatgctagttcattggcttcctgtacaaaacttcaccaggaagaggacgtcctcattcagtgccctagaggatgataggagttatagctccgataaattatccggctacagggaggcgcatgacataaggggttcatcacctgaaggtgctactagtgactgggttcggctgcgtgaaagttctgagagagatggcaggaagaaggttatccgtttgaagggtaaggattcagaagatgagtcaaatgattggctcactgttgatgatttcaattagatagtcttttcttgattcaccaagttgtaaaggttcgatatttacccccttccccgtggttctgtatttagggagtacaaaattatataaatcaaagtatttcttttcttattcacacgtacatatttcttgtttgtacaaggcatggggtagacaacattcaatttttgaaagtgtacaacgcaaataaaatcaaggatttcaagaataattgtaatttgta

SEQ ID NO: 7877 - DNA, 1124 bp, Glycine max
ttagaaggacctaaacgactttttttttgttgtggttatcatcaatcattttgacaaaaacttgcacaaaatcacatttgtacaaaatactctccccatatatgatgtttgcaaaatgccactgctactaatttattaagcaattaagcaaacctaacagtttatggtatcagatcaagagatcaaatctcaaaaagtataaaacaaattccagccacagacagaaattaaagcagggctatagcatactcttctaatgctaacagtaaaataccgcgagctcacaacagtatgtttcaaatcacaagttcttgaaaggagactcattactcacttcttttggggtcagtctagccagaagtgccttattgtgacagtgctctgcatccacgaagtaaaaattcccattggccttaaatgtcacaaaaggcctattggtttgcggtggtcgaatatcagaaaacttgatagtctttggaatgtaagttgccagccaggacagcatctccacctcaaagctgtccgaacctggctgccacctgagcttgtgaacatacgggctaacaaaccaatggagggcagcggtggtagtagcactcaagaatatcacagaagatgctactgcacctttcaggatgacattcatatcgggggatgtcatgaaggttatgaccggaccaagagataccgaaaggcaacaagttgagagagacagaagttttactttctttatggtgtttgagatcgggccataataaacgactccagtttccttgtcaccctcccctggttgtcctccactacgaggtccgatgctaatcttgtcgtcttcctctgtagttgggatttgtgatgcccatcttctttggaaaatagcaagatgggaggaagttttgaatgatggattggggctaatgggtcgttgacaggtagaggacccaaaacaacgatatgctgaaggagcgtttttggacacgtggcggaggctctgtgaccgcagcaagtgaaggagagtcgctcttgccattgctgctgcgcttccgagttacactgtctcacaccacacgacacactccaagtttagggccatattgtgcaagggtttttgtttgtttgggtttctt

SEQ ID NO: 7878 - DNA, 890 bp, Glycine max
agctttccatctccatcactatggaagtagcgaatcatatcaactacttttggtctgtcataaaaaatcatgagctgtagctgccctatggaaaatcccctcacacttatagttccttttcctgcttcatctagctggaagaagtgtacaatgagctcatcctcagtcagttgcagccgactagcaaacgattttttgttcttctttcttcccttatcttcttgaacatgaccgcttccctttttctcggtcttgctggtgttcactacattcttgtcaggcaaataagaaccttctgcagagtcttgcaaggaaagagcaattgcctgcctaagagcttcatcatcatcgtaatcaatgtactctgaattactaacatgtttcttcccagaaactctggctttctttttcaaacttttgttcttcacctttcttttccgtgaccctgaagcgttttcaattgcaaagtcctcgtctttacggtcctcattttcttcacttgaagaacccgatacttgttctccctcgtcttcttcgggttcatattcttcatcatcgtcatcgttaaccttattcttcttctctttgcccttcgtggctttatgaggctgcgaagaaccctttaacgaggaagcgatttggggcaaacccagagcctccaacctggctctgttctcggcaattctcggcatcctctgtttctcgtactccgacaaacccttcttcttcttcacaccattgccctctaccgtttgtgcatcctcgtactccgaccctgaactcgaggggtcctcggattcggaggtttcgcgttccgccattttcggattgttctgtgctttttgctattctctttcgacggggggggggggcctacgtagctgagccgt

SEQ ID NO: 7879 - DNA, 2699 bp, Glycine max
ggggtgagagagcatgccagcgaaccaacgagcctatgaaacagatcacattttacgtccttttcaattcaacaattcacagaccaaccccctaaatctccataattggttaatacattctctctctctctctctctctgtggataagatcttgagaatatcacatacagatggaccccacttcctccattaaaataacaatatccaacacttctcaattccataaactgagaagaacccatttgattctctgcagaatctggggttgttcctgctttggtctggtctctcagctctgatagattggcaccgattctgggtgtgagccaaaaaagctttcttttgtttcctctatttttcttttcggcaaagtagaagatatttgtggtgagtgcggtgtggtggttgggttgggcgttaaataaataatgcgtttccggtttcggtgatgtgtttgcatcaatgcatggttcctgctagtgatgcttttgtcctcttcctgtcttttttagcccgctattttgtcttaaactctctacttagcagattcattcattttgctttgcgttttttttttccttggtttctccggtgattagttatgttgcttgatccatttgcttcactgcatgtgtgtgtttaaacacttaaatttcttgtttttcttcggcaaattggtggattgtcttcggtatggtgtaatttactgttcaattaagaaaaatgggggtatcaatcggattacagaaagagacacggctttttctgcagatttagccacagacttttgatatattcgaggactttctaaatttatctccttcactccctcttatcctctttttgtctcttctttcttcaggttcggacctttattattattattatttttattattctttgtttcttcgattcatctattatcttttggtttcctgaattcattctctctctacggttatcttatcttattgagtgccatcttctgtatcttcctcaactggattctgcgtcttcttttaagtggaactaggcttgtttcattttagtatttgattgctaattttatatttttgtattttgtttcatttacgaatctagatgaggcctaaggttagtgagggagttatgtcctttatgttagattcaatcaccttcccctttgtcatgctgatgtataaatggttgcctttttttgtcccccatatgtccagattttcttctgtgaattgaattcgagtcgttgcttctggcttcggtgcttgctgttttgttggcacaagttattggtccaattgaaatgaaagagtttgagtgaaaaggagacttagactgtgtggtctggccatggagaattcttataaggcaaatggaaatggaccaactgagaatggttactctgttgcaaggcattcttatcaaccctccttgaaggggtcattaccttggctggacataaaggtgttttatgtaagagtgtgcaagtgtgagcttgatgattccactcctggatctcttacactgaatcatgttcctttgaatcctgacactcttcttgaaattaatggcgttcgtactagtatatattctgatgggatgtcaacccttctcaagagagacagggtagatagaaaatcagaagaagtgacatttgtaagcactgatagcataaggatgagtggtagtgtcaagttcgaggtgtttgataaagatgttctgctgctttccggtgctttagaattgtgtaataccaatggtgttgttggggaatcaagttataatggacaaaggtggaacatgaactgtgagtcatatataattccaggcaccagcttctttaaggggaaacaattgctgttgccagactcaagtctcccaacaattgaggtctacattgccggctccttctcgagtactccaattatcttgacaaaaaccttgcagctttctcagaaaaagcatacaaagaagggagtattggatgcaattccagagcatgaggccagtgaaaatgggaaagatatttcttcagcccatgctttgcaggccccagattacctttacgacaaacatgaagatgaagattataatagcctctacccaggaacagcatatgccgatggcgaagatggagaactttcatggttcaatgccggtgttagggtcggtgttggtattggacttagtgtttgtcttggcattggcattggagttggcctgcttgttaaaacctaccaaggcaccactagccactttagaagacggctgttctgatcggggcttctatttaagcttaaaactctctgctttttgttcatctccctcttaatccaaagacagctaaccttatttttgtccatctccctcttgagtcttgatccaaagacaacaggttaaatatcttgtccatctgagtggagggttttttttttttgctgtatgtaatatagtttatttttagtgccattctatgcgaggtatgatcttaacttcttaagtaaaacagcaagaactaagaagtttttgaattatttgccctacttattaaggtgttgaactggtgaaagcatgattagtttagttttgactttcctattgatcgtaataatcctccttcaacaaagtaataagaaactagtcccaaaatgtatctatggtattaaaaaaatgtattttctttgaaaaaaaaaaaaaaaaaa

SEQ ID NO: 7880 - DNA, 1495 bp, Glycine max
tcgatcagctacgtaggccccccccccccccataaactgagaagaacccatttgattctctgcagaatctggggttgttcctgctttggtctggtctctcagctctgatagattggcaccgattctgggtgtgagccaaaaaagctttcttttgtttcctctatttttcttttcggcaaagtagaagatatttgtgattttcttctgtgaattgaattcgagtcgttgcttctggcttcggtgcttgctgttttgttggcacaagttattggtccaattgaaatgaaagagtttgagtgaaaaggagacttagactgtgtggtctggccatggagaattcttataaggcaaatggaaatggaccaactgagaatggttactctgttgcaaggcattcttatcaaccctccttgaaggggtcattaccttggctggacataaaggtgttttatgtaagagtgtgcaagtgtgagcttgatgattccactcctggatctcttacactgaatcatgttcctttgaatcctgacactcttcttgaaattaatggcgttcgtactagtatatattctgatgggatgtcaacccttctcaagagagacagggtagatagaaaatcagaagaagtgacatttgtaagcactgatagcataaggatgagtggtagtgtcaagttcgaggtgtttgataaagatgttctgctgctttccggtgctttagaattgtgtaataccaatggtgttgttggggaatcaagttataatggacaaaggtggagtatgaactgcgagtcatatataatcccaggcaccagcttctttaaggggaaacaattgctgttgccagactcaagtctcccaacaattgaggtctacattgcgggctccttcttgagtactccaattatcttgacaaaaaccttgcagctttctcagaaaaagcatgcaaagaagggggtgttggatgcaattccagagcatgaggccagtgaaaatgggaaagatacttcttcaaccctttctttgcaggccccagattacctttacgacaaacatgaagatgaagattataacagcgtctacccaggaacagcatatgctgatggagaagatggagaactctcatggttcaatgctggtgttagggtcggtgttggtattggacttagtgtttgtcttggcattggcattggtgttggcttgcttgttaaaacctaccaaggcaccactagccactttagaagacggctgttctgattggtgcttctatttaagcttaaaatactctgctttttgtccatctccctcttaatccaaagacagctaaccttattttttgtccatctccctcttgatccatagacaacaggttaaatatcttgtccaactgagtggaggtttttttttggcttactttctgtatgtaatatagtttatttttagtgcaattctatgcgagttatgatattaagtaaagcagcaagaagttttctatt

SEQ ID NO: 7881 - DNA, 883 bp, Glycine max
tacggctgcgagaagacgacagaaattcatcttaagcttgttctctctctctctctcttgttacacattctacattctctctctattatttttcaccctttttctctcttttgcaaagaaaacaatttaattaagtcaatttgtaccaaaatggcttctcaagtttgtgaaactttggctttcatcaacggtgatgatgggttgaaaatcaacggtgctcttctaatgtccctgatggaagagccatcaccaagtgatgagagtgatgatgatcgattggatagcttgattaggtcctttgaggctgaaattagtggaagcaagatgggggatcatcatgattcatcatccatagggtcagaaatattgatgagcaataatattatagaagagtgtgcatctcaatcatggaataataacatgggagagattgatggagtggagtgttgggctaattcatcatcaagtgaatttggggtggagtgggtagatatggattttgtgcaatcatccccatttgaagaaaggagctggagtgttgacccttgtggagatgagtatgctatcgcaaacaacttgaaagggtatgatgggtttgccttgggagaacatggatgcaattccttgtggcaagacatggcatgcaattgatcatgccttgctaatttatgatattgttcatgtaaaatcatgttgtaatcctcaaaatgattttataaaaaaaaatgggataagattatgtgcaaaagaaagttctttgacatgtcaaatgatcttcactagacaataaaccaacaaaggaaagatagagagagaaaaaatctctttcatgactttttttttccgaaaaaaaaaaaaaaaaaaaaaacgaaaaataaaaaaa

SEQ ID NO: 7882 - DNA, 827 bp, Glycine max
tacgccccgattcatcttaagcttgatctctctcttatcacacattctatattctctctctattatttttcaccctttttctctcttttgcaaagaactcaatttaattagtctatttgtaccaaaatggcttctcaagtttgtgagactttgactttcatcaacggtgatgatgggttgaaaatcaacggtgctcttctaatgtcatcattgatggaagagccatcaccaagtgatgagagtgatgatgatcgattggatagcttgattaggtcctttgaggctgaaattagtggaagcaagatgggggatcatcatgattcatcatccatagggtcagaaatattgatgagcaacaatattatggaagagtgtgcaactcaatcatggaataataacatgggagagattgatggaatggagtgttgggcccattcatcttcaagtgaatttggggtggaatgggtagacatggattttgtgccatcatccccatttgaagataggagctggaatcttgacccttgtggggatgagtatgccatggcaaacaacttcaaagggtatgatggatttgccttgggagaacatggatattacaattccttgtggcaagacatggcatgcaattgatgatgccttgctaattgatcatgttgtaatcctagctcaaaatgattttatgagaaaaaaaaattgggatgagattatgtgcaaaagaaagttctttgacatgtcaaacgatcttcactagataataaacaagcaaaggaaagagagaaaaaaaaataatctctttcatctcttttttcataaaaaaaaaaaaa

SEQ ID NO: 7883 - DNA, 1009 bp, Glycine max
cccacgcgtccgtacggctgcgagaagacgacagaagaccgcgcgaacgaaggggaaagaagaactgaagaggaatcagaaaagaagaagaagaagaagaagaagagagtgagggcaaaaaaaccctagaaacaaaatggcagaaaaattagccccggaaaagcgtcacagcttcgtccacaacggtcaaaaggtgttcgagtgggatcaaacccttgacgaggtcaatatttacatagctcttcctcctaacgttcattccaagcaattctactgtaagattcagtccaagcacctcgaacttggcatcaaaggcaaccctccgtatctcaaccatgatcttactagcccggtgaagacagattcttctttttggaccttagaggatgacataatgcacataacactgcagaaaagagataaaggtcagacatgggcttctcccatatcaggtcagggtcagttggacccttatgctactgatcttgagcagaagcgactcatgcttcagagatttcaagaggagaacccaggttttgatttttcacaagctcaattttctggaaactgtcctgatccaagaaccttcatgggtggaatccgatcagactgatgatcttggatgctgtaatttgtatttgtctgctctaagatgatgatcggatggtaataatctgttgtggtatttgtctcctcattgttagatgtcatttaattatggtagtcttaatgcacttcctctaatctgtattgacatcttgtggtatttattaatctcttctctgacccttggcatttaaacatgtatataaaacatggagcattttttagccagacttggacaataataacttaaggtctgctgtactattttaaagtcttctatgggtcaccgattatcaaaccagattgaggaagggttggatgggatataaaatatgaactttctggttggtggtaagtacactgatcgtgtcaagcaataaaaagtaagaaaagtattgttttc

SEQ ID NO: 7884 - DNA, 1040 bp, Glycine max
atgttttcattatataaaaataaaataaaaataaaaacttttctttgtttctcttttctttgtattagccttttgttgtagatggcattggggagaaggagtggactctttgctcttgaaaagcattttgctttctatggagcataccacagcaacaaaattaacatagcaatccacgtgttgtttgtttggccaatttttttctcggcccttcttattctctattttgtccctctccctcccttattcaaccttcaaaacttggagttttccatgtgggagaactatgtgatattggtttggaatgttgggtttttggttgctttgctctactcagttttctatgtttctttggatctgaaagctggctctttggctgctttgctttgtgctctttgttggattggtagtagctttgttgcaagccaacttgggttgtctctagcttggaaggttgttcttgtggttcagatagtatgttggacagggcagttcattggtcatggagtatttgagaaacgagctcctgctcttttggataacctcattcaggcctttgtaatgggtcctttctttgtattgctagaggttctccagactttatttggttatgagccatatccaggatttaattcaacagtgaaagcaaaagttgaagccaacataaatgagtggcaagaaagtaagcagaaactaatatcttagcttcttcttaagtttgtgcatctttaaaagttaaatgatctcccccaacagaggaagaataaaagctacaaatgatcatatatgtatggtactagggtatatatgcctttcaggataattgtgtatatgccttgtatatttgttgagaagacacagtatatcatattatcatgggcatgctactatgttattctaatagaagcatcgactctgtattttgttcgtgtggtttgaatactctctttggacgtggcaatatatgaacaggtgattgtgtaaaaatgtttacactaacatttgattgctcaaaattaattggtataagaaataacatt

SEQ ID NO: 7885 - DNA, 2276 bp, Glycine max
ccggattccccgtcgacccacgcgtccgggcaccttcattccaagtggagtttatcgtaaattcctattgggttcaccatcttgacccacaaaacaggggtcgctttaaccgccagtttccaaacaatctatgggggcggtaatgaaatgaaagtgcacctacaacactggttttgcttctttttttttttttttttcattgctctaataactgggcagctcaaaacagtagcacaataccatgccacatgcccctagttttcaaaccatgatattctctctctctctagctattaatataaactatcatctttaatttcttcctagacccctcgccctcatgcacttctgcactgttatttattgctaaactaaatatcaatatcaattatcttcttcctctttaagtcaaaccataactattccatttctttccaccccacagtttctgaattctgggtgttgagtttcattttctccatttttttttatctcccttggatgtgttattttcaatccaaaagaccatgcaaaaaactatatttgagaatctgaaagagtgactaggtggtctatctgatcttgtgaagtttgtgtttgtgtgaaaggtgtgaggcttattattcagaagagtttgtgtttgttcacataattgattgtggtgtggtgtgtgtcggtggcaatggaggcaagtttggtggagaggggtagagagagagctggacatgttaacaaggttggttatgttagaagggtcattgcaaagaagaagaaacagctttatcgaagggttaggagacctgagttgagtgtttcaaagacacttcaccaattatttgattcatgcagagaagctttcaaaggccctggcactgttccttcaccacaagatgttcagagattgactcacatacttgataacatgaagccagaagatgtggggctaagtagagatctgcagttcttcaagcctggaaatattgtcaaagagaaccaaagggtcacttatacaaccgtgtacaagtgtgacaatttctcactctgcatctttttcatacctgaaggaggagtcattcctctccacaaccacccggacatgactgttttcagcaagcttttattaggactaatgcacattaagtcctatgattgggttgaccctgaggcctctgatgataacatgttgcaaccacaatctcaattgagattggcaatgttaaaagttgataaggtgttcacatcttcatgtgacacttctgtgctgtatccaacaacaggaggcaacatccatgaattcacagccataaccccatgtgctgtgcttgatgtcattggccctccttattccaaagaagatggaagggactgttcctactacagagatcacccttatacttgttttcctaacgaaaggattattggtgaggcaaaagaggaaaatgatagttacacgtggctggaagaaattgagatgccagagaactctgaaatgaatggtgttgagtacctgggtccaacaccctcttagtgtatgtttgggaatcacttgaatccaactccgatggtctttcaatgaaagctacaatatggttgctttgaaatttttacattggaacgtgtaatttctgggtgattttaatgctaattcaaacacacccttagtagtaacatcttaccgtgtactactaacgctacggatcatacacagaatctcccgtcgctttccctttttgtccacattcaatgaatgcgtgctgcacgtgttggcttttgttcttttatgttgaaaatgtacctataattcgcacatttttgctatagttggtatttataacatcatgggacttgttgtcatgtataggaaaactatgggcttgaggtggttcagctgtcaataagttgggagtttatgattcatcctttccggcttcttttgttactttttttttttttttttgcaaagggtccacagtggtaactttattgaacaagtggtgaacaaggttgactcacttgttatggagagaaagccatccatgacttgttatggggagaaagacatccatgacaggcaatacttttatgtttgtgggaaaataaatagatattacttattagagtgaattgcactttagattctttaatattgaacacgtctttattttttagtaaattacacctcaaccatgaggtttgtcctaattacattcgatatttttttttattttgaatcgtacaaaaaaaatcttttaatttctggatatttgttacaattt

SEQ ID NO: 7886 - DNA, 3546 bp, Glycine max
cccgcgtccggccggatggagtctacagcgaaatgaaaaaaggaagcacaaaaacataacttaaaccctcccaatcccattccaaagtctatgcacccgttcgcccttacaaagtgccggctgtctcagaaagcaatgttgtcaaatagcggctatcacggcgctatcacgctatagcgtagcgggttttggagaaaacgcaattgcaacggcgtcgcgttgcggattccgcgagaatcgcgatccccggagtcttacgcgtcgcgaaaccacgttgggtcgtggctgttgcgtcgtcggtttccgacaaggatgaatccggagagaaactgcatcgacggcgacggcgcgtttagggttcatcgtgctgactgctgaaagaggaaaccgggtcggagcggatgcgggtcagtgcggattgcagttgttttgggcttgcagaatgctcacaagggcccaaaagtagccttacttctacttcacgtaagttttttccagagcattctagaacctctcatttcctctgattcttagtcaccacgtagccttcttcttcgcccagcctctgtttttttacgggtaagattacaacttttttttttcttttgtataatacttctttcttctttctctgttttttctttcttcttcttcttcttcttcctctgttttcttgatgctggggcaggggcagagcagaataaatagatgttttcttgatgcttttagctttttttgattatatgccttaatgggacttgtttagcttatatattctatttcaaccgctatgggccttcgccttctgctgtttagctgcgacgctatccgctatattctgtagtggccttttgcgattttccgcgatccactactgacaacactgccagaaagtgaaaatgaagagaatgatatcgttgaggtttgagggttcagcaatcaagattggtgttggggtagtgaccttagatgacacaagatttggaatttattttaaaagaaaattgaaccaaaccgaattgcatgtcttataagtttgattcaggtgatttttttatgaaaaaagaatcaaatcgaggcacaaacacctctaatgcaccgagcagagcaaccagaatgggatatttgtaggaaaagaatgcggaagggggaggttcatatagtaactgtcttcaattcaacgcttaatctgtgattctctcgggttatgacccgacccagttcagcccagcccattgtacatttctctttgtgacagtcacactcattctattttgccttaacctactctactgcattctcaggcagtcgggctgaactctgaagatcaaatcattgtgagtttttaataattgtttctttgttacatcaaaatgttaatcgcgcagggctatttttcttaaatctgtgtatgtaaatttagcttgggatggaacaacgggatacaaagcttaatcttcaatcacattctgttctacaattttgcataccttctggtgtgggttttgtgatattcactctttcttaggtttcacttttgatgtttacatatctgcatgtgattatatttttgttataattttgctttatttgtagtcctagggtatttgatttctagctgtagtttgagatctgattttgcatggagtaatacccttcctagtggtaggagaatatttctcacttcgtttaaattgtcttaaatccaaatttttacatatgcagagcatttattgaagcaaagtgtggattctgataactacaagtgcaaagggcatctttctgtgctagttatgctatctgtaatcggtttatagtatgttccattggctttttggtattgcaagaaattttggttttgttcgtggttatcaacaaggatacatttaccagcagaagtttagtctggtgaacataaagttgaaatgggtcccacgcggcccattggatgctgttgttactggtcagagggatcttaaggcagctgggattcttgtctccatcatttattcttcttctgaatgctgccttccaatataccatctttctcgccaccgtggacaacttggtcttcccagtgacctcaaactttccacctttataagaagatatcccaacatatttaatgagtcctcttttcttgatagtggaggctctcctgttccgtgtttcagtttgagtcctgaagccttggagctccatcatgaggaagtcaacatccttcagcaaaatcagttggaactcagggataggctgtgcaaactgcttatgctcacaagtgataggatccttccactacaaaccattgaccagttaaaatgggacttgggtttaccatacgattaccagcattcttttgttccaaatcatcctgaaagtttcttatatgttcgccttcctgatgatcgtattggcctgaaattgttattttgggatgacaagcttgccatccctgagttacagaagaatacttctctacaacaaaaggcagaagacataaaaaatggatccttagaatttccaattagtttcaccaggggttttggtttgaaaagaaaatgcatggagtggttgaaagagtggcagaaactcccttatacttcaccttacatcaatgcctctcatttggatccccgtactgatgtatctgagaaaaggatagttggagtcttccatgagctccttcatctcacactccataagcaaaccgagcgcaagaacgttagcaacttgcgtagacccttggccttacctcagaagtttactaaagtatttgagcgtcatcctggtattttttatatttccaagaggagtgatacccaaacagttgttcttagggaggcctataatggtcaggaacctgtgcagaatcatgcccttgtacaaattagagaggaatttgcaagcctgttgaagaaagggctattggataggagtaagggtgtatacaaaaaaagcagacacactaatttggtggagggttttagaaaggaggtttgcattgctaaaaaaactaaccagcttagttctcaggatgaatcagattccatgttttctgaatatgattcggatggccctccacaaaacccatgctgatatatgtgaatgtgatatttctctttagccattatgttaaagtggtttggcttattgacaatcttgaaatctggcctagatgggggatgtttgcattttactatttttcacccgcttttgcctcttgtgaagatctgtcaataaccaaatatgtcaacaatgctatcttcttagcaagggagagcattttctgattagatgtaatattctggaataagggttactgctcaatctcattttaagattagatagacccaggtatagctacaattcattttaccgagagaaattttgaatatctcaaaatctttatgggagttcaaaatgtaatttaaaaacaatgactagatacctatagttttagagcatctttttttcttggggttgtgggaggtgtttgacaaaaatcactattatgatataatttggttaatccggtattctattctt

SEQ ID NO: 7887 - DNA, 1947 bp, Glycine max
gccggtctcccgaacccgatattttccaaccgttaactctttcttctctctctagtctctcccctcgcacagataccagtgacagtgtgagtgaacaacaccaagcttcatgttcgttgctctcacataatgttgttaaattacagaccacttcattttgttttcctgctcacatttttcttgtccgcttcctgtctcttgtcacaccaggcttcagggacagaaaacgagggaaaaaacgttgttggcctttctcggttgtatgtatttgctgctgctccgttcgagagctcgccctttcccttagctgctgagagaacacgaagaaaagaccctcttgatggcttcaataagtacatttatggatggaatatcactagcagtgattattgggcttctgtggcatataccgcagctcctttgttcagtattgcagcagtctggttcttgggctttggcttatgcttagtgatcatcggtgtttgttacttctgtcataaaagagagccatatggttattcaccaacatgctatgccctttcccttattctcctgatattattcacatttacagcattgattggatgtgcagttctctacattggccaaggaagttttcatcatagcatgacacatacattgcagtatgtggtacatcaagctgattctactgtggataagcttaggaacgtgtcagattatcttgctcaagctaagcaggttggagtcgatcgagtttttctccccacaaatgttcaaactgatattgatcaagcagaaacagatatcaataactctgctagcacccttgctgataagacaaaggagaactcagacaacatacaagatctcttagattctgcgaggctagcacttatcataatagctgctgtcatgctagtcttgacatttcttggatttttattctcgatttttggcatacagctccttgtgtacatcttggtaatcgcaggatgggttcttgttactggcacccttatattatgtggcctgttccttgttctccataatgcgacagcagacagttgtatagctgtgaatgagtggatccagtatccgactgcacatacggctatggacgatattctgccctgtgtggacaatgccactgcacaagaaacattgtcacgaagcaaagaagtaacttctgaactagtcaatttggtcaaccaagttatcaccaatgtctccaacttaaattttgcccccaatttcactccactctactacaatcaatctggtcccctcatgccactcctctgtaatcccttccatcctgacatgacggatagacaatgtgatgctggtgaagtcaccctaagcaatgcaacacaggtgtatggcaattttgtgtgccaggtttcaccatctgagatatgcatgacacaggggcgtttgacccctaccttctacaaccaaatatctgctggaataaacgtgggcaacgccttgtatgattatgctccgtccctcattgagctacaagattgcaccttcgttcgagaaactctaagcgacatatccagggaccattgtcctggtttacagcgttatagtagatggatctatattggattggtaatggtctcttttgccgtcatgttctcattgatcttctggatcgtgtatgggagagagaggagacatcgtctatatagaaaagagtcaaaggacttcactcctacacatgcaccagcaccagcaccaggacaagcattagcattggcccagatccctgaaggataattaagcaaaaactaattgataatgatgttgctagttggtggatgaacatgtgtgaactaagtttagccttttttcggtgttgggtgtataatgttgtagcttcttttgtatgacacactagttttttttttataatgaaatatcattattttaaaaaaaaaaaaaaaaaaaaaaaaaaaa

SEQ ID NO: 7888 - DNA, 1919 bp, Glycine max
ccaattcggaagtgcaagcgcagagagaagaatgaacaactctattatggcttttgttctgctaatattactttcggcgttacgctactcaagcgccgaacaagctttcgatgttcgcaaacatctttccactgtctccagatatggagttgtgaaagacatcgctgacactaacttcgtgccttctaaaatccccgagggatgtgttccgatccatttgaatctcgtggcgaggcatggaactcgatctcctacaaagaaaaggataaaggagttagataatttgtcagagcgtctggaagttcttgtaagggattcaaaagagcgaaatttgcctttccagagagttccttcctggctaaatggatggaaatctccttggcatggaaggcgtaagggcggtgaactaattaccaaaggagaggaagaattatatgaatcttggaatcagaattagagaaaactttccaaatttgtttgatgaggaataccatccagacatatatcctattaaggcaactcaggttccccgggcatctgctagtgcagtcgcatttggaatggggcttttcaccgcgcgtccgagtcttggacctgggcatcaccgagcctttgctgttacaagcgaaagccgtgctagcgacattgtgctgagatttcatgattgctgtcataattacaaggcttatcggaaaagccaggaatctgcagttagtaaacttaaggaacctatcttggatgagattacatctgccttaattgggcgccatgggctgaattttacgaggcaggatacatcttctctctggtttttgtgtaagcaggaagcatccttgttggatataactaatcaagcgtgtagtcttttccgccctcctgagattgaattgctggagtggacagatgatctggagatgtttattctgaagggttatggtaaatcactaaactatagaatgggactgccattacttgaagatgttgttcaatccatggaacaggctatcgtggctgaagaagaaagacatgttcctggaagctttgaaaaggcaagacttcggtttgcgcacgctgaaactgtagttccattctcatgcctgcttggtttatttcttgaaggatctgagttaaaaaaaattcagaaggagcaacctttgcagcaccctccaaagcctccacagaaaagaaaatggcggggtagcactgtggccccttttgctggtaacaacatgttgatcttgtatagttgtcctgctccagacaaatctaccagcaagcactttgtacaagtgttacacaacgaacaccctgttccattgccaggttgtgatggctccgatttctgtccatttgaagtattcaaggaaaaaatagttgcacctcatcagaagcatgattaccatacagtctgtaatgaaaagctagagcaggagccctcgggcaacaaggtttttcaaatatttcagtggcttttctcaccaaggaaaggtgataagtaccctaaaaatgaactttagtttgtttcctaggaaaggagcctcaaatcttacgctcttaataattcagacatgagcgcttattccttctagcagataatcaattttacttagattgtgctgccagtacaggaatgcctttgttatcttaagcttgatgcccgagtcctcctcgtctgtagcttctaacattaagagaaattgggggtggaaagtttagttctaatttattttttttccttagtagcgttactcttagtactcggctgatacctcagataatgtagcttgatgtgtcatactgtgcacactcttagtttcattaactgtctcttgaactccatttttgttctttttgaatagtagataatggaccaggtaacctttgactataacaaaaaaaaaaaaaaaaaaaaaaaaaaa

SEQ ID NO: 7889 - DNA, 2209 bp, Glycine max
  misc_feature (31)..(32): n is a, c, g, or t
ctggtacgacctcgcggttacccggtccggnnaattcccgggggcgaccctcccgtccggggagaggctggataggactcttgcctcgcctgatcttgcaaatgatgagatgctcaaaaagcttgtcggaagtcaactcccaccttcttcagaacctgaagtagaaggatttagagataaattagtagaaaccaagactgcggaggtgtctcactttcttgatatgttgaggagtgcttcttcagatgatagcggaagatcttatacatcacacactgattggaaattaaaacaagatggtgacgagtttcgtgttatgtatcgtgaaggaccagaaggaactccctttcatacaatgcttgtagaaggctttgtagatgggcctgttgatgtttgtttatgtatctcttgggagacatgcctttacaaaaaatggtggcctcagtctactattcccactttcaaaatcttatcagctgaatgtttgcaaaagacccggattggggaacaattatcactagtgagggtgaaggtttcatggcctctgtctctgagggaagctatagtgcactattatctgtttgagtactttcaagatgacttaattgttgttcttacaaattcggttccggattcaaagaatgccacaggaaccctttgtggtttcaacaatgaggcaattcctgaagcaagagaggttgtgagagttgatttggtgggaggctttgctttgcaaaaggtgacatcagaaagatgttactttcggacaatagcaaatatggatataaagttggattttgtgcctccatcccttataaactttatttcaaggcagctcattggtaatggtttcagactttatcagaagacggtgtcttctatgacaagccacgataaaggggaattcaataaggccttgggggatccattatatgttcgaattcgggaagctctatataacactagtggatcaaaggccatgaatggtaaagagcttcagcaagttgcaagtgttctccctgctgaagatcttgttgaaagtaagcagggtggggaaaaagatgcatctaaggaagatatgagtaatcaatatgcaaataatgtcatgccaatggcagtgaataacaaagtactagatagtagcaaaacctttaatgagattgtagaagtagattgtgaagaaattgtacaaggtaaggaaaaaaatgcatctaaggaagatataagtaatcaatatgcaaataatgtgatgccaatggcaatgaatacaaaagaactaggtggtaggaaaaaatttgctgagattgtagaaatagatattgaagaaattgtactaattgaggaggacactgaagaagtaaaagacattcaaaataaggaagttgaaatgagtgtactaaggggcaagaggagtatatatatcagatcagaggtagaacatgctctagaaacattagaaaaagccatttcaatggttcgtgaacagcgacttcattctcgggtggtatcttctagcgttgccgacgaagagtccccttttatgaaaaatgatgataaagttgatacatattcctcaaaactcactcaaccaagttccaaaaatgaggttagtgttgaagtacctaatggagatatttcggagggagcttcgcaagaagcccttgggaataaccctggcatccaaaattcaaggtgtacaggaacagatcctaactcaaaggaagtaaattctaacaaagtagtaccaacttcatcagagcagaatgtttcaacatctattttgttaagccaggctgtttcacatcccttgggaaacggagcaattctggaccaaacaacaatcagcaacaagcaattaaacactgattcagtccaagacacgtctttagatcatgcagacaagtcaagcaggcagaaaaaactaaacaccattgtaactcaaagtatgaattcagatgtaccaaagaagttaagcaggcagaaaaaatttctgttgttttgttgttttctgcattgactaaagagaaaaggttaattggccatgaacagaggaagaaaacagggaatttgtataccttaattggtcgtgtatactgacagggttctcccttttgttttgttggaagaatcttctctctccaaaaaaaaaaaaaaaaaaaaaaaaaaaaaaaaaaaaaaaaaaaaaaaaaaaaaaaaaaaagggcggccg

SEQ ID NO: 7890 - DNA, 3373 bp, Glycine max
  misc_feature (11)..(12): n is a, c, g, or t
  misc_feature (17)..(17): n is a, c, g, or t
  misc_feature (23)..(23): n is a, c, g, or t
ctaactttttnngaccncctagnatcagggactgccttcgatgggcgtttggacatgcgtatgaggcaggcagcaatgagtagggctagcgatggaaatcatcaaggtgatcttctatatgatcattttagtgagaaggatgattttcggtttgactttatggctgatactggcgatggtgggaactcatcttatgctgttgcacggctgcttgctaagccttttattcggacactgaaagatgattctgagcttaccttgccacgtggaaacttgctacttatggggggtgatcttgcgtatccaaatccatcagcattcacatatgaaaggcgtctctctgctccttctgagtatgctcttcaacctcctccttggtataaagcagagcagatagctgtgaacaagccggaggtaccctttggggctcaattaaaacagtacaatggacctcaatgttttgttattcctggaaaccatgactggtttgacggacgccaggccttttttaaatgaggtatatatgccatagaagctggttaggtggatggctcatgccccagaagaagagttattttgctttgcaactccctaaacggtggtgggtttttgggcttgatctagctcttcatggtgatattgatgtgtaccaattcaagttcttttcggaactgataacagagaaagttcaagacgatgactctgtgatcattattactcatgaacctaattggctcactgactggtattggaatgatgttactggaaagaacatttcacaccttatttctgattatttaagaggaagatgtaagcttcgaatggctggggacttgcatcattacatgcgtcactctcatgtaaagtcagatgggcctgtacatattcaccatcttcttgttaatggttgtggtggtgcatttctacatcctacccatgttttcagtaaattcaacaaacttgatgaagtttcctatgaatgcaaagctgcatatccttcctttgaggattcgagcaggattgcattgggaaatatcctaaaatttcggaaaaagaactggcaatttgattttattggtggcattatatattttgtattagtcttttcaatgtttccacaatgtgagctgaatcacatcctccaagatgatacattttctggtcacataaagagtttccttggtactgtgtggaatggatttatatatattctgcagcactcttgtgtgtcactagcgggagctatactattactaattgcggcatattcttttgttccacccaaattgtcacggaagaaacgagcaataattggagttcttcatgtttctgctcaccttgcagcagcactgatacttatgttgcttcttgaaataggtgttgaaatatgcatccagcataagttgctagcaacttcaggtttggtttttctatatgttgaacaatttgtattgatacaacgttttgtaacttgttttgctcaagttgataaataatatatcttagcttaattttaaattacacttttgatccttttagtttcacgaaattcctattttcgtccccacttttaattgcaacttgaagttttgaaatcaacacaatgaagtccccttgtcagattgacattaacttagcattcttttgctgatgtggtgttatgccatgccatttccaaaagtccagcaaatagaatcttatcattcattttattgaaaataatattggcatgtcagctgactgccacatcagcactaatctgagggtacttaacttcatgaatttgaaaatggttagaaatataaaattgttgggcttccaccaaacattgtaagctttggggtgaattgaccattgacatggtattaagagtttgtacgatcaagttgttaggggttctcattttcataattaagttagatttcagttgaaggtaaaatggccatttgcatagtccatattttaaagcaaaagtggtattgcatgggggtttggggggatgctagaaacaacacactactattatgaggataaaattgtgactattgcagtgaatggaactaaatagagcttcagttaaatgaggaagatgagacgcataatttcagatttttattgtgtgtaatcctgcattccagattttacaagtcacaccatattgtcatatccataagggcatgttcattgttacgttgcttataaaggatagacttccatctttataattatcttgttggaaattatatttctattgttgtatctttattttgttggaagctagattcaataggttcacaatgacctgctggaacttagctttggtgatattgatatgactcctgatctggtgaattttggcacaaggtcctttgactaatttgccattactcatcacaaataaattagagaaaaagatttcagcactttgtaaagtgggattgtgtgtgtgtgatgatgatatttggtttataatgtctggtgtttttttgggggggtgtgaatccagggtatcacactttatatcagtggtatagatcagtggaaagtgagcactttcctgatccaactggactcagagctcgtatcgaacaatggacatttggactttacccggcatgtatcaagtatttaatgtcagcttttgatgtgccagaggtcatggcagtctcccggagcaatatttgcaacaatggattagaatctatttcccgagggggtgctgtaatatattatgcttctgtcttcctttatttttgggtcttctcgacccctgttgtttccttggtgtttgggagctacttatacatttgcatcaactggcttcacttacactttgatgaagccttttcgtctcttcgaatagctaattacaaatcattcacacggtttcacatcaattcggatggtgatcttgaagtttatactttggctgttgataaggttccaaaggagtggaagcttgatcctgattgggatggagagacaaaacatccacatgagttgagtcatttaagaaggtttcccagcaaatggagggcagccattgcccacctggatccagttcatacggttaaaattgttgaccatttcgttattggacgcacagataagaatgactgtgctactactgcacctaacgggccagttcaatgatttgttgatttggtttggttatcctgtttgtaacattatttaggaagcaatttgaagaaaaaaaaaatagtagtttccacatatttttgtttcttttttctatttctgcaaggtgagaatagttggactagtgcgaattccatggtctttaatgcaagtccctgacaagtcaaacctcggttgaatttaatggtgaatccgaaaatggctaatttaattc

SEQ ID NO: 7891 - DNA, 1291 bp, Glycine max
aatatcctaaaatttcggaaaaagaactggctatttgatctgtattggtggcattatatattttgtattagtcttttcaatgtttccacaatgtgagctgaatcacatcctccaagatgatacattttctggtcacataaagagtttccttggtactgtgtggaatggatttatttatattctgcagcactcttgtgtgtcactagcgggagctatactattactaattgcggcatattcttttgttccacccaaattgtcacggaagaaacgagccataattggagttcttcatgtttctgctcaccttgctgcagcactgattcttatgttgcttcttgaaataggcgttgaaatatgcatccagcataagttgctagcaacttcagggtatcacactttatatcagtggtatagatcagtggaaagtgagcactttcctgatccaactggactcagagctcgtatcgaacaatggacatttggactttatccggcatgtatcaagtatttaatgtctgcttttgatgtgccagaggtcatggcagtctcccggaacaatatttgccagaatggattagaatctatttcccgagggggtgctgtaatatattatgcttctgtcttcctttatttttgggtcttctcgacccctggttgtttccttggtgtttgggagctacttatacatttgcatcaactggcttcacttacactttgatgaagccttttcgtctcttcgaatagctaattacaaatcattcacacggtttcacatcaattcggatggtgatcttgaagtttatactttggctgttgataaggttccaaaggagtggaagctcgatcctgattgggatggagagacaaaacatccacatgagttgagtcatttgagaaggtttcccagcaaatggagggcagccattgcccacctggatccagttcgtacggtcaaaattgttgaccatttcgttattggacgcacagataagaatgactgtgctactactgcacctaacggaccagttcaatgatttgttgatttggtttggtttatcctgtttgtaacattatttaggaagcaatttgaagaaatgaaaaaaaagaaaaaaaagaatagtagttcccacatatttttgtttcttttttctatttctgcaaaatgagagatagttggactagtgtgaattcgatggtctttaatgcaaggccctgacaagtcaaacctcggttgaatttaatggtgaatccgaaaatggctaatttaattaaaaaaaaaaaaaaaaaa

SEQ ID NO: 7892 - DNA, 1390 bp, Glycine max
gccacgcgccgcccccagggggccggccgggccggcggcccggcggtcgaggccagctacgtaggcccccccatcgaaaaactattcatttcttcatcagcaacttcacggaggagagaaaggcatggctggcaatataatagcttcatcagtgcccaagagcgtccaagaaatgtccatggatggtgatgaaccaccatcaagatatgtagttaatggaaatagctttggatctaaagattcttctgtacagtttccaatacccatcattgatgtgcgtctcctctcatcagaagatgagctagagaagcttagatctgctctaagttcagctggatgcttccaggcaattggtcatggaatgtcaagttcatatcttgacaatatacgagaaactgcaaaacaattttttgcactcccagaagaggaaaagcagaagtatgctcgagctgttaatgaatctgaagggtatggaaatgacagagtagtttcagacaaacaggtccttgactggtcctatcgcctaacacttcgagtttttccagaaacaaaacgaaggctttctctttggccaaaaattcctactgattttagtgagaaattagaggagttttctacgaaagtgaaatcaatgatggaatatctcttgagatgcatggcgaggtcactgaatttggaagagggtagcttcgtggaccagtttggggaacaaccgttgatgctagcgaggttcaacttctatccactttgttctagacctgatttggttcttggcgtcaaacctcatacagatagatcaggaatcacagtcctgttgcaagacaaagaagtggaaggtcttcaagttttgatagatgacaattggatcaatgtccccacaatgcctgatgctcttgttgtcaaccttggcgatcaaatgcagatcatgagtaatggaatattcaagagcataatgcacagggttgtgaccaatacagaaaagctgaggatgtctgtagcaatgtttaatgagccagaggccgagaacgagattggacctgtagaaggtctaatagatgagtcacggccaaggttatacagaaacgttaaaaattatggtgatatcaactacaagtgttatcaagagggaaagattgcactagagactgtcaaaattgcagataactctaatcagaggtgagactgtttcatatttgaattcccaaaagacaagattcatctagaccagccggttggaaagtacattaaagtttttgtaatttaagtcaaaccaatgaactaacagaaaaaaaatatgtatggttctcttactgtgaaaccgtaactagtcatacatttcaatctcgcaaaaaaaaaaaaaaaaagaattcctgcagcccgggtgttaatt

SEQ ID NO: 7893 - DNA, 1730 bp, Glycine max
  misc_feature (1712)..(1712): n is a, c, g, or t
  misc_feature (1723)..(1724): n is a, c, g, or t
  misc_feature (1727)..(1727): n is a, c, g, or t
aatggattagggaggcacaacaagtcaacataattactatatattccccaactgaaatccaaaataagaggtcattgtgggagcatgtaaggcagcagaaacactcattgtccggggacctttggtgtatttgtggtgacttcaacagcataagagaaccagctgaaaggttcggcataagtcaaagggacccagggaacagcaccatcaaagagttcaatgattggataaatgatctggaggtagttgaggcaccttggctgggaaggaaattcacctgggtcagactaaatggaacctccaggagtaagcttgacaggttcctgctctcccctgaatggctggacaaatggcctgcaagcactcaaatcaccttacccagaaacttttcagaacattgtccactattgcttaggtccatatcagttgattggggtcctaaaccttttaggattctagattgctggctatcaaacaaatctttcaaagaaactgtgtacaattgctagtcttctattcagcaacagggttggagagggtatgttctcaaagaaaaaataaaaagactcaaacaaaggctgaaaatctggaataaggagagctatggagacacttacaaaaaggtcaagaagttagaagatgaattaaataaagtggaggaggattcaattcaaagacagctttctaagcaggcattgtcccttgtggtatggctacaatgggaagttgaagcctctgatgaggcttgcttatatcaacaccattgtctacccgtttacctcaatcccattgattgcttactgtacgcttcctgcattctgtcttctcacaaataaatttattattcctgagataagcaactttgccagtatgtggttcattcttctcttcgtctccatttttaccacttcaattcttgagcttaggtggagtggggtcagtatagaagactggtggagaaatgaacagttctgggttatcggtgggacatctgcgcatctttttgctgtgttccaggggcttcttaaagtgcttgctgggatcgatacaaattttactgttacatcaaaggcatcagatgaggatggtgactttgccgagctttacgtgtttaaatggacatcacttctcatccctcctacaacggtgcttattgtgaatttggtagggattgttgccggggtgtcctatgccataaacagtggttaccagtcttggggtccactatttggcaagctgttcttcgctatctgggtcattgcccatctatacccattcttgaagggtctcttgggcaggcaaaatcgtaccccaaccattgttattgtttggtccgttcttcttgcttcaatattctccttgctgtgggtgaggattgatcccttcacctctgactccaacaaattaaccaatggtcaatgtggtatcaactgttagttctcttgtaagattcatgacaaggttgctgtcgtgtatatagcaagaattttcagcctatcaaggttgtctggaggattgaacccctgaaatagatgggaatgttaccctctctgtttctattatttatatttatttatctacatgttccttacaagaataatcagtcatgttgaggtgtatgttatatttttttcccactgaatataaatttgtttatgcgaatatttaatgaaagccaacaaggtcctgtgttttgttctttttaacaaaanaaaaagagaannaanaaa

SEQ ID NO: 7894 - DNA, 1657 bp, Glycine max
cccacgcgtccgccctctcgtccgcccacgcgtccgctgttttgactgaggaagatttggaacctaacattattgtaaagagttgttgcggttctagaaagaagggaaagggtggcaataagaagtacagtgacaagaagaaagcgatgggcagaactgaatccactgtacccatatttaatatggaagacatagaggagggtgttgaaggttatgatgatgaaaggacactacttatgtctcaaaagagcttggagaagcgttttggtcagtctccagtttttattgctgccactttcatggagcagggtggcattccaccttcaacaaaccctgcaactcttcttaaggaagcgatccatgtcatcagctgtggttacgaagacaagacagagtggggaaaagagattggatggatctatggctctgtgacagaagatatcttgactgggttcaagatgcatgctcgtggttggatttccatctattgcatgccacctcgcccagcatttaagggttctgcccctatcaatctttctgatcgtctcaatcaggtgcttcggtgggccttaggttcaattgagatctttcttagcaggcattgtcccttgtggtatggctacaatgggaagttgaagcctctgatgaggcttgcttatatcaacaccattgtctacccatttacctcaatcccattgattgcttactgtacgcttcctgcattctgtcttctcacaaataaatttattattcctgagataagcaactttgccagtatgtggttcattcttctcttcgtctccatttttaccacttcaattcttgagcttaggtggagtggggtcagtatagaagactggtggagaaatgaacagttctgggttatcggtgggacatctgcgcatctctttgctgtgttccaggggcttctaaaagtgcttgctgggatcgatacaaattttactgttacatcgaaggcatcggacgaggatggggactttgccgagctttatgtgtttaaatggacatcacttctcatccctcctacaacagtgcttattgtgaatttggttgggattgtggctggtgtatcctatgccataaacagtggttaccagtcttggggtccactatttggcaagctgttctttgctatctgggtcattgcccatctatacccattcttgaagggtctcttgggcaggcaaaatcgtaccccaaccattgttattgtttggtccgttcttcttgcttcaatattctccttgctgtgggtgaggattgatcccttcacctctgactccaacaaattaaccaatggtcaatgtggcatcaactgttagttctcttgtatgattcattttgtgttgttattcccttttgcttggagatacacaaggttgctgtcgtgtatatagcaagaattttcagcctatcaaagttgtctggaggattgaacccctgaaatagatgggaatgtaccctctctgtttctattatttatctacatgttccttacaagaatagtcagtagtaatgttgaggtgtatgttatattttttccccacagaatataaatttgttcatgcgaatatttaatgaaagccaacaaggtcctgtgttgttttgttctttaaaaaaaaaaaaaaaagaaatt

SEQ ID NO: 7895 - DNA, 1433 bp, Glycine max
  misc_feature (210)..(210): n is a, c, g, or t
gtttatattttttaaaaattgtagggtttaaaaatccttaataaaactaaatacgaattaaagaataattttcatatactgttaattacatgttggattgattggatgaggggggtcggggggagacaagtgctccaacttgtccccaactggttcattccctgcttgaatgtttatatctatcatctatggattgctatttgaaattanggttttacatctgaaattcaactaccttacacgagccttagtatttatccgagctgcagcaaatgctttgaatttagaacagtggagactgcagaaactgaaagagctatgtgaggggaaccaaatgataagatcaagttataatgaggattgtacccgccacgagggtcgcatttcccggaatataagacaaataaggggcataagtgacaatgttaggtcaaaagcaagtgaactcactaaacttttgagtcatcctcaatcttttcaatcaatcagcattgagatatttgctaaaaaggttgttgcatactgtgcaaaccccgctaatgtgccctttgcaagtgcctatgtcattgttcttgttacatctcaggtcccacatgctatggatattttactagctgagcttcacagggcttgcatatatactgtcccaaagcacctggtttacaagaagtctgcctatcaatcaaaagaggcatacttcagaagtattggctatcgagaagatgatggaaagatggagagtacggaagattatttaaagcggttagaatcatacatgaagatgtatggtgcactggttcagactgaaattacaaactgtcaaaattttcacggcttgaaagaaggttgggcatggcttgcaaggttcttgaatacacacccagcaaatcaatacacagctgtttcgcttaatgcattcttgcaaatggctggatttgctctctataacagatataaatctcaattcttaaagatgctgaacgtcgtctctgagaactttttagttgatctgaaatcacagaatataccagaattggcgaggacagttacggagatacagacttacatagacgataagaagttccttcaagagccagaaggaagaagcctgcagtctgatttgttatcaaccaagatacttcaagaggcagacagatggataccgaagcctagttttaataattattattgaaacttgaataattttattgcttatttttttgggtagaaaaaagttcagggagatcggcgattgttttcattttaaggtctttcacaagcctcacagtttacacaaactagttgaggcagctttcattttactccgaggagtattggaaacgattatttacagtttatttagacttattttgagatgtaatacacatacagaaattcatacaacatttatataacatcattttcttttatct

SEQ ID NO: 7896 - DNA, 1234 bp, Glycine max
ctctaaaatcgctttcgctttttctttcgttgcctcatctaatcccgcaaagatgtcttcatgcttctctttctctggaagttttacatctagttttattaatgcttcttttgcttgttcatgcgttaattttccggacttttcttgttcaaaaattgacttcactttttctttcgttgcttcatctaagtcagcaaggatgtctttatgcttacccttctctggcattttcacgcctaactttgttaattcctcttgtgcttgttcacgtgttaatttaccggacttttcttgctctaaaatcgacttcgctttctctttcgcctgttcatctaagttagcaaacatgtctccatgtttacctttctccggcattttcacgcctagctttgttaattcctcttttgcttgctcatgcgttaattttccagacttcttttgctctaaaatcgacttcgcttttgctttcgcctgatcatctaatcctgcaaacatgtctttacgcttctctttctccggaagctttacacctagttcctctaactgtttctttgtatcgtccataattgtttttactttttgttttgtagcgtcatccaaatcctttttcgccgtttttgtagactgttcagctgctggagtattcgttgccgcgaatgccggaataccgactcctccaatgattccgaatgataaagcacctgcaatcgctaaatacccaactgttttcttcttcataggaaatttcctccttcatatttctaaaggcatgtacactttcgtataccccgcgtacctgcccgggcggccgctcgatgcgtggtcctttttaattttttttttttttgaaatgcaaacaagatatcctgttgattcgcaaacgcagtaacagcattgttttcagctaagaacataagacgaaataaaatccaacaaaatgtatcaaaacatcaaaaaggagagaccagtgccactaacaactgggtgtcctatttgacaacataagcaattgtaaaagcaacggaaacaaactaggtttaacgcactacttggatctctgtctcatctttcggcgcttcctcttcagcctcctcatacgcttcttcttccacttggccctcatcgcgaaaagaaaacagaacccttcttcgtttccgaaccctagccgaggcggctgagaaacaacagaggattcagaagccggcggcttctcgcagccgtacggacgcgtggg

SEQ ID NO: 7897 - DNA, 955 bp, Glycine max
  misc_feature (941)..(941): n is a, c, g, or t
gctcgaggccgctttttgttttttttttttttcgcgtcaaatataaacactcacctgccatatataaaattctgatacacataatctaaaattgtcaatagatagcataacaaaaagcatatgatctggaagccaattcccattttcttgttgcaattacagcgaccatctgttcagtggttaagctacaagatccagagtctgttgcaaaagtaagaagcaactgttggcactactagctgctcaaatctctattcctaaactaaggtgaatgtgatgggcatgatgagatgtctcagacaaaaaacaaaagatttcttcgctggatttgttttattctcaaaagaaattccaggattcccaataagtcattccgcaacaacattcaccagttcatactcaatgagagacaagttattatcttccttcacagtgaaactagcaggttctgtgagttccacacggccccacttgtccacagcaagcctcattgatcctttgaacatgtcaattttggcgttacgcaggatcacagtagctccctctgtcatcgtatccacttgatcatttctggcggtgaatatgatcattccagtctcatcaccaaccaagcactcagcaattcgcatttgacgagattgaggaccatcagagcgacctctctgcatcaccatcttagcattgaccaccttcacagttaaagtgtgcccactggtccccgggcaaagctgatcaaccttggtgaacactggtttcctcaatcctgattttgaatctgccatgtttcaaatgctggaaattggtgtgaaagaagagagagatccgaaactgaaactgagactgagactgagagaggcaaacgtcgaggtcgggttttaaggagagaaatacaagtttatcatcaggttcacggctctttttttagctaccgggtgcatgcncgtcgtactcttct

SEQ ID NO: 7898 - DNA, 1004 bp, Glycine max
  misc_feature (14)..(14): n is a, c, g, or t
  misc_feature (19)..(19): n is a, c, g, or t
  misc_feature (26)..(26): n is a, c, g, or t
  misc_feature (29)..(29): n is a, c, g, or t
  misc_feature (31)..(31): n is a, c, g, or t
tttttttttttttnttccnttttttnttntntttttttttttttgagaacatgataaagattaaattattgagattaagcaaaggattttctcaaatataaacacccatctctgccatacataatattctgatacatgcaatccatggtagatgaaggtgcacataatctaaaatgtcaatagatagcataacaaaacgcatgatctggaagccaattcccatttgcacttaaatccaccatctgttcagtggataagctacaagatccacagagtctgttgcaacagtaagaagcaactgttggtactactggcttctcaaatctctattcctaaactcaggtgaactgtgatgagcatgatgagatgtcccatagacaaataaaaaggctagatttctttgcttgatttgtttttattctcattagaaattccaagaggtcccaataagtcattccacaacaacattcaccagttcatactcaatgagagacaagttattatcttccttcacagtgaaactagcaggttctgtgacttccacacggccccacttgtccgcagcaagcctcattgatcctttgaacatgtcaattttggcattgcgcagggtcacagtagcaccctctttcatcatatccacttgatcatttctggcagtgaatatgatcattccagtctcatcaccaaccaaacattcagcaattcgcatttggcgggattgaggaccatcagaacgacctttctgcatcaccatcttagcatcgaccaccttcacagttaaagtgtgcccgctggtccctggacgaagctgatcgaccttggtgaacactggcttcctcaatcctggtttggaatctgccatttttcaaatcctggaaattggtgagagaagggagagatccgaaactgaggctgagacgcgagtgtcgaaaccgggtactgttcacggattttgttcgcgattctactccctatttcccgcgcgtgggcggacgcatgag

SEQ ID NO: 7899 - DNA, 855 bp, Glycine max
ttttttttttttttttccctcaaatataaacaaccatctgccatatattaatattctgatacatgcaatccgtagtagatgaagaaacacataatctaaaatgtcaacagagagcataacaaaaagcatgatctggaagccaattcccattttcttgcacttcaatccaccatctgttcagtggttaagctacaagatccacatagtctgttgcaacagtaagaagcaactgttggtactactggcttctcaaatctctattcctaaactcaggtgaactgtgatgagcatgatgagtttttttctcattagaaattccaagaggtcccaataagtcattccacaacaacattcaccagttcatactcaatgagagacaagttattatcttccttcacagtaaaactagcaggttctgtgacttccacacggccccacttgtccacagcaagcctcattgatcctttgaacatgtcaattttggcattgcgcaggatcacagtagcagcctctttcatcatatccacttgatcatttctggcagtgaatatgatcattccagtctcatcgccaaccaaacattcagcaattcgcatctgacgggattgaggaccatcagaacgacctttctgcatcaccatcttagcattgaccaccttcacagttaaagtgtgcccgctggtccccgggcgaagctgatcaaccttggtaaacactggcttcctcaatccagctttggaatctgccatttttcaaatcctgaagattggtgtgagggaagagagagatccaaaactgaaactgagacgcgagcgtagaagccggatttaaagatgtgaaagtgaaagagaagat

SEQ ID NO: 7900 - DNA, 2181 bp, Glycine max
  misc_feature (19)..(19): n is a, c, g, or t
  misc_feature (2170)..(2172): n is a, c, g, or t
  misc_feature (2178)..(2179): n is a, c, g, or t
tcgagtcagctacgttagngcccccccccccacactgcaggtgcgccaaactcgaactaccctaaacgacgccgcattcaaatttccgccaccgacgcattaaccccttccaagccccgacggttcccgagtggtgatggcggaaacgcacgaagacacaccgaaagaaaccgttcacaaagaagaagaagaagaggaccaaagcttcgaagagctcggcgtggacgctcgtctccttcgcgccctaatcaagaaaagaatcgagaaacctactccaattcagcgcgtcgcgattccactcattctggaaggtaaggacgtggttgcacgtgccaaaacaggttcgggaaagacactcgcgtaccttctcccgttgcttcagaaactgtttactgctaactctgatcggaagaaactcgcgccaaatgcttttgttcttgttcctactcgcgaactaagtcaacaggtatatgcggaagtgaagtctctggttgaattatgcagagttcagctgaaagttgtgcagttgaatagtaacatgcttgctaatgacttgcgggcagcattggctggacctcctgatattttgatctccactcctgcttgtgttgcgaagtgtttgtcctgtggcgtacttcaggcggcatccattaatgcatcgcttgaaactcttgttcttgatgaggcagatcttctattatcatatgggtatgaaaatgatattaaagctttaacacctcacgtacccagaagttgccagtgtcttcttatgtctgcaacatcaagtgctgatgtggacaaactaaagaagttgattctgcacaacccctttattttgactttgcctgaagtgggaaatcataaggatgaggtcattcctaaaaatgttcagcaattctggatctcatgtcctgccagtgataagttactttacatccttgctgtgttgaaattggggttggtccaaaagaaagttctgatattcacaaataccatagacatgagtttcaggttgaaacttttcttggaaaagtttggaatcagatctgctgttttaaatcccgagttgcctcagaattctcgtctccatattcttgaggaattcaatgcgggcctgtttgattatctaattgcaacagatcttagccagtcaaaggaaaaggatgaagtgcctaaggaaagtattgttggatcacggaagtctagaaaacatgctaaaataaaattagattctgaatttggagttgtaaggggaattgactttaaaaatgtatacacggttataaactttgaaatgcctcagagtgttgcaggatatgtacatcgaattggacgtacaggaagagcatacaattctggtgcttctgtctctctggtttccacggatgaaatggatactttagaagaaataagatcttttgttggggatgatgaaaacaaaggcacaaattccattgctgagtttcccctcctcaccaagaatgcagttgaatctttacggtacagggctgaggatgttgcaaagagtgtgactagaattgctgtccgagagtcacgagcccaggatctgaggaatgaaattttgaactctgaaaagttgaaaacccacttcgaaactaatccaaaagacctagatctactgaagcatgacaaaattttgagcaagaatgccccacctcctcacctacgggatgtgcctgagtacctattagacaaaccaacgaaagaggcaagggaaatggtcaagcttgcaagggatgcaatgggaaataataatcgccgcaagggatccaagagaaaattaagaaaagaaggagaccctctgaaggctatctatgctacggcgtcatcaaaaagaccgcacaaagctaggaagactggtggaagcgatagcctaaatagcagtgataggcataaacacaaaaagaataagggtatttgattgatttgcccgtttcctacaaagccttataacaggctcaattttgttgtaatttaggtccaaatatcgtaaaacgaaaaacagtacagtattggaattgttgtttcctttataccgcgtagggcctgaagttattgctcattactaagttaaattatgctaattgaaactagaatttcgctttaaaaactgtctcttgtctcgcatggcatgtggcatgcggaagannntattgnnac

SEQ ID NO: 7901 - DNA, 2020 bp, Glycine max
cattaagcaaggacttaatagcttaacgcagggacattcgctaatgaagaatgatcctggaagctacaagagtccaaatcttcgaaggtcgttgaccaatgaaacagaacatggtgacagatatgaactggttgcatatcgtaatgaaactcagggtagttttggagcatcaaagagtcaatctactggtccttggaatcaggattcaagagtaactaaggtggaaacatcaaatggggaatctagtgcaagttatgtagagagtaagacaagagaggataagttgctggagacaattgtaacatcaggaggtgttcgcctgcaacctactcgagatgccattcaagttttcctaacagaagctgcaaagttggatgcactggctttatctcacgcccttgagctgaagctccaatctccaatttggcaggttcgcatgaaagctgtttgtgtccttgaggccatccttagaaagaaggacgatgatcatttttcaccagtggattcctacttcaccgaaaataaagatgtggtgctgagatgttctgaatctccccaagcctctttaagggaaagggctatgaagtaatgaaaaaactagggaaccaggaagaagaaaaattggtcatttagagtcaactaaggttcttggccttttaggtggaggccagccaaacagctctacagttaattcagagaagactgtgaaaacagagaatgctactgttgctgagttgcctgacttgatagacactggtgattcaaatgattaccatggaactgatgacactctaaagggtacaagtgatcaaaatatagcaaatttgacatcatcaactcctctggttgatgatttatttggagattttagtgcttctattggagctagtcaagaactaaaaaatgatgatccatttgctgatgtatcatttcacacaaatgagaacaaagaacatgcagatgatctcttttctggaatgactgttggtagcaataagcagggcgatcatgagagtcacaggcaggggaatataactgaacctcaactttttgacatttttgcttccaattctgaacaaggaaaccataaggagcctgttagtgatttaatggccggtctgtcaatggatgaaaatacctcaagtacgaagcagaagggaacatctcctttcatgcaatctgaatctttattttcaggtttgaataaccatatccctgacaatacttcaggtggcatgttgagctctcagccaatggggtttaatgtaaatcctatgtttcccactggtcctatgccttataatatacagcctggtttcatgttgaaccaaccttattcttcccagcctctcaattacggtgccatgggaactcttttggctcaacagcaattcttggcaacaatggctaatttccaacaccttagtaatgtcaacatgcaagatgatggtgttgctcaaatggccggacctaatggaagatcacctttgccagacatatttcaaccaaattttcaaactcaaactcctagctcaatgatcaacacttcaaggaaagaagaaactaaagcatttgactttatctcggaccatatgtcatctgctcgtgattcaaggagaatgatttaaattttctatcttgtgctgttgtggaggatatttacggtgtggaattgatggattgacattaatagatcaaacggtttatagtttccttacctgtgcaaaaagttgatttctcttgccgtgatggagcattataaatgacattctacatgtccatgttgacaacaaaataataaaatgagaatacgttttggacatgaagaagagattcaaattggttgcgcttttaattagattttagcatgagaatgttgtgtagcactgtaatgttatatttccatgagtatgttgtgtatgtagttaatggttgagattttgcaactgtaattcaggcgtcaagtaaaatacaactctcagattttgcaaatgtccatttatattttttgttacaaaaa

SEQ ID NO: 7902 - DNA, 1479 bp, Glycine max
tctatctccaccccaaaaaagcatacagttttctagatttttcagtcagatatttcattcttcactcccccgtctcagtttataaaaccccacttccgctcccctatcaataacatcttaaagtcccaactttttctacttaccttttctcttaatccaaatacgatggcagccatggcaaccacaaccctctcttcaaaccccaaactctcattcttcaacggaaagcccgtcacatattcttcccgcgtcgcgcccaccaccaaattatcctcatccaaacaaggcacaatttccatgtccctaaccccacccccctacgacctccagtccttcaaattccagcccatcaaagaatccatcgtgtcacgggaaatgacgcgccgctacatgaccgacatgataacctacgccgacaccgacgtcgtaatcgtcggagccggttcggccgggctctcctgcgcgtacgagctcagcaagaaccccgccgtgagcgtggccatagtcgagcagtcagtgagccccggcggcggcgcgtggctcggcgggcagctcttctccgcgatggtggtccgcaagccggcgcacctcttcctcgacgagctcggcgtggcgtacgacgagcaagaggactacgttgtcataaagcacgcggctttgttcacgtccaccatcatgagcaggctcctcgcgaggcccaacgtgaagctcttcaacgcggtggcggcggaggacttgatcgtgaaggaagggagggttgccggggttgtgaccaattgggctctggtttcgatgaaccatgacacgcagtcatgcatggaccccaacgtgatggaggcgaaggttgtggtgagctcttgtgggcacgatggaccctttggcgccactggggttaagaggttgaagagtattgggatgattgatagcgttcctggaatgaaggctttggatatgaatgctgctgaggacgctattgtcaggctcactagggagattgtgcctggcatgattgtcactggcatggaggttgcagaaattgatggctccccgagaatgggtccgacgtttggggcgatgatgatatcagggcagaaggcggctcatttggcgttgaaggctttgggtaggaacaatgcaattgatggaacgtgtggagttggaagggaagaaccccagcttattttggcttctgcggacactgaggaaattgttgatgcttaaattaagtttcaaattatataccttttcttttctgttttgtctctgcttatgatttgaattttagaataaatttttaaaaatgtgaatgatgaaggagacaatacctgttgttacttctttgaatttggactcacctatagcagatgaaaccaaattatcaaggatgggagagatagacgccacttaatacatttttaatacttactgtatgaattaaattcaagcgctagatgataatgccaagtgactacttaacac

SEQ ID NO: 7903 - DNA, 1274 bp, Glycine max
  misc_feature (1)..(2): n is a, c, g, or t
nncccacgcggccgatcaagcccccgcaactattctacttaccttttctcttaatccaaatatcatcatctgaaacgatggctgccatggcaaccacaaccctctcttcaaacccgaaactctcatttttccacggaaagcccgttacatattcttcccgcgtcgcacccaccaccaagttattctcatccaaacaaggcacaatctccatgtccctaacccaacccccatacgacctccaatccttcaaattccaacccatcaaagaatccatcgtctcacgcgaaatgacgcgccgctacatgaccgacatgataacctacgccgacaccgacgtcgtaatcgtcggagccggctcggcggggctctcctgtgcgtacgagatcagcaagaaccccgccgtgagcgtcgccataatcgagcagtccgtgagccccggcggcggcgcgtggctcggcggacaactcttctccgccatggtggttcgcaagccggcgcacctcttcctggacgagctcggcgtggcgtacgacgagcaagaggactacgttgtgataaagcacgcggctttgttcacgtccaccatcatgagcaggcttctagcgaggcccaacgtgaagctcttcaacgcggtggcggcggaggacttgatcgtgaaggaagggagggttgcaggggttgtgaccaactgggctctggtttcgatgaaccatgacacgcagtcttgcatggaccccaacgtgatggaggctaaggttgttgtgagctcttgtgggcacgatggaccttttggcgccaccggggttaagaggttgaagagtattggcatgattgatagcgttcctggaatgaaggctttggatatgaatgctgcagaggatgctattgtgaggctcacgagggagattgtgcccggcatgattgtcaccggcatggaggtggcagaaattgatggctccccaaggatgggtccgacgtttggggcgatgatgatatcagggcagaaggcggctcatttggcgttgaaggcgttggggaggaacaatgcaattgatggaacgtgtggagttggaagggaagaaccccagcttattttcgcttctgcagacactgaggaaattgctgatgcttaaacttactttcaaattagctagatatatagcttttcttttcttttctttctgtttggtccctacttaattatgattttaattttggaataaatgaacaacatgtgaattatgaaggaaaaaaaaaaaaaaaaaaaaggaaaa

SEQ ID NO: 7904 - DNA, 1604 bp, Glycine max
attctaccctcagttcttatccattgccagggtcaatttcgacctcaaataatctaactggccccaagctgtcacctacctagcctccccccacaccccaaagccttcctcacttatttccacaaatcccttctctctttttcaatcccatccctctcacgcctcccgcgcgtgtctttcactctcttcctttccttcatcccttccatgggacctatattcaccgacggcccccacgcgtccgccatccacatcacaaaaattacaacaccaatctcacccatttcaaaaaaaggccgttagtgttactattcgtaaaatggccactcttgttctttaccaattctttctcaaactcttgctcctaatttcagtctttcagctttcctttgctgctaggagactcaaccagctggttcaggaccagtcacagttactccattaccacaacggtcctcttctatacggcaaaatcgccgtgaacctaatctggtatggtcacttcaaaccatcccaaaaggccatcatcaccgatttcgttacctcactgtcatccccatcgtctcagagcagccagccatctgttgccacgtggtggaaaaccacggagaagtactaccacctgagtcccaagaacaagaaggctgcttcttctctttctctatcactgggcgatcagtttctcgacgagggtttctcgctggggaagtcactaaccagcaagaacctcgtcgagctggcatccaaagggggacagaggaacgccatcaacgttgttctgacatccgctgacgtggcagtcgaaggtttctgtatgagccgatgtgggacccacggctcctcctcttctgcatctcacgtgaagaagaacaacaacggcaagaactacaagttcgcttacatctgggtcggaaactccgaaacccaatgcccggggcaatgcgcttggccattccaccaacccatttatgggccccagagcccacccttggttgctcccaacaacgatgtgggacttgacggaatggtcataaacctcgctagcctccttgccggaaccgccaccaacccattcggaaacggttacttccagggtcccgcggaggctccgctcgaagctgcgtcggcttgccctggggtttatgggaaaggggcttaccctggttatgctgggaacttgctggttgactctgccactggtgctagctacaatgtggagggggataatgggaggaagtaccttgttcctgctctgtatgatccttctacatcgtcttgctcaacgcccgtctgagaaggaggattattatggtgatgccgatcgttcagttctcactgctgctgctagcctgctactacgatgatgttagaaaccacggattagggagtgtacaaaacttctaataacccattttgtaggattatttcattgatttgtttgtttatatcatctggatatgtacgcggattaaggatcttatgtaagtagaagcaactgttcttccgtttgcttttaaataatattgaaatattactcttcgctaaaaaaaaaaaaaaaaaacgccaactagtctctcaaaaaagggggggcccccccttttttt

SEQ ID NO: 7905 - DNA, 1356 bp, Glycine max
acatttccttggacctatatatacctctcttcctatccccttcatccacatcacaacacccacccatccctcgtttcaaaaaaagggccgttattgttgttaccatccaaaaaatggccggtcttgttgtttcttcccaatgctttctcaaactcttgcttgtagtttcagtctttcatgtttcctttgctgctaggaggttgaatgagctggttcaggaccagtctcagttgctacattaccacaatggtcctcttctatacggcaaaatcgccgtcaacctcatctggtatggtaacttcaaaccatcccaaaaggctatcatcaccgatttcgttacctcactgtcatccccagcgtctcagagcagccaaccctctgttgccacgtggtggaaaaccacggagaagtactaccacctgagtcccaggaaggcttctctctccctctctctcggcgatcagattctcgacgagacatactcgctggggaagtcactaaccggcaagaacctcgtccagctggcttccaaaggcggacagaggaactccatcaacgttgttctgacatccgctgatgtggcggtcgaaggtttctgtatgagccgatgtgggacccacggctcttccgcttctcatctgaagaagaacagcaagagctacaagttcgcctacatctgggtgggaaactccgaaacccaatgcccggggcaatgcgcgtggccattccaccaacccatttatgggccccagagcccacccttggttgctcccaacaacgatgtgggacttgacggaatggtcataaacctcgccagcctccttgccggaaccgccaccaaccccttcggaaacggctacttccagggtcccgcggaggctccgctcgaagccgcgtcggcgtgccctggggtttatgggaaaggggcttaccctggttatgctggggacttgctggttgactctaccactggtgctagctacaatgtaaagggggctaatgggaggaagtaccttgttcctgctctgtatgatccttctacgtcgtcttgctcaacgcccgtgtgatcagaagggttattttggtgatgccgatcgttctgttccatgctgctactacgatgatgttagaaaccacggattagggaggtgtacaaagcttctaataaacatttttgtagaattatttcatttatttgtttgtttatactatcttctggatatgtacgcggattaaggatgttatgtagtagaagcaaatgttcttccctttgctttttaatattaaaaaatttattattattactcttcaccaaaaaaaaaaaaaaaaaaacgggcggccgcggatcaagtgact

SEQ ID NO: 7906 - DNA, 803 bp, Glycine max
ataacaagttacaaaaacacaaaactaaaaacagaaaaatgaagatgacattggtaacattggtccttatagttgccttgagcacaaaggcacttcttggtgcagctggtcctgcacctgagcaagtgctggacacatcagggaagatagttcgagctcgttcgagttactacatcgttccggcttcccccgatttaggtggccttgatatggcaagcacaggtgcagattgcccacttgatgttgtagctgttgatggttaccaaggccagcctttgatctttacacctgttaattttaacaaaggtgtcattcgtgtttccactgatctcaacatctatttccccgttggcacaagttgtccacagaccacagtgtggaagcttaaggactatgattattcaacatcacagtggtttgtgactactggtggtgatttcggcaaccccggttcgcaaaccgtggcgaattggttcaagattgagaagtatgaggatgcttacaagttggtctactgtccaagtgtgtgcaacgattgcagttatccatgcagtgatattggaatataccaggatgaatatggcaagcgtcttgctctaagttctgaaccatacaaagtgaagttccagcgggcttgattattgaattgataacaaaactaattaaagaataatgaataagtgtaatgaactactttatgcttttgctgcatatatggtaattctcatgttgagttccttgccacggacttgataataaataaacaagttactttctatttttaaagaaaaaaaaaaaaaaaa

SEQ ID NO: 7907 - DNA, 1632 bp, Glycine max
tccggcccgcgtcgtaggccccccccccccccccaattattgttggtgtatgtatgagtgcttgccattcccttggggtcatgcatagagatctcaagcctgaaaactttctcttggtcaacaaagatgatgatttctctcttaaagccattgactttggcctctccgttttcttcaaacccggtcaagttttcactgatgtagtcggcagcccatactatgttgctcctgaggttctcctcaaacattatgggcctgaagcagatgtgtggacagcgggtgtcatactgtacatattgcttagtggagtgccgccattttgggcagagacccagcagggtatatttgatgcagtattgaagggacttatagattttgactcagatccttggcctctaatatctgacagtgcaaaagatctgattagaaagatgctgtgttctcggccttcagaacggttgactgctcatcaagtgttatgtcatccttggatatgtgaaaatggagttgcccctgacaggtcactggaccctgctgttctttctcgtctcaaacagttttctgctatgaataagctaaagaagatggctctgcgagtgattgctgaaagtctatccgaagaggagattgccggtttgagagaaatgtttcaggctatggatactgataacagtggtgcaatcactttcgatgaactcaaagctggtctaagaagatatgggtctacccttaaggatatagaaatacgtgatcttatggaagcggctgatgtggacaaaagtggaaccatagactatggggagtttattgctgcaacagttcatctcaacaaactagagcgtgaagaacatctcattgcagcattccaatattttgacaaggatggtagtgggtacattacagttgatgaacttcaacaagcttgtgcagaacaaaacatgactgacgcttttcttgaagacatcattagagaagttgatcaagataatgatggaaggattgattatggtgaatttgctgccatgatgcaaaaaggcaacgctggaattggtaggagaactatgcgcaacagtctgaatttaagcatgagagatgcaccaagtgctcaatagcttatgattgtgctcattatgtacaggttgtatgcagcaaagccagaaagaaaaaataaagcaaaaatctttacaaaaaattgttcatatctgctgaccagtcctatccctgaagaacaatcaggattgtgggtgctctcgcatgaggactcatcaagcgttacatttatgtgctgtatgagtggaaaatttgtttctcgctttgtaaaccttagtgttgggtgttacagctatttcaagttggtcttctattttttctgtgatttcatgtaggggcattctgtctatagttgaagtagaaggattttgatctttcaagttcttgatttcacggatgtaaagtttcacacgtatgacatgatgtattgggcgaactaagaagcctttgtggattatgtcggagcacatgcattgtgttaaagtgacagtgctgaagcattttatttctcagctggcttttctttcccttttatatttattttttttataattattacatttatttttttttttttattaa

SEQ ID NO: 7908 - DNA, 1615 bp, Glycine max
gaagaaacggagacaaggaatgaatgatcgaacaaatgaatgtgctactgtaaaaaaaaaattgttaaaaagaaaccagaaaactcaaaagggcattttgggaatgttttaatgctgggtgcacaagcaatatgacggtgcacccagcaacacccccacccatatctatctctccgagacagtgcaggtgcagagaactctattctcctccatcaacgcaaccaccaccatcgtgtttaggtcattcttctctctttccgtaccctaaaaccgaaaaaattgttccttttacttttctcctctcacacacattcccacttcccccttttcttccaccgttatgtcgggtagaaaccgcggacaaccccttcctccgccgcacgcggcgggaatatcgccgccgctccacgatccgctgtacggcccgcgggcccaccaccaccaccatcatcatcatcatctagtgggccccgtcccgccccacccccaccaccttctagaagacttccgcgactcgcagctagggctgggcccaacgcgcggcgggtccatcccattgcacccggcggcggcgatcatcgaggagcgccttgccgcccagcatcaggacatccagggtctgctgggcgacaaccagcgcctcgccgccacccacgttgccctcaagcaggagctcgaggccgcccgccacgagctccagcgcgtggcgcacttccgcgagtcgctccgggccgataccggaggcccgcatgcgcgagctctacgactaggcggcccagctcgaggccgagcgtcgtggcgctgaggccgcccgcaccgagctcctccaggtccgctccgacgtcaaggagctcaccgccgtccgccaggacctgtccggacaggtgcaggccatgacgcaggacttggcccgcatgaccgcagacgcgaaacgggttccggcgctgagggctgatgttgaggccatgaaacaagagttgcagtgtgcaagggctgccattgagtatgagaagaagggatttgcagaaaactatgaacatggtcaagtgatggagaagaaattggttgcgatggctcgggagatggagaagcttcgtgcggagattgccaatgcagagaaaagagcacgggctgctgcagcggctgggaatccaggtcaagggtataatgcaaattatggcactgctgatgttggatatgctggaaatccttaccctggcatttatggcatgaatccagtacagcctggagtggagaattttcctcagtatggacctgggcctgctgcttggggcgcatatgacatgcagcgagttcaaggacaccgataaattcctgttgaggaatcttataactggtatcttgggttgcaactatctagatgattgattcagggttttaagagttatctactcatgaacgtcatggaatttgtctattagatggtccttgaagttgtacttatattaaaaagctcatatgtaggttgatggtgcagtagatgatgtttatctacggtgtcaaataaaggacattttgctttatattatctttttattgtgatgtggctgtcatgctaaaaaaaaaaattaaaaaaaaaaaaaaaaaaaaaaaa

SEQ ID NO: 7909 - DNA, 2217 bp, Glycine max
acctcaagactagagtggacatttatattttaagaatctcgaaagtcacaatcaaaaccctatcctcattcctcaagcaatggccgccgcagcaccgcccccggccccaactccagccccggagcccgccacatccctcccggaaaccacccctctcttcacccgcatccgcctcgccaccccttccgatgttccccacatccacaagctcatccaccagatggccgtcttcgaacgcctcacccacctcttctccgccaccgagtcctccctctcctccaccctcttcacttccccacccttccaatccttcaccgtcctccttctagaagcctcccccacccccttcctcaattcaaccctaaacccaaaccctttctacaaacccatcaccaaactccttaacctttccaatcccatcaacgaccccgagagcgacacgttcaaaaccctcgacggtgttaccgttgttgggtttgtgttgttttttccgaactattcgacttttctagggaagccagggttttacgtggaagacctgttcgtgagggagtgttacaggaggaaagggtttgggagaatgttgctgtctgcggtggcgaagcaggcggtgaagatggagtacggaagagtcgaatgggttgttctcgattggaatgtgaatgcgattagattttatcaagagatgggtgctgaggtcttgaacgagtggagggtttgcaggttgactggggaggcacttcaggcttatggaggtgctgattagaatttaaaaatgtttcttttttatttttctttttccctatatatataataataataataataataataataataataataattgttatttttaggtttggaattagtcaattaggcatggtttaactgggttgagggaaattgtgagtgtaaacattttgatacctatctatctggtttgaaattattataggacttgttgttttaattggaaaaaaaaaaaaaaaaaaaaaaaaaaaaaaaaaaaaattcaaaatccctgcaaattaacgaaagatgtcacgcttaagcattctgattctcctactcatagtcctatccttcagttccgcactttcagaactatgcaacccacgagacaaacaagtccttcttaaaatcaagaaagagcttggcaacccaaccactctttcttcatggctcccaaccactgactgttgcaacaattgggtaggtgtctcatgtgacaccgtcacccaaacataccgcgtccacaacctcgacctctccgaccttaacctccccaaaccctactctattcctttctccataggtaacattccctacctggagtttctttccatcaccggaacccccaacatcattggcacaatacccccgacaatcaccaaactcaccaagcttcgtaatctctatatcaaatacaccaatgtctctggccagatacctcgtttcttgtcccaaatcaaaaccctagaattcctcgacctctcctacaacaaactctctggcaacctccctgcctggctcccttctctccccaacctcgtaggaatctccttcgacggcaaccgcatctccggcgccataccggactccttcggctacttcccgaagtcgttcgtgatgttgtcgctctcccgcaaccgcctcaccgggaagattccggcgacgttggcgaagctggacgtgaagtttgtgtacttgtctaagaacatgctggagggtgacgcgtcattgttgttcgggtcggagaaacacacgcggcacatgtatctgggaaacaattcgtttgcttttgatttgggaaaactagggttgtcgaagaccttggagggcttggatcttagccataatcgtttatatgggacgctacctaagggacttacgtcgcttaaggatctgtattatttggatgtgagctacaataatctatgtggaaagattccacggggtggtaaattgcaagaatttgatgcatctacctatgctcataacaagtgcttgtgtggctctcctcttccaagctgcaaacggttctagagctcaatggagcatatataagaacatagttcacttgtgcttacgagaaaattaagggtataagaataagataaattctcttaataaataaagagaaattctttaatgttcttaactataatgttaagctactttgataaaaaaaaaaaaaaaaactatctatgctaa

SEQ ID NO: 7910 - DNA, 2153 bp, Glycine max
cacgcccagggaaaaacacaagacggcgcacatagattttgtcgaagaaacatccgaggaacaaggttctgtgcagagcgggactgtgattcaacgggagtagaatgtcttgcgccaccttcaatgttgcagcttctttgaatcttcatggacgtactaagcaagcagtttctaagccatttgggtcaagaaatcactgtactttccctaagttttcttttctctattctgagaccttgaatttgagctccacttattatagttttggccgggatacaccctcacgctcattccatagtgtttttaaatgtcttgctcagaattcagaatcatcaccttctgttagcgttgacacaaacaacaattctcaaaaggtgactgttctggttattggtggagggggacgtgaacacgctctttgccatgccttgcaacgatcaccatcctgtgagactgtactttgtgccccgggcaatgcagggattgctagctcaggaaatgctacttgcatctctgaccttgaagtttatgatggagcagcagtaatctccttttgccggaaaatgggggtgggacttgttgttgtgggacctgaggctccacttgttgcaggtcttacaaatgagttagttaaggctggaatcccaacttttggtccatctgcagaggctgctgctttggaaggttctaaaaatttcatgaagcatttgtgtgacaagtatgatattccaactgccaagtacaaaacatttattgacccatctgctgcaaacgaatatatacaagaacaaggagcaccaattgtcatcaaagcagatggactggctgctggaaaaggagttactgttgccatgacactggaagaggcaaatgaagctgtcgactcaatgctggtgaagggtgattttggttctgcaggttgtcgtgtcattgttgaggaatttctacaaggagaagaagcatccttttttgcattggttgatggagaaaatgcaattccactagaatctgcacaggaccataaacgagttggtgatggtgacacagggccaaatactggtggcatgggtgcatattctccagctcctataataactaaggaacttcaatctatagtaatccattcaattatcatcccgacagtaaaaggaatgtcagcggaaggttgcaagtttgttggggttttatatgctgggcttatgattgagaagaagtctggcatgcctaagttaattgagtataatgtgcgatttggtgatcctgagtgccaggtcttaatggttcggttggagtctgatttggtacaagttctactttcagcatgtagaggagagttgagtgggttatcactgaactggtctcctgggtctgccatggttgtggtaatggcaagtaacggatatcctggatcatatgagaagggaactgtgattgaaaaccttcaagaagctgagcttgctgctccaggtatcaagatatttcatgcaggaactgcttttgactctgaaggaaaatttattgcaaatggggggcgtgttcttggggttacagccaagggaaatgatcttgaagaggcacgtgatcgagcttatcaagctgttgagaaagttaactggtctggaggcttctatcgtcgggatattggttggagagcccttcctcagaaacaatatgttacaaagggataaactacagctgagtcctagaacagtaatagacattggtcaacactcattagtggtaaatcgttttacaaacattagaaagtccccagtgtaagaggatggatcttgtcttttgtacttttcgggtgtaacgggattaggtaatgtggttacatcaagagctatggtgggaaacctcgtaagaataaacaatactaccgcccctcccataaaaatatggtgtatttcttcaataaaagttaacttatgtattaagatgtatgaagcaaatccttactcatgactttcttataggttgaaactcaaatgcagagttaaaacttgcttactatatctattgacccatgaccccattccccatttttcagtgtacttccattgcttctttaaggttagattactcagttagtctctgtatcatttagaaaatattaaacaaaaaagtaaaaagtctttattaccatttca

SEQ ID NO: 7911 - DNA, 1418 bp, Glycine max
ccacgcgtccggaggatgacacgtctgcacatcgatcatcaatctctgatttcggggatgacagttttgctgtagggagttgggagcagatcggcgtcgcgggcccccccccccatatgaagcttcagacacaggtcttctttgcttcaattgatcaacgcagtgaacgtgcagcaggtgagagtgcatgtacagctcttgttgctgtgattgctgactggttccaaaataattgtgatcttatgcccataaaatcacagttagatagtctaattagagaaggctcctcagaatggaggaacctatgtgaaaatgatgcctacagagagcggttccctgacaagcattttgacctggaaacagtcattcaagcaaaaatacgtccgcttactgtggctcctgggaagtccttcattggtttttttcatcctgaagggatggatgaaggcagatttgactttctgcatggtgccatgtcttttgataatatttgggatgagattagtcgtgctggacaagagtgccccagcaatggtgaacctcacatttatgttgttagttggaatgatcattttttcatcctcaaagttgaatatgattgttattacatcattgacactttgggagagagactttatgaagggtgcaaccaggcatatatcttgaaatttgacagcaacacaatgatgtacaaaatgccaaatgttgctcattcatcagataacaagacatccaatgaccagcaaactgtagcagaaatattagatcctaataatagtcaaacccaacaagtaaatagcaaggaggtggattctgttgcaggggaggaagaacagttgaggagtgagacagaagaagttatatgcagagggaaggaagcatgcaaagagtacattaaaagcttcctagctgcaatccctatcagagaattggaagcagatgccaagaaaggcctcatttcttcagcatccctttaccatagactactacaaattgagtttcattacccccaattgctaggtgaaccaccaatgcctgaaccagagacctcagctcttgcaatatctgaggcttctcccatacccaagctgtaaattgaagaaaatgcgtctatgctaacttattttactactttaaccattgatgttcttctgattttgaactgaatttaattataacatatggaggctcgtataagcttttggtgcgagcaaatgagtgagctgagcttttatttgcgcagttctgtttggcacttgccttgttttatatttacctgtaatctttcttgggaaggttattctgtaaatggctatgtagtttccttttcaagtcagtgcatacgtttggcatctgaaatgtaagttctaaacagattctactcttaaatggcagataggcttttagtttttacggac

SEQ ID NO: 7912 - DNA, 1668 bp, Glycine max
gtggataagaacaatggtcaaaaacagaaacagtcttcctcccaagatccttcaccactgtttatccagatcattgacaaaaagaaagcacaaaatttattgattctgttgcgagcattgaatgtgacaatggaagaagtttgtgatgcactttatgcaggtccggagccccccccccccctccttcaaaccttgctgaagatggcaccgacatcagatgaagaacttaagcttagactttttagtggtgatctatctcaacttggacctgctgaccgtttcctgaaagccatggttgacattccatttgcatttaagcgaatggaatttctgcttttcatgggctcacttaaagaggagcttgcaaccattatggagtcttttgccattttagaggttgcttgtaaggaactaagaaacagccggctgttcctcaagcttcttgaagctgttctcaaaactggcaaccgaatgaatgatggaacattccgtggtggtgcacaagcatttaaacttgatacacttctgaaattatccgatgtaaaaggaacagatggcaagactacactcttacattttgttgttctagagattatccgctccgagggcataaaagccatccgaaaggcaaaagagagccagagctcgtctagtattaaatcagatggccttcctgatagtacccaagaaacagaagatcactaccatgaaattggtcttcaggtggtttcacgcttgagcagtgaacttgagaatgtgaaaaaagcagcagttatagatgctgacagcttaacaggaaccactgccaaacttggctatggtctcataaaaacacgagacttggtaacaaaaaccatgaagaatgtggaggaagatagggggttttttgagacggtgaaaagttttgtgcagaatgctgaggctgatgttacaaagctgctggaagaggagaagaaaataatgactttggtgaagagccctggtgattatttccatgggaatgctgggaaggatgacggcataaggttgttcatagtagtacgagacttcttaataatggtggataaggtatgcaaggaggtgagagatacacggaagaagctggcaaaaactctaaaacaagagactcctagaggagcatcttcatctgaaacacgtccaccacctgattttcgtcagcggctttttccagcaattgctgaaaggaggatggatgacattagttcagacgacgagagtccatagattcaaattgaaagtggtattgagactgttacccttactaacatgacattgtatagcctagagcgtaattgaagacttggatagtgtttggcctggcttttctagaccctaaaaacctactttatgttaagaacaagcttcaattctagttaaacttgcttgataatttttcaatttcttagcttagaagtaacttgtaatttaaaagcttattgatagtgctctcttgggcattggaatttggaatatataagtaggaagagaagcactaaaaattatagtaagtttacctttataataacatttaaggtcaaaaaattatttttaattggttgataatgcaaaagtttactctaaaatgcatgtttattattactgtttctaaagagaagctaattttacattttagggattctgtagaat

SEQ ID NO: 7913 - DNA, 882 bp, Glycine max
ccaaaatctgacatttatgcttttggaatggtgatcttacagttattgacagcaaaaccagcaatagcacttgctcataaggttgaaacagctattgatagcgggaatttaacagacatactggatccagaggctggagcttggccatatcaagagacactagacttggctttgctaggattgagctgtgcagaacttcggcgaagagaccggcctgatttacaagatcatgtccttccaacactagagagattgaaagaagttgttgatagggcccaatgctcagcttcaattgttactattaaatccaaacctcctaatcactttatctgtccaatacttcaggatgtgatggatgacccttgtgttgctgctgatggatatacatatgatcgcaaagcaattgaaaagtggcttgaagagaacgacaaatcaccaatgacgaacatggctttacctcataagcatttaattcctaattacacactgctctcagcaattttggagtggaagtccagagaatcgtgatatcagcattatctttctccatgttaatattgagaccaatgatttctctgatgtagagagtggctagaaagtttggtgggtatgacctttagcagtgtcttggatgcagatttttttcgtagttgtaccattccaagcatgctgtctggttaatttaggtagagcgatttcaagtgtagataaatttgattctattgtctgattctgtgtatacatacatatgtcaaatcttgttcttactataaataaaataagaaccatgtatacattcaaggctagctaatgtataaacattcatgtgtactcttttttttttgaatgatatatcctcctgaatacataccctagttttag

SEQ ID NO: 7914 - DNA, 2449 bp, Glycine max
caaccacgcgcccgcccacgcacccaccacccaaccttcagtttctcagcaacttcgctttaacccgtgacggaaaaactcaaaaagcagcgtaaatcaaaatccttggaatcccttttgattccctcacttcagttttcaccttattcatctcaaagatttctcctttctctcctttcctctctctttcgccttctgggtgttttcaaaacgcgcttaaaaccgtgatgggtgccgtcgtcgagtgttacccacagccgcgcacggcggtgctgtccctgaacaccttgccgttagggttccgtttccgtcccaccgatgaggagcttattgactactacctccgctcgaagatcaacggaaatggtgatgatgtttgggttattcgtgagattgatgtctgcaaatgggagccttgggacttgcctgatttgtcagtggtacggaacaaggatccagagtggttcttcttctgtccgcaggaccggaagtatccgaacgggcacaggttgaaccgagctacgagtcatggctattggaaggcaacgggaaaggatcggaggattaagtctggctccaccttgattggaatgaagaagactcttgttttctataccggtcgtgctcccaaggggaagaggaccaattgggttatgcatgagtacaggcctacgctgaaggagcttgatggtaccaatcctggacagaatccatatgtcctttgtcgattatttaagaaacaagatgagagtcttgaagcttcaaacggtgatgatgtggatcggactgcttcaactcctatgactgccaattactctccagacgaaatacaatctgattcagctctggttccagcatcttcctcacaggttactgaagatgataagcctctaccagttatttctgagaactctgaggaagcaatatccaacattataacccctggtgagattcatagtgacggatgtaatgctcctgatgcacaagatcaaattgtagaaccagttgcagaggaggatcagccgttgaacgtggacatattttatgacccaacaaatctgccattagacgacaaattattctcccctgtccatgcacatttcccaacagatttttattatcaagctaacaatcaatcagaacttcagtatggtacaaatgagaatatttcagaattttttgactcggttgttaattgggatgcgttctctcatgatactagcagtctagatctgagctcatccttccttattaataatacggacaatggatcaggcagtgactcggatgttgaaatgaccaatatgccacatctgcaagcattacataattatcctaaggaggcagttgagcagaagagcaatgtgggattatttcagaacaatttccagatggcgttgtcaaatgatagtactatgggccaagtgcacaatatggtcaactattgcgagcaaccaagaaactttgatgcatttgttagtgctgatactggaatcagaataaggactcgtccaggaagaaatgaacagccaaacatggacacgatggtacaatcacaaggtattgcaccaaggagaatacgattgggagttgttaggcgtccgcttggttcccaggatgggagttgtgcttgtgccccagaagaccataattcaaaaaccatcattactgcagagaaaaaagcttcagaatcagaaaaccatgctgccgatgggagttccactgtttctgacatgagttccactgttacagatgatgtggatgaaccagaggaggcatctcccgagtcaaccgacctaagaaacattagtgagaaacatgttgcaactgcagaatccgtcgcagggtcgaaagtccttctagtgaacagaagggtccactacacctcaaaggtttcctctaaccgtgccacgtggtctaatgttctcgcagtttctgccgctgtattggtctcagcaatactccttgttaatatatgggcatatgtcagatcttaaactgcttacatgtagtggaagatcatttcttttgtgcgaaatttgcctccattgcttttttgcccggttaaggaggcgtgtaggattgacttgttctgacttgttgataacaatgttgtacaatatatatgtgcatatgtatgtagtagtcattccacaatatggtagcatagctgtctagtatgatagacacgtctgtgtcgtgttgccgcagttagattcacagtttgaccgtatccatttttgttttgaggttaagtttagttttctctcttggttagtgataataacacgcagttaccctgtgattttgagtgtcactttaccacttgtgctttgttcccatgtggttttgttgtatctctttttagctatgttaacttgggaaggaggattttgtgtagcttttgttaaactgtagataaagtattacagaagcccatagtttgttg

SEQ ID NO: 7915 - DNA, 1064 bp, Glycine max
gattggtggagtttatcaaagagatgcaatacaaggaattctgaaatttgacgagtgacgttccaaccggccacgcccaccgaaagggaaagcgctggaaaatgctgcgttccaccgcgttttctgttttcgggaagattaacttcaaaggcttaaaccaagcaacagagcacccagatatagagatttgactagtcatatccacgtgctgcatacacatacatacttttgttgtgctcagcttctattgtgaattgaagaacccatttgcattcaggcttagatcgcttaccacaccgcaccatatggctgttactgtggccatgttacctcgttggtcggtgtttcttctttttctgtttgtcttgtgtagctcaggagcaaaggttgtcgccattgatgtacatgcagcaaagcgtctcatccagaccggttccatttatcttgatgttaggacggtggaagagttcaagaaagggcatgtggatgcagttaatgtccttaacattccatacatgttgaatacacccaagggcaaggtaaagaatccagactttctgaaggaggtttcatcagcttgcaacaaagaagatcatctcattttgggttgtcaaagtggggtgagatctctgtatgcaactgctgatcttctgtctgaaggttttaagaatgtgaaagacatgggaggaggttatgtggactgggttaaaaacaagtttccagtgattataccagtggccaaagaggaactataataagtaatggataggaacattcatctttctttctaaatggttttatcagggagataccacatcccttcatatgtactacttcagagtgttcattagttcaacttacaacacttcatttcaatcctgcggctatgcttacaattatatttgtatctattccaactatgtaacacaagcattatcaggggaagactttcagagaccactctcattaattagtcttcttcatgtgcatataagatggactcatgatctgatgattgtcttgttattttgatatttattctgaaaaacaagcaattggattca

SEQ ID NO: 7916 - DNA, 1579 bp, Glycine max
ccccctcgagtcagctacgtaggccccccccccgctcactcttcctggtccctagtccctagtccctagtcccagtccgtagtccctaacaacacctactagaaccttcattcattcttgtgagccatgaacgtaccctccaccttcaccatcaccaccgccaccacacccaacctcgtggtgtgccccattccgtgagccatgccttcttcccccaagtcctacgccatctcctacgcgcgccagcccacgcgcagatccaccctctacctcctcctctccgccctcttcctcttcggaatcgttgctttcctcggccagattcgtggcagccgctgcgtcaacgcgcacccccgatcggtgcgcatcgtttgggaacactccgccggcaacggtgccgccggtagtggggtcggcgacggagacaggcataaggtgatggggtttgtgggcattcaaaccgggttcacgtcggcggggaggagagagtccttgaggaagacgtggttcccctctgatcgccaaggacttcaacgcttagaagaagctactgggttggcttttaggtttatcattggtagaacaagtgacagagcaaagatgtctgcgcttcaaaaggaagtagcagaatatgatgatttcattttgctggatatacaagaggagtacagtaagctcccatacaaaacgttagctttcttcaaagctgcttatgctctttttgatgctgaattttatgtcaaagctgatgatgacatatatttaaggccagatcgtctatcattactactggcaaaagagcgatctcatcctcagacatacataggatgtatgaaaaagggacctgttttcactgatccaaaactcaaatggtatgaaccattgtcacatttgcttggaaaggagtattttcttcatgcttacggtcctatatatgttctttctgccgatgttgtccaaagcttgattgcccttaggaatgacagtttccggatgttcagcaatgaggatgttaccattggagcttggatgcttgcaatgaatgtcaaccatgagaataatcatgaactttgttctacagattgtacagccacatctattgcagtgtgggatattccgaagtgttcaggcctatgtaatccagaaaagaaaatgttggaactccatcaaaaggaaacctgctctaagagcccaactctggaatcagatgatgaatagaatttgggggtataatacaaagcaaagtaagctcggaaggtagtgaaggagttgctgctcttgttattgattattgcttagagatgctaccactgccattcttttgatctttctaattctcctttcttccatttactagaagagaggtgattgtgttttatttccctagttttcattccccttgtatacttggagaggttagcgttggcctatatgacaaaggttcgttagggaaggttttttatatacatgagagaatagatcaagagatcattgttaatttactaatttcctgattttaatgtcattctttattggggttatacatattcggatttatgtcaaaaaaaaaaaaaaaaaa

SEQ ID NO: 7917 - DNA, 1608 bp, Glycine max
acaatacttgtaatattttgtgagtcgattcagtcagctacgtaggccccccccccggcagtgaatgaccaagaacaacatgaattttctaaccttcgttactgttctactcttcatactaccagcaacctcatcttcccagtatttggggaacaaccttctcactcatcgcaagatattcctaaaaaaagacaacattattacctcgtacgctgtcatctttgacggtggtagcacaggaacccgtgtgcatgtcttccattttgaccagaatttggatctccttcccattggtgatagtcttgagcttaataaaaagatcacacccggtttaagtgcttacgaggatgatcccgagcaagctgcagaatctctgattccacttttggaggaagcagaaagtgtagttcctgaggacttgcgtcccaacacacccgttaggctaggggcaactgcaggcttaaggcttttgaaagggaatgcttctgaacaaatattgcaagcggttagggatatgctgagtaacagaagtaccctgaacctacaatctgatgcagtaactattcttgatggaaaccaagaagctgcttatatgtgggtggcattgaactatctattgggcaatttgggaaaagtgatttcaaagacggtgggagtagctgatcttggaggtggatcagttcaaatggcatatgcagtctcaaagaatacagctaaaaatgcaccacaaccaccagaaggagaagaatcatacataaagactcttgtacttaatggaaaaacttatgacctctatgttcacagttacttgcactttggtaaagaagcatctcgtgcggagatgttgaaggtcactggtgattcagctaacccttgcattttagccggttataatgggacctacacatattcgggagttaaatataaggccttggcctccacttctgggtccaatttcgataaatgtcgagaggtagctcttaaagctctgaaagtgaatgaaccatgccctcatcagaattgcacttttggcgggatatggaacggtggaggggggagtggacaaaaagtcctttatgttactacatctttctattatctggttatacaggctggtatagccgatgcaagtaaaaccagttccaaagtttatcctgcggaattcaaggccgcagctaagcgagcgtgtcaagtcaaatttgaggatgctcaatccacttatccacttatgatggaggatgcacttccatacatttgcatggatattacgtatcagtatacgttgctcgtcgatggatttggcctggatccttggaaagagattatagtagcaaatgaaattgaataccaaggtgctcttgtggaaggagcatggcctctaggcagtgccatagaagccatatcttcattgcccaaatttaataaattgatgtattttatataacacttaaagagaagtgggcttcctttaattactaaataaaatgaagctcgatgtatatcaactctttctatccttattccattgtgtgtatgtggtcaccatttccgtatgattcatttgccaatatcatacaatcacattccaataaaaaaaaaaaaaaaaaa

SEQ ID NO: 7918 - DNA, 1089 bp, Glycine max
  misc_feature (1061)..(1061): n is a, c, g, or t
tacggctgcgagaagacgacagaaggggggcgtcaagattgatagttatccataagtgatgtttatccttaatttcattattagaggagttatatcaatttttttctaacacattttgttaatacattttttcttatttgttatatattataatattatgagaaaaatttattaaataaggtgtgagcgtctaaaatcatgtgattttcatacatttcttagtaagaaaaaagtgttcttagcacttctatttattacttagtacaggattttaattttaacgcttaaaatgtgacacaatttacatgtgaatctggacaagtccatgctgacaagaagtttgcctcgtacttcttaaattaacgtttttttttaagcacgtggttgtttggtcccatcgtgaaatttcatgtcgtgtctcattttattgttgtagtgagaaataggaaaggatatttatctatggcgatttgcaagttgaaatctttgctttctctttcgaaatgcaactctgcgttggtctcctcttcaatacgcgctttctcttcggcacaggttccccctaatcacttgcggaatgttggattcattgggcttggaaatatgggatcacgaatggcaaataatctgatcaaagctggattcagactcacagttcatgacctaaactctgatgttctcgagatgttctctcaaatgggagttcccacaaagaaaacaccttatgaagtttcagaagcaagtgatgttgtaatcacaatgttgccaacttctgcccatgtgattgatgtttacactggaccaaatggtttgcttcatggtggaaaactcctaaggccatggttgttgttagattcatccactattgatccacaaacatcaagaaacctttctgctacagtaactaattatatcctaagagaaaaggaaggtgaatgggaaaaacccttcaagttggatgctcctgtatctcggagtgttactgcagctgaagctgggacacttacttttatggttggtggctctgaggaagcatttcttgctgcaaagcccttactctnttcaatgggtaaaagtgcaatatattga

SEQ ID NO: 7919 - DNA, 1534 bp, Glycine max
  misc_feature (1519)..(1519): n is a, c, g, or t
gcaagctcggaattcggctcgaacataacccagtgagtctacccttatctctgaccatttctttctctgaagccaactccaaaactaacagacagaaagaaagagaaaaagaaacccaattcctgtttcaactgaaacacagcacacacaacaatcatcaatttctctacaaaaaataaccccacaaagaaaacaaactgaaacaacagcaaaaaagaaatcttcacctcagcttcctctgttccgtccttcctcgtcgccgcgccggagcatctcgccgccttcatccaccgcatcattcgcgagggaactcggaggtcatcgaattcgcgaagatgtcgcggttcccgttcttcaaccgttcgaacacgattcactcgacgaaatcggaatcctcgcagaaaccctacctcgtccaccaccatctccacaatcttgaccggtccggttcggtgaaccgcttctacggttcagtggactccatgaaatcctcaatccgcggaaaaatggtgaagaagctctgcaccttattcgaatcctccaaaaaacccttgccagaaccagaatccgaatctgaatcgttttcttcttcaaaatcacgttcaaaaacagattcagattcgtgcattactatattgtttcgattacccggcacagaggacagaatagttgtgtatttaacgagccttcgcgggattcggagaactttcgaggattgcaacgcggtccgcatgatcctgaaggggttcagggtttgggtggacgagagggatgtgtctatggacttgagctacagggaggagctgcagcatgtgctgggggagcaccatgtggcgctcccccaagtttttatacgagggaagtacattggtggtgctgatgtgatcaagcatttgtttgagagtggtgacttggcgaagatgattctggaagggctccccaagctgaaacccgggttcgtgtgtgacaattgtggggacgcgaggttcgtgccgtgcgagaattgcagtgggagcaggaaggtgtttgatgaggatgaaggggaattgaagaggtgcttggaatgcaatgagaatggactcctcaggtgtccgtattgctgttcttgattttgattaatgatgattttcatgggggttaattgggttgttgctcgttgaacatgtgttttgttttgttcaagactgggtgttttactttcttatcttggattgagatggaaaactggggtgagtgggggatgtgtatattatattctaatggagggtgtaaatatttagtggtgtacaagaatttgctaaatattggttgttgatggatgatagctttctaatgggaattatgggatgttttaatatatccctttattagtccaaaaaaaaaaaaaaaatctgtatatatattttttttactcacagattttttagagataatcttgttggtgagacagtaaaaatactaaaagttaatatctacatcatatctttgttaatcatgttgttttggtactagctactanctctgtgctagattc

SEQ ID NO: 7920 - DNA, 2504 bp, Glycine max
acaaaacacaaaaacaaaacctcaatctctctttcttcctttctctccctctcttcttcattcttaggagagaaaaacacaataaaactaaaccctctcttttcttaacgccgtaacgggcattcccaaaggcaccgtcacaaaccctcacgtgcgagtcacgtgtttttgtgaattctctttgccatggctctcgaccagctttcgaatcccaacgccgttgacggtgccggtaacggcgcgacgccgtgctccgctgtggacggcggcatcgaggacgggaggccggctgcgaggctgccgcggtggacgcggcaggagattctggtgctgattcagggaaagagcgatgcggagagccggttcagaccgggccgtggaagcggttcggcgtttggttcgagcgaaccgaaatgggcgttggtgtcctcgtactgcaagaagcacggcgtgaaccgggaaccggttcagtgccggaagcgatggagcaacctcgccggcgattacaagaagatcaaggagtgggagtcgcaggtgagggacgaaacggagtcgttttggctcatgaggaacgatttgaggagggagaggaaattgcctggggattttgacagggaagtttacaatattctcgattcgccgtcgtcaacggctgcggctgcagctgcggctgcggcggcggagactccggtgccggtggcgacggttgaggaggaggtgcacctctatgatagtaatcggagggtggggagtgaggatgggttattctcggattctgagaaggacgaggttttgcttttagctactaccaaggatgttcctgcacctgttcctatctcagaaaaattatgttgctgaaactgatggtagaaattggttttatgattgggccactggggtatatgttgaaaatttattgatgttcaagtaagaagcgtacttagaggatgaaggagagtgacaaaattttgaaactactaagggactgtttgcataaccgttaacggacatttcacacttttggagacagaaacacagaagcaagagaatggaagcgttaacttggctttcgtttcaacggaattacaaactagcaccgagagggatttagcatgtgtttggatttgcattaaattatctatagttacattgaaatacaactaatgtgattttaggaatatactcacataattagttttataccgaggaattgattctgattcataattgatatttgagttgaaataactttgacttatatttgtattggataatttattttatagagctttcctactaactggttttagaatttaaaacactaaacataaattactttatcgaatacgttagttttttaaacataaatcactttagtttaaatcaattttaaccaaacttagtcttgcaaaattatttttgcaaatgctcactcaaacacacacttagagttcaaagttaaatattatggcattattatttgatttatgtagcaagttcagctcgctcgagaaagatttggttgatattattgttgttgttggtaatgtctggtgttttttggtatatactaatgctgttgtgtttcttgtctctcgtgaagttggaaagtgtataggtatgttactggctttcattgctttggggacacttcttttttttatgaaagactaatttttagtgtttttcttttcttaattttattttttgattctagcaatgatgttgtttgttataaagttggaagtagtggaatgtggaggggaggatactgggattcccatatggcattcttcaattctatatttgttttttcttgatttttctttttcttttgatttgcagagaagcaatatcagccccatctccaaggctgcgaaggggaaggcaaccctcaaggtactaccaatgagaaacgggcaaacccaaatccagaaatgggttctacatctcaaggggaacggaagaggaagtggttagcaaccgatggagaggaggaaactttgcatagccaattaattgatgtcttagaaaagaatggcaaaatgctacgtgatcaacttggagctcagaaactgaatttccagttggatcgtcaacagcagaaagacactgcaagtaacatagttgctgtactagataagcttgcagatgctctagggagaattgctgataaattgtagagcaaggaggatcagaatagaatagtgtacataacaatttggagtcaacaatagtggttcccataatttatctcaggatagtttctagaagatgaacatcatactagttaccctttcttttttttaatcttctgtctgcattatgccacttttttgtggtttactactgccactaaggcattttatacacaaatttggaggttactgcattttatttattctcttctttcagtgaggttatatgaatctttctccggtcaataatagtggttgtacagatgataatgatattactattacttattaaggtacatttttatt

SEQ ID NO: 7921 - DNA, 1618 bp, Glycine max
tcagctacgtaggcccccccccctctctctagaatcttgaccaacgcgtccgcccacgcgtccgacgacagaagggctccgatcaagtgacacacgatacgaacaaaagctgatccatccagtcaacaatggaggaagttcaagagtctcaaacccaatcatcgctcggtcaagaagaggaaaatgaagtgattactgaaagttcagcatttgttaagggggaaccggcaccagaattcagtagtaaccccccaaaagttgattctgaagttgaggtccttcatgagaaggtcagcaaacaaatcattaaggaaggtcatggccagaaaccttccaaatattcaacttgcttcttccattacagggcgtgggctgagaaatcacaacacaagtttgaagacacatggcaggagcaacggccaattgagatggtcttaggaaaagaaaagaaagaaatgactgggttgggcattggtgtggcaagcatgaaagctggggagcgtgcgttggtgcgtgtgggctgggaattaggatatggagaggaaggaagcttctcttttccaaatgttccacccaaggcagatttagtttatgaagttgagctcattggctttgatgaaacaaaagaagggaaagctcgcagtgatatgactgtggaggaaagaattggtgcagcagaccggagaaagatggatggaaatgctttgtatcaggaagaaaaactagaggaggctatgcaacagtatgaaatggccattgcatatatgggagatgacttcatgttccagttgtttgggaagtatagagatatggctctggcagtaaagaatccatgccatcttaacatggcagcctgtttgattaagctgaaccgctacgaagaagccataggacaatgcagcattgtactgggtgaggatgagaacaatgtgaaggcattatttaggcgaggtaaggctagagcagcacttgggcaaacggatactgccagggaagattttctaaaggcaagtaaatatgcccctcaagacaaagcaattgctaaagaattgagattgcttgctgaacatgacaaggctgtttaccaaaagcagaaagagatatataaaggaatatttggaccaaggcctcaaccagttcctaagccaagaaattggctcatacttatttggcagtggttgctttcagtattctatggccttgtcacgctcttcaagcgtcaaaggcataaatctgactaaacaagaagaccattgctgagttgagttgacaattatttacgtgcatcctacgaaaggccacgtcttgtgctactgaggaaataatcatacttctactattttgctttgcttgtggaacaatcaaacgttgaaaaagcagtgctgatttctctcttaggagtcatctttgacaatgctatcaatcgcttatgttgctttcaaatagagtttggtagtttgtctagaaggaacttgttctttaatttaatctctagtaattgaaatgggaaatgatcagtgttgctgaaatcagatagttattttcaaaaagatttgtagtgtgcctttgaaatttgaattaattcatgatcgggtagatctaatgcatggatatttcc

SEQ ID NO: 7922 - DNA, 1018 bp, Glycine max
aatttcagccgtcttactcttcctttatttctctctctagaatcttcccagatcgagtgacagacgacgctaacaaaagccgatcaagtcaacgtaagagagttccactgtcttcccacttccacaattttcatctcccgtggtgtttggttcctcttaaattctaaactaatctagttagcttctttttttctttctctcctcaaattgtgtgtgcaacaaaaattttgtagaatggaggaacttcaagggtctcaaacccaatcatcgctcggtcaagaagatgaaaatgaagtgattactgaaagttcagcatttgttaaaggggaaccggcaccagaattcagtagtaaccccccaaaagttgattctgaagttgaagtccttcatgagaaggtcaccaagcaaatcattaaggaaggccatggccagaaaccttccaaatattcaacttgcttcttccattacagggcatgggctgagaaatcactgtaagtaccacactcaatcttagtctcactctgtcatgtttgcaatttagtgtgaaatccaatgatgccacgatgttttgttgcatgtttcctacttgtaaaacgctcttacataatttaagctgcaattgtgtgtataaaaaaaatatttgaacacaattgaacctatccctgttaaactacttgtgctttcaccataaattcgaggggtaagtcagacagccccagatttgagtattgctgtaatggaggggaatttgagacatgctaaagtactatcaaattatgtgatgtcagtattttctttttccttggaaaggcttttattgtgtctagtaaggtatagcaacttaagctataatttaagcaatatatgagaatggtttgatgtgaaaatgtaaaatgtttggacatctaatgttttttcaacataagaaaaaaatcctttgttgaggctgagtggggataaaagctgggaggaccaaaattatatctggaagtagttcctaatatctactactgtacta

SEQ ID NO: 7923 - DNA, 2698 bp, Glycine max
gtttatatgatcacaagaaaaacagtttttcatcaggtctcaatttcaaatcagacgttaaaccttcaatccttcatgtcattatctgctttgtcttctacctctatcactgctgcaaaataaggttgtacttttaaattcaaagcttataaagaaagggtattgattttgacattatgcttatttgtgtattttgcagggagtagcttcttctttctaagttgacatatgcacatggcttctcttggggatataggacttgcagcagcaataaacatccttagtgcatttgccttcttactggcttttgccatacttcgaattcaacctataaacgatagggtgtattttccaaaatggtatttgaagggtttaaggagcagtccattgcaagcagggatatttgtgagcaagtttgtcaatttggacttcaagtcatatataaggttcttgagctggatgcctgcagcattgcaaatgccagaacctgaactaattgaccatgcaggcttggactctgctgtgtactcgaggatctacttacttgggctgaaaatatttgtcccaattgcagtcctagcattttctgttatggttcctgtcaattggacaaatagcaccttggagcgttcaaatttgacttatagtcagatagataagctttctatttcaaatattccaaccggatcaaggggattctggactcatttggtgatggcatatgcttttaccttctggacatgctatatcttgaaaagggagtatcagatagttgcaacaatgagattgcattttcttgcatcagaacgacgccgtcctgaccaatttacagtacttgttagaaatgtaccacctgatcctgatgaatcggtcagtgagctagtggaacatttctttttggtcaaccatccagatcactatctcactcagcaggttgtttacaatgcaaagaaactttctagtcttgtttcaaagaagaagaaaaggcagaattggcttgactactatgaacttaaatattctagaaatcaatccacaaggccatctaaaaagactggttttcttggcctttgtggtaatagagtcgatgcaattgatttttatactgatgaaatcaagagactatcagaagaaatagaattggagaaacataaggtgatgaagaattctaaatatacaatgccagctgcttttgtttccttccgaactcgttggggtgcagctgtttgtgcacagactcaacaatctagaaatccaaccgtatggttgactgaatgggctccagaacctcgtgatgtgtattgggataacatggcaataccatatgtttcactaacaataaggaagcttataattgctgtagctttcttctttttgacattctttttcatgattcccatagcattcgtacagtcactggctaacattgaaggcattgaaaaagcagcacctttcctaaaatcttttattgaaatgcaattcataaaatcctttatacaaggtttccttcctgggattgctttgaagatatttctcatatttctgccagcaatattgatgataatgtccaagttcgaagggtttataagcacgtctgctctagaaaggagagcagccacaagatattacatcttccagttcattaatgtatttcttgggagcataattactgggactgcattccaacagctagataaatttatccatcagtcagcaaatgaaattccaaaaacaattggtgtctcaattccaatgaaggcaactttcttcataacttacataatggtggatgggtgggctggatgtgctggtgagattttaaggttgaagccattgatattttatcacttgaaaaacttcttcttagtgaagactgaaaaggaccgtgaagaagcaatggatccagggacatttggtttcaatacaggcgaacctcaaatacaactgtatttcttacttggccttgtgtatgctgtagtcacaccatttctacttccatacatcatagtgttctttggcttggcatatgtcgtctaccgtcatcagattattaatgtctacaaccaagagtatgagagtgctgcagcattctggcctgatgtccatggacgtattatatttgcgttagtgatctcacagctgctgttaatggggttattgagtacaaaagaagctgctaactcaactccattgctcattactctcccaattctgacaatatcattccatctgtattgcaagggacgatatgaacctgctttcgttaagcatccattacaggaagcaatgatgaaggacacattggagcgcgcaagagagccaaacttcaatttgaaagagttccttcagaatgcatatatccatccggtgtttaagggtgatgatgacagtgacagtgatgtaatgagcgaaaactgggaggagcaagaacctgtacttgtacaaacaaagcgccagtcccggaaaaacacaccattgcctagcaaacatagcggttcattatcatcttgaatgccacttcttatgagcataaaactagagcaatagatagtttgaagttcactattggtggcactgctgcatgatatacccaaactctactctcttttttttctgtatataaatcagaatctagataatctttcaatgaagtatataacagaagtatgcaggtcaaattttgacagtctgatccgtg

SEQ ID NO: 7924 - DNA, 1834 bp, Glycine max
  misc_feature (25)..(25): n is a, c, g, or t
  misc_feature (52)..(52): n is a, c, g, or t
ttttttttttttttttttcttttanctcattcatttgttttattttagtaanagcacgttccttttcaaagtcaatgaaatcttctagtcatgctttttcttccgtaatccgtatccttaaaagctttgtttctttctcgttcattcgacattgtggaactctttaaaagataatcgaaattaaaagtatacatttaatgactcccaacttggagatgaagattggattggtaaacattggacaacttcctcattctttctccatcataaccacatggtattatctctattctcatattcccatcataaccacatggtatgcaaaaccaagtcgttacgttctatcttagtgtagagagagataaagggtataatcacatcacttgcatgaccctgccttgtcatttcttgtgactagcagccacaacttagattacacactcaagcagtccagtcttcatcactttcattagcatcctctgaagcatttgaaaattcttcaatgtcatcaccatcatcatcaccatcttcaacatcgtcttccttgctttttgccttgatttttttaccaggatctttgtccgtggtctttcttgcccttttcttggatccttcatccagatcaatctttctttttgaaccagcaggctgtgacttctggccataagcttttgatgatggggatttccttgaacttcttggagttgtcttttcttccactttcttgaataatgtggatatagtagcctgaacaagtgatccacgattactggacttaacttcagtagatgcactcgctgaagcagattgagacacttccttacattttgatcgagaagcagactcattatttttcttggcaggttgatctactggtgcatcatcctcatcatcgaggtcaaaaactacagtttttttctgtatagcagtatcaacttccgccactttctcttcatgatcagaaaggtcagggctgttttcaccagaatcatcaccggaagaaatttcagcaaatttatatgatttttttgcagttcttgttgaatgccggaccggaaccaattcctttgtatcttctaaattgatttcactgtctgacaaatcatcttcggtgggtgtcttcggtgactcttgctctacacgttgaatcttggttctgggaacaccttgattaactacagaagctgcacctgcacctgcaccccctttaaagtcatactcagcttggtgtccctcatacaattcattaggaaattccagcttggattcttctgggttttcatctttcctcccgatccaccatgcatccgaaaatacaatcatgttatcaaaataatcctcacacattacactctttccacctttagggaactgtagagtcaagtatctgttctttggatatacaatggtcccgaagggcggcggggggccctcgggggctgcgaggtagagaacggggtttttggtgcccaagtccttgaggtcaccgatcttgccaccggcgatgggagcaattagcccggggaacgagaagaggtacctgcagctcttcctctgagacttcttgatgatatctttgccgtggtgcttggccacaacggaggaagggttgaggtgaacggagctccgtgcaggggtctccgagagaatcttgttggaaatggccaaggatttcagcctcttccgctctaacgtttctgggtttgcgacatcggtgtcttcaccttcttccttcttcttcgccttgcctcgggccattaaggggtggaagtgaagcttgtttcttcagtgttgtgtgtttgctcacacgcccccttctgtcgtcttctcccgg

SEQ ID NO: 7925 - DNA, 1089 bp, Glycine max
atagtagcctgaacaagtgatccacgattactggacttaacttcagtagatgcactggctgaagcagattgagacacttctttactttttgatcgagaagcagactcagtatttatcttggcaggttgatctactggtgcatcatcctcatcatcgaggtcaaaaactacagtttttttctgtatcaacttctaccactttctcttcatcatcagaaagctcagggccgttttcaccagaatcatcaccggaagaaatttcagcaaatttgtatgatttttttgcagttcttgttgaatgtcggaccggaaccaattcctttgtatcttttaaattgatttcattgtctgacaaatcatcttcggtgggtgtctttggtgactcttgctctacacgttgaatgttggttctgggaacaccttgattaactacagaagctgcacctgcacctgcaccccctttaaagtcatactcagcttggtgtccctcatacaattcattaggaaattccagcttggattcttctgggttttcatctttcctcccgatccaccatgcatccgaaaatacaatcatgttatcaaaataatcctcacacattacactctttccacctttagggaactgtagagtcaagtatctgttctttggatatacaatggtcccgaataacttcatttgaccctgtgggaaatcgaggtagagaacggggtttttggtgcccaagtccttgaggtcaccgatcttgccaccggcgatgggagcaattagcccggggaacgagaagaggtacctgcagctcttcctctgagacttcttgatgatatctttgccgtggtgcttggccacgacggaggaagggttgaggtgaacggagctccgtgcaggggtctccgagagaatcttgttggaaatggccaaggatttcagcctcttccgctctaacgtttctgggtttgcgacatcggtgtcttcaccttcttccttcttcttcgccttgcctcgggccattaaggggtggaagtgaagcttgtttcttccgggggggggcctacgtactgactcgagggggggcccggtacccaatcg

SEQ ID NO: 7926 - DNA, 1202 bp, Glycine max
ggccccgcgccccaccctcttcactttcattcactccgttgccatctcaaacccgaatccaaatccaaatccaacacgatgtcgtatcgaccttccgccaacgccaggaccgaggttcggcggaaccgctacaaggtcgccgtggacgccgatgaaggtcgccggcgccgagaggataccatggtggagatccgaaagaaccgtagggaagagagtttgctgaagaagagacgcgagggtctccaatcccagcagattccttcgtcacttcactctactgtaattgagaagaagttggaacaccttccagccatggttactggtgttttcaccgatgacaataacatgcagtttgaggccacaactcagtttcggaagttgctttcgattgaacgtagcccacctatcgaggaggttattcaagctggtgtagttccacgctttgttgagttcttgatgagggaagattttccacagctgcagtttgaggcagcttgggctttgacaaatatagcttctggaacttctgaaaacaccaaggtggtaattgatcatggtgctgtcccaatttttgtaaagctacttggttctcccagtgatgatgtccgtgaacaggctgtttgggcattaggaaatgttgctggagattcacctagatgccgtgatcttgttctcggtcatggagctttgcttcctctattggcacaattgaatgagcatgccaagctttctatgctaagaaatgctacctggacactatcgaatttctgcagggggaaaccacagcctgcttttgatcaggttaagcctgcacttcctgctcttgccagtcttatccagtcaactgatgaagaagtattgactgacgcttgttgggcactttcatatctttctgaccggacccaatgacaaaattcaaggtgtaattgaagctggtgtttgtagccggcttggtgagcttctattgcacccttccccttcagtgcttattcctgctcttcgtaccgttggaaatattgttactggagatgatttgcagacagaggttatcatcaaccatcaagctctttcacgtcttctgaatctcttgactaataattataaaaaaagcatatagaaggaagcatgctggaccatatcatacatcacagctgggaacaaaaagcagattcaggatgtaattgaggctagtataattgctc

SEQ ID NO: 7927 - DNA, 1336 bp, Glycine max
ttcgccctcgcgtgcgcccacgcgtccgcggacgcgtgggcagaagtattaaaatcagaaattaaacgaattgaattaatgcttgctgttgtcactgaggaaaggaataaattaagaaatgtggccaatttgaagaatgatgaagctctggatgcatcgaaaaatgcaaatcctgttcaggagcctgaatcatctcttatgaagaaagatgattgcattaaagatttagaaagtaccttgcatgagcaaagaatggttaataatcgtcaattagatgaaatgaagttacttaatgaaaagttgcatggtgaagcaagaagagtgaagtcactggagagggagagtgaccggctccggtcagagatttcattattagaggcaaagttgggtcatggtgatttttccgctgctaatacaaaagttctgcggatggtgaatacacttactgtcgataatgaggccaaacaaaccatagaggcactgcaaactgagcttcaaaaaacgaaagagaaattaaaagctgttgaagaattgaagagtcaatcaggcgaagctggaaagctggtagatagctacatatcggataagatgttgcaattaaaagagcaaatcgctacacttgagaagcgagaagaaagatacaagactgtgtttgcagacagaatttcagttttccggagggcatgctgtgagctttttggttacaagattgtgatggatgaacaccagcgttctaatggaatcccggtgacacggtttaccttgcaatccatttatgcacaaagtgatgacgaaaagcttgaatttgaatatgaatcagggaatactaacattttggcaaatcattatacatctcagcctgaagtttctcgtcaggttgagatattcattcggaaaatgaattcaattcctgctttcactgccaacataacagtggagtctttcaatagaagaaccttgtcttaaattcaacaatcaacttgtgtctaagtactgatattttttgcggcaactatcagttatgatgtatatatcttgcatcttcaagttcgggaatttggtcagctagtaaggatgttacgactggacacattttgtatcctgacattggtaatggatggcttggatttgaaaatgacacatttatttttttaaataattgaatagtgaggtggaattttgggcgtgtagacttgttgaggtttattttttttgtaagattacatttttcttgtcatctggtttttcaatttaggtgcctgttacggaaaaaaaaaaaaaaaattccgtagttgccatgatgcagggaataggagcttgtactctttattctaaa

SEQ ID NO: 7928 - DNA, 1900 bp, Glycine max
aattaaattaaatcctagctacgtttccctccccaagtgcacacaaaaaaatgggtcttcaaatcaaggaaccgctccttttcactcttgtaacaatatcacttatttcaattacaaaactcttgcattcttatttttctatacctttctctccatccaatctttccattgctattgccaccctcatttttgttctaatctcatacaaattttcctcatcctctataaaacactcttccactactctgcccccaggtcctctatctgttccaatatttggtaactggctacaagttggcaatgaccttaaccaccgtcttctagcatcaatgtctcaaacctatggtcccgtgttcctactcaaactaggttccaaaaacttggtcgtggtctctgaccccgagcttgccacccaagtgctccacgcacaaggcgtagaatttggctctcgcccacggaacgttgtgtttgatatcttcacggggaatggccaagacatggttttcaccgtctacggcgaccactggcgcaaaatgcgaagaataatgacactgccattcttcaccaacaaggttgtccacaattacagcaacatgtgggaggaggagatggacttggtggtgcgtgacctcaacgtgaatgagagggtgaggagcgaagggatagttatcagaaggcggcttcagctgatgctgtacaatatcatgtataggatgatgtttgatgccaagtttgagtctcaagaagaccctttgttcattcaggccaccaggtttaactccgagagaagccgtttggcgcagagttttgaatacaattacggggattttatacccttgctccggccattcttgagagggtacctcaacaagtgcaaggacttgcagtctaggaggttggcatttttcaacacccactacgttgagaaaagaagacaaataatggctgccaatggggagaagcacaagatcagctgtgcaatggatcacatcatagatgctcagatgaagggagaaatcagcgaagagaatgtgatctacatagtagaaaacatcaacgttgcagcaattgagacaacactatggtccatagagtgggcagtagcagagttggtgaaccatccaaccgtccaaagcaagattcgtgatgagatatcaaaagtgctaaaaggggagccagttacagaatccaacctacacgagctaccatacttacaagccacggtgaaagagacactgagacttcacaccccaattcctcttctggtgccccacatgaacctggaagaagcaaagctaggagggcacactgttccaaaagagtcaaaggtggtggtgaatgcttggtggcttgccaacaacccttcatggtggaagaacccagaggagttcaggccagaaaggttcttggaagaggaatgtgcaacagatgcagttgcaggaggaaaagttgactttaggttcgtgccatttggtgtgggaaggaggagttgccctgggatcatacttgcattgccaatactggggcttgtgattgcaaagttggtgaaaagttttcagatgagtgctccagcggggacaaagattgatgtgagtgaaaaaggagggcaattcagcttgcacattgccaaccactccactgtgttgttccatccaattaagacactatgatctgttaggtcataacaaaacaagcacttagcttctgaaaaagtcttgagagttgagtcttccggtgttgctttcttagatgcatttgtttatctttctatttcaattatatacagtatactgcgtgtaatgtttctccataaggcagtttgaattctgtcgttatcacttatgattaattcaacagtataaaacatagtttttctgtttttgcaaaaaaaaaaaaaaaa
